United States Patent Application Publication US 2020/0377945 A1 - sequence listing, part 33

SEQ ID NO: 5946 - DNA, 63325 bp, Unknown
  gut microbiota DNA sequence
aagtgattatactggggcatcttcatatgccattgtattttatagggacatttactgaatatccctacttataataaagtggagaatatttcgttggctggcttgaaaagcaatcaggacaaacgcgctttgcatgaccgttggcaaaaaccgggggatcatgctaagtttaaaggaatttcactaaccgaaacgacacccatctcttcacgttttgtattgcgggagaattatatcaaggccgaatccatatcggtcggttatgattttgaatcgcaagcagtacagaaactgggaatccagtctttgcgtttacaagcgaatacgacggatttattccgtatttcttcgatcaaggaggagcggggaattgagtatccgtttgcccgttcgttctcgttttcattgtctgcaatgttctaaaaatggaagttatgaatagaaaatatatattgataggattacttgtttgtataacgggtatattttcgggatgtcactcttggttggatgtgcagccggaagatcaggtgaccgacgggcagctgttcagtacggaatcagggtttcgcactgctctgaatggaatttatgtggaattgagcaataatgcgctttatggaggtgaattatcggtagatgccgtagagattttagcgcaacggtatgatttttcggggaatacgacaaatgcttatcggttgggaacatataattataccatagattatgcgaagagtaagttcgctgcagtgtgggagaaagcctattcgctgattgccaattgtaataaattattggaatatgcggaaaaaaatgaggaagtgttgacaggaaaaatgcggaaaatgattatcggtgaggcgatggcacttcgtgcttttctgcattttgatatgttacgtttgtttggaccggtatatgctaccaataaagccgatttgtctattccttataatacggtatattcaatttcggcaacctcccttttaccggctactcaggttgtggagaaagtactgaaagatttggatgaggcggaacgtttgttaggtgagtctgatccgattattgaagaaggaccgcaaaaccaggattcggaagatgggttgaattattatacttatcgtacacaacgcttgaactattatgcggtaaaagctttaaaagcaagggtatatttatgggcggacaataaggcggaagcttatcgggaagcaaaagccgtgacagctgtacaagaacaatggttcccttggaccgaacgccgggagattatggataatacgagaaatccggacaggatcttttcttcagaattgttgtttgcagcttattataatgcacgtgaagagatttttacgaattatttcagtcccactctggagcctgcacaagtgtattcacctaaaaaacatatcgatgatttatttacttgggatttgctggattggcgtaacagaccgatttggttggaaggcactacccgggactacaggtgtttccataagtatgaagacgtgtcgtcgactgaggtatggactaagttgatccctttgattcggatgacggaaatgtattacattattgcagagacagccacggatgagacggaggcgttggatgcgctgaataccgtattgtttaataggggagtgaaagaattggaggataaaacacaattggccggaatgcttcgggacgaatacaggagagaattttttggagaaggacagttgtttttttattataagcgtttgaatgtaaaagtattacattcttattcggaaaatgccgacctggatatggatgcagcaaaatacgtcgtcccgttgccattaagtgaaaccgattttcgttaaaagatgagttatgaaaaagaatgttatttttatattgcttttgacaatattgagcagttgtaaatcagaatatgaggaatatagcggtactgatgccatttatctgaatgagatatcggatacggtacgtttttcttttacttatgtcgacagtgaatatgaaacacaggcacaggatattcatctgaaggtgataggtaaggtggcagattacgatcgtccggtgaatataaaatttacaccggtaaatgcggtggaaggtgtggattttgaaccgttggagaaagagtatgtggttaagaagggagaggtttctcttgtgattcctgtaactatgatccggacgaaagccttacaaacggaagaaaagggaattgatatggaattattgcctaacgggcattttacaacttattacgattatggttccagcgattcgacctcttgggtaaagacgcagcggttaaagctgatattattgttttcggaatttatgaatgaaccgccttcgcagtggaatccatatatgttcggtgaattttcggcgaagaagtttgctttgatttgcgatgaaatggatattccacgggaagagtttaataaaaaatccgaggaggcgggttatatactttcccgcatggggtatatcggatcgtatatgaaaaaatatctggccgacgaaaaagcggcgggccggactgtttatgaagaggatggtattacggaaatgacaatgggaccacaggcccaataaatgaaatatgatgagaaagaatgtatatttaattgtatggttgatgactgttatactttattcgtgttacgatgataaaggaaattacagttatgaggatatcgatgagatttctattgcaggaatgccggacacactggtgacggtatttaaaaatacagatacactaaaagttgttccggagctgaaacacacattggctgccggaagcggaaagtatgagtatacttgggtggctgtcgcgaaagagaataaaaccggtaatgagttcgaatatgagattggtaaagagaaaaatttgaattattttatcgatttaccattgggaaaatacgctgtttatttgaatgtgttggaccaagagacagaagtgacttggcggcaacatttcgacatggaggtgattattcagacaactgaaggttggttggtgctgtgcgacgaaaagggcgaagtacgtttggatatgatctctaaatacggtaaccaggaattaatgattcgcaatttgctcgacgattatgccctgccgaataaaaagggaccgaaaagtatagtgttaaatataacaggatcgggagataaaatcatattgatgactgaaacaggggcttgttatttggatccggaaagtttggcttgggaagaagcattcgatttgaagtacgacatggggaaaataccgggagtatttgttccgactgctatgatttgtcttgatccgatgtatggctccggtacatatccttgttcggtattgttgacaacgaccgaagtgtattgtaaaacatcgggaagaattatttatgaattaccgagaaataatgtagctggagaagagaagacctttaaggttgctccctttatcattacatcggcagatggagtatggggatattatgaaccaccggttatcctttatgatacggacaacagacggtttgtacaactggggcttgcctggaatgaaacatcctgccgtatacccccggttgcaaatgaggtttttcccatggtaacaggaaaagagtttgtttatgctgctaataccagacatgatggtaacagctcgtatgttattttgcgtgatgataccggaaaattgtggttgcacgggttcggtaatttgtggtataattctttctctcagttgagtaattattattaccgaatcgatgctccggatatcgaacgtgcagaattgtttgctgtacacatgcattatcgttacctcttctacgttgtcgataatatgatttatctgtacgatatggcttataaagagtggcggaaactggatatattggacggagacggggagaaaatagatctttccggagaggaaatcacatttatcaaatttaactggttccagtatggtgaatacggtaggttaggattggatatggaataccggttgatcatcggttcggacaaaggtggagagaatggaggtatgattcgtatagtggatattccggagaggatgaatggaaaagtgaccttgtataaagagtatagcggttttgccaaaccggtggatatagtttatcgggaaagatattgatgagtgtggcagacaaggttgagtgaacgaggtttcttgtccgtgtttagtttagaaaatcgcgataaagacatattttatcgcgattttctttttcttttatctgtttccggctttccgaaatcttaaggactggtgggtttgaataggtaactttctgacaatcttatcttttttacaaaaaaagtagaaggaacatttggtagttactagaattgtaagtacatttgcactccattttggagaaaagtataataattttaaaagagtacttgtaaaatgcctactattcaacagttagtaagaaaaggaagagtaaagatcgaggacaagagtaaagctcctgctttggattcttgcccacagagaagaggagtttgtgtacgtgtttacactaccactccgaaaaaaccgaactcagccatgagaaaggttgcccgtgttagattgaccaacggaaaagaagtgaatgcttatattccgggagaaggtcacaatttgcaggaacactccatcgtattgatccgtggcggtcgtgtaaaagaccttccgggtgtgcgttaccacttggttcgtggtactttggatgctgccggtgttgccggacgttgccagggacgttctaagtatggtgcgaaaagaccgaaaccgggtcaggctgctgctccagctaaaggaaagggcaagaaataaaaattagtgattaacaggaattgtgtttatgaagcgttcccgaaaaacagttgagtaaatggttgggaaaccgttgaagaccaaaaagggcagcttgacgaacaaattcgtaaacgaaaagaaatgagaaagactaaaccaaagaagagaatcctgttaccggatccaaaattcaacgatgtactggtgacgaggtttgttaatgacctgatggtggacggtaaaaagactgttgcgttcaaaatcttttatgacgcactggatatcgttgaggaaaaaatggcaaaaaaagaagagaaatctgctctggagatctggaagcaggcattggaaaatattactcctcaggtagaagtaaagagccgccgtgtcggtggtgctactttccaggtgcctactgaaattaatccggcccgtaaaagagcgatctctgtaaaaaatatgatcctttactcccgcaagagaagcggacacagcatggctgaaaaactttctgctgaaattatggctgcctacaaagaggaaggtgctgctttcaaaaagaaagaagatacccatcgtatggctgaagctaaccgggcatttgcacatttcagattttaatttagaggcgaaaatagatggctaagagagatttacattacacaagaaatatcggtatcatggctcacatcgatgccggtaagactacaacgaccgaacgtatcctgtatttcaccggtgtgaaccataagatcggggaaacgcatgatggtactgcaacgatggactggatggtgcaggaacaggagagaggtattaccatcacttctgctgctaccacttgtttctggaaatatcagggaaacgaatataaaattaatatcatcgacactccgggacacgttgacttcacggttgaagtagagcgttctcttcgtgtattggatggtgcggttgcattgttctgtgcagtaggtggggttgaagcacagtctgaaaccgtatggcgtcaggcaaacaaatatggtgttccgagaattgctttcgtgaataaaatggaccgttccggggccgatttcttcaaagcagttcgtgaaatcaaagagaaattaggtgctaatccggttcctttggtacttccgatcggagcggaagataactatcagggtattatcgacctggtagaaatgaaagcttatgtttgggaaaacggtgctatggaagctaccgtgaaagaaattcccgaaaatatgatggctgaagctcaggaatggagagagaaattggtagaagctgctgctgtgcaggacgaagctttgatggaacgtttctttgaagatccggactctatcacagtcgaagacctgaaagcagtgattcggaaggctgtgatcgccatggacttctgtccggtgatgtgcggttcttctttcaaaaataaaggcgtgcagaacctgttggatgctgtgatcgcttatttgccgaacccgttggatattccgaacagtaaaggtactgatccccggacaggagaagatgtacatttccctgtagatccggaggctccgctgtcggccctggcatttaagatcgctaccgacccgtttgtcggccgtttgtgctatacccgtatttattctggtaagatcgaagccggttcgtatgtttataacccgcgtaccgataaaaaagaacgtatttcccgtctgttccagatgcactctaacaagcaacagccgaaagaagtactggaagccggagatatctgcgcttgcgtaggtttcaaagatatccgtaccggagataccttgtgttctgaagataaaccgatcgtactggagagtatgactttcccggaacctgtgatcggtatcgctatcgaaccgctgactcagaaagatacggataaattaggtatggctttggctaaattggctgaagaagacccgaccttccgcgtgaaaactgatgaagattcaggccagaccgtaatcagcggtatgggtgagcttcacctggatatcatcctcgaccgtttgcgtcgtgaatttaaagtagaatgtaaccagggagctcctcaggtatcttacaaagaagcgattactgtacctgtcgatcatcgtcatgtgttcaaaaaacagtccggtggtcgtggtaagtttgcagatattattttccgtatggaacctgcagaggaaggtaaagagggcttgacttttgtgaacgaagtgaaaggtggtaatattccgaaggaatttatcccgtctgtagaaaaagggttcaaagaagcgatgcagaacggtgttctggcaggttatgctttggaagctttgaagatcactttgatcgatggttctttccaccctgttgactctgatgcgttgtcgttcgaaatggctgctaaaatcggttataaagaagctgctcagaaagcaaaaccggtattgctggaaccgattatgaagctggaagtagttactcccgaagactttatgggtgacatcatcgctgacctgaaccgtcgccggggacaggtagaatcgatggattcccgtatcggtgcccgtgtgattacggcaaaagttcctttggcagaacaattcggttatgtgactgtattacgtaccctgtcatccggacgtgcaagttcttctatggaattcgatcactatgccgaagttccgaagaatattgcgagagaggtggttgaaaaagcgaacggacgtgtggatttaatctaaaaattaatgtcggagaggtctctggcctttccgaccgcttaaatataataaacaaaaaacatgagccaaaaaatcagaattaagttaaaatcttacgatcacaacttggtagacaagtcggctgaaaagattgttaagacagtgaaggctacaggtgcagtggttagtggtccgattccacttcctacccacaaaggagtatttactgttaaccgctctactttcgtaaataagaagagccgtgaacaatttttattatgtactttcaaacgtctgattgatatctatagttctactacaggtaccatcgatgcgctgatgaaacttgaattacccagtggtgttgaagttgagattaaagtgtagttaacggcgaaaccctatgtcgttaaaatgaagaattaacctattaaaaaagaaatgaaattaccaggtttaattggaaaaaaagtcggaatgacttccgttttcagtgttgaggggaaaagtatcccatgcactgttattgaatgcggtccatgtgtcgtaactcaggtgaaaaccatagaaaaagacggttacgaagcacttcagttgggttttgatgagaaaaaagaaaaacacacaacgaagcagctaagtggacattttaagaaggctggcacaactccgaaacgtaaactcgttgagtttgcaggatttgccgaagaacacaagttgggagatgtaatcgacgtgaccatactggaaggtactgcctatgtcgatatcgtcggtacctctaaaggtaaaggttaccagggcgttgtgaaacgtcacggtttcggtggagtaggacaagctacccacggtcagcataaccgtctgagaaaaccgggatctatcggagcatgttctactccggcacgtgttttcaaaggaatgcgtatgggtggccgtatgggcggagaccgggttactgtagagaacttggaagttttgaaggtaattcctgaaaataatttgttgttggtgaagggatctgttcccggatctaaaggttcatacgtaattattcagaagtaatggagttaagtgtactaaacattgccggacaggaaaccggcagaaagatagtgttggatgacgctatttttggaattcagcctaatgagcacgctatctaccttgacgtaaaacagttcctggccaacaaccgtcagggtactcacaagtcaaaacagcggaatgaaatttccggaagtaccaaaaagctgaaaaagcaaaaaggtaccggaggtgctcgtgcaggtagtattaagaaccctgagttcagaggaggaggtcgtatttttggtcccgtaccgagagattacagcttcaaactgaacaagaaattgaaaaaattggctcgtaaatcagctttggctgtaaaagcaagtgcaaatgctgtaaaagtcgttgaagacttcaccttcgaagctccgaagaccaaacaaatggttgctttgatgaacaacctgcaggtaaacaacggtcgtctgttgttggtattgggtaacggtgtgaacgaaaatgtacttctgtctgcccgtaacttgcagaatgtggaagtgatgagagttagcgacatcgcaacttacaacgtaatgaaggctaaaaaccttgttttagttgaaagttctgtagagggccttaacgaaatgttcaatcttaactaaaccaagaagagatggaaattattattaagcccgttttaacggaaaagatgacagctctcaccgataaacagcgtaaagtagcttttatcgtagcaaaagaggcaaataagattgagataaagaaagcagttgaagccatgtatggagtgaacgtattggctgtaaatacccagcgttatcaggggacggctaaatcccgttataccaaggccggtgtaatcagcggacgtaccaactcgttcaagaaagcaattgtgactttagcagaaggtgatagtattgatttttttagcaatatttaaataagatggctgtaagaaaattaaatcctgtaacgcctggacaaagaggaaaggtagtgaatactttcgaacaggtgactacagatagacctgagaaatcattgttgagaccctacagcaaaaccggaggtcgtaataacaccggtaagatgacaatgagatatataggtggtggtcataaacgcaaatacagagtaatcgacttcaaacgcgagaaggaaaatatacctgctaaagtagcaagtatcgaatacgatccgaaccgcacggcccgtattgccctgttagtgtatgcagatggtgaaaaacgttatatcgttgccccgatcggtttgactgtcggtcagaccatcgagagcggtaaaggagtcgctcctgaaatcgggaatacgctgtatttgtctgaaatcccattgggtacaatcatacataacattgagttacgtccgggacaaggagctgtaatggcccgtagcgccggttcttatgctcagttagttgcaagagaaggaaaatatgcttctatcaaattgccttcaggtgagatccgtatggtgctggttacctgtaaagcaaccgtaggtactgtatctaatcctgaccattctttggaacgttccggtaaagcagggcgtacccgctggttaggccgtcgtcctcgtgtccgtggtgttgtcatgaacccggttgatcacccgatgggtggtggtgaaggccgtgcttccggaggtctgccccgttcaagaaaaggtttgttggctaagggcttgaagaccagagcaccgaagaaggcttcttcgaagtatattattgaaagaaggaaaaaataactgattaaaacttgatgttatgagtcgttcgttaaaaaaaggcccttttattgatgtaaagctggaaaagagaatcctggcaatgaatgagaccaacaagaaatcggttgttaagacctgggctcgttactccatgatttctccggatttcgtagggcatacagtagctgtacacaacggtaataaatttatcccggtatatgtgaccgaaaatatggttggtcataaattgggtgaatttgcaccgacacgtacatttagaggtcacgctgacaagaagaaaaaataatagcgtgatgatgttgaacaaatgaagattgtataaaatgggtgcaagaaaaagaataaaagcaaatcagatgaaggaagccagaaaaacaaaggctttcgctgtgctgcatgattgtccttcatcacctcagaaaatgagattggtggcagaccttgtacggggtatggacgtacagagggctttggatacactgaaattttgtccgaaagaagctgctcgtaaagtggagaaactcttactttcagctattgcaaactggagcgtgaaaaacgaaggccagcgcgtagacgatgctgctttgtatatcaaagaaatctttgtggatggtgcgggtattctgaaaagactgcgtccggctccacagggacgggctcacagaatccgtaaaagatccaatcacgtgactatcgtgttgggaagtaaaaccgccgttgttgaaaacactgtaaaagagtaaagcatgggacaaaaatgtaatccaataagcaatagattaggtatcatccgtggatgggattctaattggttcggcggcaagaattacggtgacaaactggtagaagattacaaaatccgtaaatacctgaatgcccgtcttgcaaaagccggaatcgcaaaaatcgttatcgagcgtacgctgaagctcatcactatcacgatcaataccgcccgtccgggaattattatcggtaaaggcggtcaggaagtggataaactgaaagaagagctgaagaaaattaccgataaagaggttcagatcaatatcttcgagatcaaacgtccggaattggatgctgtgatcgttggaaataacatagctcgtcagttggaaggccgtgtagcataccgccgggctatcaaaatggcaatcgcttcaactatgagaatgggtgccgaaggaatcaagatcctgatttcaggacgtctgaacggtgctgaaatggcacgtgccgagatgttcaaagaaggaaggactccgctgcacactttccgtgctgacatcgattttgcacaggcagaggccctgaccacttatggtctgttaggtatcaaggtatggatctgtaaaggtgaagtttatggaaaacgtgaactcgttccgaactcactgctccagacccgtgacaacagccgtcctgcatcagctggtaaagctgacgggaaaaaaggcggtttcagaaagaagaaaaagtaagtagtcttttaatttaataaacgaagagctatgttacagccgaaaaggactaaatttagaagaagccagaaaggtaggatgaaggggaatgcccagagaggtaatcaacttgcattcggatctttcggtattaaggcgttagaagaaaaatggatcgaaggacgccagatagaagctgcccgtgttgcagtaacccgttacatgcaacgtcagggacagatttggattcgtatattccccgataaaccgattaccaaaaaacctgccgaggtacgtatgggtaaaggtaaaggtaacccagagggattcgtagcacctgtaactccgggaagaattattttcgaggctgacggtgttccgtatgcagtggcaaaagaggctttacgtcttgcagcacagaaattacctattacgacaaagtttgtggttagacgtgattatacagaagaatagtcttccggctattaagtttaaaaattaatttgtcagagagatgaaaaattcagaaattattgaaatgaccacagctgaacttattgaacgggtagagactgaaaaagcagccctcaataagatgacgatgaatcataccattacgccgatggaaaacccgatgcagattcgtgccgcccgtaaaaccatcgctcgtatgatgacagaaatacgtaagagagaattaactgaaaagaagtaaagcaatggaagaaagaaatcttagaaaagaacgtatcggtctggtactgagcaataagatggataaaactatcaccgttgctgtacattttaaggaaaaacacccgatttacggtaagttcattaaaaagaccaaaaagttcaccgctcatgatgaaaagaatgagtgtaatatcggtgataccgtgagaattatggaaacccgtcctttaagtaaaatgaagagatggagattagttgaaatcattgaaagagcgaagtaatcatgatacaacaggaaaccagattaacagtagcagacaacagcggtgctaaagaagtgctttgtatccgtgttcttggaggttccaagaaaagatatgcacgcgtaggcgataaaatcgttgttgctgtaaaaagtgccctgcctagcggtgaaattaaaaagggtactgtcagcaaagctgtggttgtacgcgtaaccaaggaatacagacgtcccgatggttcttatatccgttttgacgacaatgcctgtgtattgttgaacaatgccggtgaaatgagaggaacccgtatcttcggacctgtagcccgtgaagttcgtgaaggttatacgaaaatcgtttcgttagcccccgaagtactttaatgtcaaatgtcgaatgtcagaaagtcgaatgttcgggaatgagaatttttaaactcttgacttttggactttcgacaattaaaaaagtaaagagatgaatagaaaatttcatattaaaaaaggcgatttagtacaggtgaacgctggggaagataaaggcaaacagggaaaggtactggaagtttttccggataaggaaagagcgatcgttgagggaatcaacatgatcagcaaacataccaagccgaatgctaaatatccgcagggtggtatcatcaagcaagaagctccgatccacatctctaacctgaacgtgatcgatccgtctaccaacaaaccgacccgtatcggccgtaaaaaggacgaaaaaggtaacttggtgagatatgctaaaaaatcaggagaaatcctgaaataagacctgatttacgattccggatttacgattatagtgaaaaaacactctgatcgtaaatcaatatcgtaaagcaagaataaaaatgggatttacgaagtgatataatccaaaatattttatacctttgccgcctgaaaatctgatttttcggtcgactattgtgtgtaaaatcgtcaatcgtgaatcaaaattataattaaatagatgaaatacgtaccaaatcttaaaacaaagtataacgaagagattgtaccgactttaatgaaagaattcggatacaagtcagttatgcaggctccccggctggagaagatagtaatcaatcagggagtgggttcagctattcaggataagaagatcctggagttttcattgaatgagattaccgcgataacaggtcagaaagctgttgtaggtaaatcgacaaaagacgtatctaacttcaaattgcgtaaaggcatgccgatcggtgtgaaagtgactttacggaaagaacgtatgtacgaatttctggaaagattgatctgtagtgccctgccgcgtatccgcgacttcaaggggatcaacagtaagctggacggaaaaggcaactatacattaggtcttgaagagcagatcatattccctgaaattgtgatggattccgttcacaaaatcatgggtatgaacattacatttgtgacttcggctaataccgacgaagaaggttttgctctgctcagagagtttggattaccgtttaaaaagaactaaaaacaagcgaaatggcaaaagaatcaatgaaagcccgtgaggtgaagcgtgcaaaattggtagaaaagtacgctgcgaaacgagcaaaattaaaagaggaaggtgactatgctgcactgagtctcctgcctagaaactcgaatccgatccgtttgcacaaccgttgcaaactgactggacgtcccagaggttatatgagacaatttggtatcagccgtatccaattccgtgaaatggcttcacaagggttgataccgggagttaaaaaggctagttggtaatattaaaaaaaacgaaaagagatgacagatccaatagcagatttccttacccgcattcggaatgcggtaagtgttggtcataaagtggttgaaatcccgggttctaaaattaaactcgaaatgaccaaaatcctgaaagaaaaaggatatatcctgaattataagttcgaacaggaaggtgcaagaagcaatatcaaaattgcattgaaatatcatcccgagacaaaagtaccggctatcaaatcactggtacgtgtgtcaaaaccgggtttacgtcggtacactaatgtggaagaaatgccacgtgtattgaacggactgggtattgccattttgtctacctcaatgggattgatgactgacaaagaagctcgccagcggaatgtaggcggtgaagtattgtgttatgtgtattaattttaaagtgaagaagaaatgtcacgtatagggaaattaccgattcatataccacaaggagttactgtagcagtaagtcctgataacaccgtcacagtcaaaggtccgaaaggacaactttctcagcaggtaagtgctgatctgactgttaccgttgaagagaacgaagtgcatgtagcacgtcatacagaagataaagaacacaaagcacagcatggtctgtaccgtgcattgcttcataatatggttgtaggtgtttctgaaggttataccatcaaacaagaattagtaggtgttggtttccgtgctaacgctgagggtcaggttctcgaactgggactgggatattctcactctatcttcttgcaattaccggcagaggtgaaagttacagccgtaactgaaaaacgtgctaacccgattattacgctcgaaagctgtgacaaacagttgatcggtcaggtagctgctaaaatccgttctttccgtaaacctgagccttacaagggtaaaggtattcgcttcgttggtgaagtggttcgccggaaagcaggtaagtcagctaaagtttaattactaaaggaagtaaaaagttatggctttaacgaaagaagaaagaagattaagaataaaacggagaattcggaagattgtctccgggacagctgaacgtccacgtatgagcgtttatcgttcaaatgcgcagatatctgtacagctgatcgacgataaagcaggtaagactttattatctgtttcatctttgtgcaaggaaattgctgagaagaaaggcaacaagaccgaacaggctgctttcgtaggggctgctgtagcagaaaaagctaaagctgccggtatcgaagctgttgttttcgacagaaacggttatttgtatcacggtagagtaaaagcattagctgatgctgcccgtaacggaggtcttaatttttaataagttagcagaatggaacaaaaagtaaataatactgacttggaattaaaggacagattggtagctatcaatcgtgtgaccaaagttacaaaaggaggtcgtacattcagtttcgcagctatcgttgtggtaggtgacgaaaacggaatcgtaggctggggattaggaaaagcaaacgaggtgactacagctatttctaaaggaatcgaagctgctaaaaagaacctgatcaaagtacctgtattgaaaggaactattcctcatgagcaggtagctcgtttcagcggttctgaggtttatatgcaacccgcttcttccggtaccgggctggtagccggaggtgctatgcgtgctgttttggaaagtgccggtattcacgacgtattggctaaaagtaaaggttcgtccaaccctcacaatttggtaaaagctacgatagctgcattgaaagaaatgcgtgatgcccgtacgattgccgctcagagaggcattagtctggataaagtgtttaacggttaatatttgaggatcatggcaaagattaaaatcacacttgtaaaaagtaaaatcggtagcgataaaactcaggtaggcactattcaggctttgggattgaagaaaaccaacagcagtgttgagaaagaagctactccgcagatcctgggaatggtggcaaaaatcagccatctggttcgtgtggaagaagtaaaataagtataaacattttaagaacgaaataaaatggatttaagtagcttaaaaccggcctgcggatcaactcatcacgaaaaaagaattggtcgcgggcaaggttccggaaaaggaggtacttctacaagaggacataaaggagctaaatcaagatcgggttaccatacgaagattggttttgaaggtggtcagatgcctctgcagagacgtgtaccgaaattcggctttaagaatatcaatcgtgtagcctataaagctatcaatgtaagcatgttgcaggctttagctgaaagagataatctggagaaaatcgatcgggatattctgattgcagccggattgctcaataagaatgaattgttgaaagttttgggtgacggctcaatcagtgctaaactcgaaattacagcaaatgcattctctaagtcagcgattgctgcgatcgaggctgccggtggctctgtagtcgttttgtaaaacaaaacgagtttataaagttcataaagttcataagttcataaggtaattttaactttgtaacttttaaactttataaactttataaacttataaataaaagaacttatgaagttatttgatacattaaagaacatttggaaaattgaggaattgaaaacccggattctgacaacactcgggttgattctcgtttacagacttggaacagaggtggtactaccgggtatcgaccctgccggattagccgctttaaaacagcagacttcgagtggtgtgctgggattgctggatatgttttcgggaggtgcattttcgaatgcttcgatctttgccttgggaattatgccctatatctctgcttctatcgtagttcagttactgggaattgcggttccttattttcagcgtatgcagcgtgaaggggaaagtggacggcgtaaaatcaaccagattacccgttatctgaccattatcattctgatattacaaggttctgcgtatcttaccaacttgcatgcacagattcagcccgaattctttctgataaaaggggctttctttacaatctattccgtaattatcctggctgcgggctctatgttcgttttgtggttgggtgaaaaaattacagataaaggtattggaaacggtgtttctatcattatcatgattggtattatcgcccgtctgccgtttgcattctttgccgaactgacttcgcgtgttagtcagcaaggtggcggattggtggcattcctgatcgagattattctgctgtttttcgtattctgcggtacgatcctgctggtacaaggaacccgtaaggtgcctgtacagtatgcaaaacgtattgtcggaaacaaacaatatggtggagtacgtcagtatatccctctgaagattaatgctgcaggggttatgccgatcatttttgctcaggcaattatgttgttaccgatttcttttgtgaattatgcagcttctgaatcgttatccggttttgcaactgctttttctaatttcaccggtttttggtataacttcactttctttatcctgattgtggcatttacgtatttttatacggcgattacggttaatccgatgcagatgtccgaggatatgaagaagaacggtggatttattcccggtgtgaaacccggacggaaaacaatggagttcctggataccattatgtcacggattactttaccgggatctatattcctgggaatagttgccatattaccggcttttgcaaccattgccggagtgaaccaacagtttgctcagttctatggcggtacttccctgttgattttggtcggagttgttttggatactctacaacagatcgagtcgcatttgttgatgcgtcattacgacggattgatgaaaacaggacgaattaaagggaagactcccggtggaccggctgcctattaatagtgaatgagttgctaagttactgagttcagaaaaacttagtaactttgtgactcagcaacttagaaacttgaaatattttttgtaattttgcggcatgatttttgtaaaaaccggagaagagattgacctgttaagagaaagcaaccgattggtagggatgactctgggcgagatggcaaagcatattcgtccggggatttctacattagagctcgatcgtattgcagaggagtttattcgtgaccacggtgcagagcccggatttttgggttacggtggttttccgaatacgctttgtatttctgtaaatgacgttgtcgtgcacggtattccctctgaaaaatgtgttttacaagagggggatattgtttccatcgattgtggcactttgaagaacggtttttacggtgatagtgcctataccttcgaggttggggaagtggatgaagaaatccggaagttattgcgggtgacgaaagaaagcctttataaaggaatcggaaaagctgttgcgggtatgcggatcggagatataggacatgcagtgcaatcccattgtgaggccgaaggttattcggtggtgagggagatggtaggacacggagtcggacacgatttacacgaagagcctcaggtgcctaattatggccgtcaggggcagggggtaaaactgaaagaagggatggtgatcgcaatcgaaccgatgatcaatttgggtaaaaggcatatttatcaggaagccgacggatggacgatccggacaagggacaaaaagccggcagctcatttcgagcataccgtagccgtagggaagaatagtgcggatattttgtctacgttcgaatatgtcgagcaagtattgcataaatcgtaaatcataaatcataaattaattgtttatggcaaaacagccgtcaatagagcaggatggagtaataacggaagcattgtcgaatgccatgtttcgggtagaattggaaaatggacatgtgattacagcccatatttccggcaagatgcgtatgcattacattaagatacttcctggcgaccgggtacgtgtggatatgtccccttacgacctgacaaaaggtagaattacatttagatacaaaaactaaaatttaatttttgatttacggtttttgatttcggatttagctgtatggcttttgattgaaaatcgtaatgcgtagatcatgaatcataataattcaaattaaaggaccatgaaggtaagagcgtcaatcaagaaacgtaatgacgattgcaagattgtaagaagaaaaggcgttttgtacgtcattaacaaaaagaaccctaagtttaaaatgcgtcagggttaatcattaatctagttaaattaaaaaagatttatggcaagaatcgtaggtgtagatttaccctcaaacaaaagaggagaaatagccttgacctatatctatggtataggtagaagtagtgcacgtgctatcctgagtgaagccggcatcgattatgacctgaaggtgaaagactggaacgacgaccagctcggggctgtacgaaaaatcattggaacagagtacaaagtcgaaggtgagttgagatcaagcgttcagatgaacatcaaacgactgatggatatcggttgttaccggggtatccgtcaccgtttaggactgcccgtaagaggacagagcacgaagaacaatgcccgtacacgtaagggtaagaagaaaactgttgctaacaagaaaaaagcaactaaataattgagttgaattatggcaaagaagtctacatcaagtaacaagaagcggctggttaaagtagaagccgtgggacaagcacacgttcattcctcatttaacaacatcatcatttctttgaccaattctactggtcaggtgatttcatggtcttccgccggaaagatgggtttcagaggatctaaaaagaacactccgtatgcagctcagatggcagctgccgattgcgctaaggtcgcattcgatctggggatgcgtaaagctaaagtatatgtttccggtccgggtaatggccgtgaatcagccattcgttctattcacgccagtggtatcgaagttgctgaaatcatcgatgttaccccgcttccacacaatggttgccggcctccgaaacgcagaagagtgtaataaagctaaaagctaaaagcgaaatgctaaaagcaagaaaaggccgaaagcctgtagcttatagcttgtagcctatagcttatgaatgttgtgtaaatttaaagaatagaaacaaatggctagatatacaggacctaagtctaaaatagcaagaaagttcggtgagcctatttacggaccggataaggcactggaacggagaaattatccgtcaggacagcacggtttggctcgtcgcagaagaaaaatctctgaatatggtgttcagttgaaagaaaaacaaaaagcaaaatatacctatggtttactggaaaaacaattccgtatcctgtttgaaaaagcagaacgtgcaggaggtgttaccggtgaagtattgttgcagatgctcgaatgtcgtctggacaatgtcgtataccgtttaggtattgctcctacccgtgctgcagcacggcaattggtttctcatcgtcatatcacggtgaacggtggtgtttgtaacattccctcagcagctgttaaagctggggatgtcgttgcagtacgtgagaaatccaaagctcttgaagtggtagcagatagcctgcgtagtaaccgtgtcagcaaatattcctggttggaatgggacggggcttctatgagtggcaaactgttgaacgtgccggaaagaagcgatattccggaaaacattaaagagcagttaatcgtagaattgtattctaagtaaaaaaaattaaagatatttatggcaatattagctttccagaaaccggacaaagtaatcatgctcgaatcgacagacaaattcggaaaattcgaatttcgtccgttagagccaggttacggaatcacaattggtaatccgttacgcagaatcctactgtcttcattggaaggcttcgcgattaccggaatcaaaatacatggtgtagaacatgagtttgccaccatccccggggtgatcgaggatgttaccgagattatcctgaatctgaagcaggttcggttcaagagaaaagtggaagatgtagaggatgagaagctgacggttctgatcaacggtcaggaagcttttaaggcaggggatatcaacaaattcctcacaggattcgaggtgctcaatactgaactcgtcatctgtcatatggacccttctgttaatttccagatggaaattacgatccagaaagggcgcggttatgttcctagtacagaaaatatgccggcagaggccgaagcgggatttatccctattgatgccatttatactccgatccggaatgtaaaatatgaaattgagaactatcgtgtagaaggtaaaaccgactatgaaaagttgttgtttgaaattgaaaccgatggctctatcgctcctaccgatgctttgaaagaggctgcgaaaattctgattcatcactttatgttgttctcggatgaaaagatttctttggaatctgaagacaagtacggtaatgaggaattcgacgaagaagtgcttcatatgcgtcagctgttgaagactaaattagtcgatatggacttgtcagtgcgtgcattgaactgcctgaaagctgccgaagtagaaacactcggggaattgtgccgcttcaataagaacgacctgttgaaattccgcaacttcggtaagaagtcgctgaccgaactggaagctctgttggaaaataacaacctcgaattcggtatggatgttacaaagtataaattagataaggaataacatcatgaaccataagaagaaatttaatcatctgagccggaccagtgcacatcggaaagccatgttgtccaatatggccgcttctttgattctcaacaagagaatcagcacgacagtgcctaaggctaaagcgctcaaaatatatgttgagcctctgatcactaaaagtaaaaacgataacaccaattctcgccgtgttgtatttagttacctcggacagaaagaagccgttaccgaattgtttagcgaagttgctccgaaaatcgtgaaccgtccgggaggttatacccgtatcctgcgtaccggtaatcgtatcggtgataacgctgagacttgtattatcgaattggtagacttcaatgccacttatactgaagttaaacaggaagtgaagaaaacaactacccgtcgtcgtcgttcttcaggcgctaagaaagctgaagctaccggggctgcagtagttgaagaagctccgaaagcagaaactcctgcagaggaagctcctaaggctgaataattcttttacaggaattcagatagaaggcggatcctgaagatccgcctttctttttaaatacaaagccatgaaaatcttttctctttttttcttgcttttattttttttcgcttgtacgcagcagcaaaacgacagcgaagtggttttagctgcaagtccggaacaaacgctggatttggaaggtgaaatattacctatacaggaattgataccgatgagtatctgccgtctcgatacttttttggtgattctgaatatggaggaagagaaaatagtgagggtgtatcatgcggatacctaccggtttttaggggcctttctggaaaagggaagagggagcgatgaagtgattacctgccgtaaaatatgggcggctccctggaaaggtaaaatgagattatggctacaggctccgttgaattttgtcggagtcgtcgatttggaaagttcattaaaaacaggtaaaccttgttggaaacaacagtataaattggggaggtacgtaaaaagtgatcatttataccgttcagtttttcctttgaatgattctgttttctggatatcgtgtgccgaagaaccttcgtggctttacccggaagggacattgaaaaaaaatccggatggtagttataccgttatttctgaaaaaggggtacagagttttcctccgaaaaacttgtattggctggaattcaattacgcttcttctcaggcacaagatactgtttggtatacgtcttataccgatttacagtatttcgaccggattttttcaaccgaagaggcgatgtcaccggatcagcataagattgtcgtggcttttcagctgatgaatcagatgttgttctttgaccggaagaagcttacttcaaagtggctgactacttcgactgaattacctttgccccacacaaccgatggacaacattattccggggtttgctgtaccgataagacagtacttgcatttcgggcttttcctttgcatccggatggcagaaaaagagaacgtaacatctccgtctttgactggaacggcaaattcaaatatctactgaatatcgaacaccccctgaaagctccttttttcgatgcagaaaagggatttctttatgctacggacgatgaagaccgtatccggaagtatgctgtcggggaatttctttaatcacatcggaaattatatatttgctcattataattaaaaccggatttatgaagattttctacctgctttttctagtttttctttttatgagttgtgcagaacggggtaatgaagagaagaaagtaatgattttaggggtaacacctgaacaaatagtcgagttgaaaggagaggaattacctatacaggaattgatcccgacgagtatctgccgtctcgattcttttctggtgatactgaatatggaggaagagaaaatagtgagggtatatcaggcggatacctatcggtttttaggagcctttttggaaaaaggacggggagatgatgaagtgatcagctgccaggaaatatgggcagctccctggaagggaaaaatgaggctgtggttgaaagctccccaaaatttcataggagtcgtcgatttggaaagttctttaacagcaggtaaaccttgttgggaaaagcaatataaatttatggatcggggtatggccgatttcttataccgcccggtttttgtcttgaacgattcggtgttttggatttcccgtgccgaaaggccttatgatattataccgaatcagaatattagaaaaaatgctgatggtagtatacggattctgtctatgcagggaacgacgcaggtaggaggtaagaatttgtattggttgagctataattatgcttccgctaccgttttagatagcgtatggtataccgattatgacgacatccgggattttgatcagctttttctcggggatgaagcgatgtcgcccgatcgccggagaatagcggtggcctttcgtaatatgaatcagatcatattatacgattcaaaaatgcaaaacttccgttggctgacaacggataacgaattgccgttattgaattcttccgagtcattcggggaaaattattctggagtcgattgtaccgataaaacggtttttgcctacagagcttttcccgaggatccgcggcgtccggtcaaacttggcttttcggtggaggtattcgattgggaagggacttttaaatttcaactcaaactttcccatccccttaaatatccttttttggatgcagagaaaggttttttatacgctacggatgaagaagactgcatccggaagtatgatgtcagggattttctatagtggccgatgcccggttatttttgcaggtcgaatccgagcatcatgccgtcgtattgttgggctactttgttgacagccgataaagtactgctctttgaataacccgacagtaaagtgaccagttttagtaatcggtcggcattgaagaggaaagtcgtgccgtctttctttcccgatagttgtacttcggtgtttaataaaccgaaataacttaacgtcaaaatttgattagagctatcataagcataggtacctttcaattcctttttccctatttggcaggtaaaggtggaatcatggttgaaagtgtatgagaaattgccggttctgattcctgctttttcataagctttttcgagtttgccttccattgtttcacccagggctatacctcctgccttttggagtaattcctcacttttaaattggcaggctgctcctttgtattgccaggtcccctgcaagtcttcgaatttgagtgctgtcgcttcctttacggcatcgatgactttttgtgctgtttctgattttaggatgtctttcaggctctgtgcttctgttttttccgggaggatgaaaaataaagccgagactacaaataaggtaaccgggatctttttcatatcttttagattattttttgcaaagatataagcttccttctttatttgataaaataaccgacaatttaccggattttatagactgaaataatcatacaatagatacagtttatgttttatgtaaattttataaatgaaagttaattcttcatttttaattcttcattcttcattcttttgtcgtaacttgtgtcagcaaaataaaatgtataatttaaaattacgacaaaacgatgacacatattgtagatattacaggccgcgaaatattggattctcgcgggaatccgacagtagaagtagatgtaactctggaaaacggagtgatggggcgtgcagctgttccttcgggagcgtcgacaggcgaacatgaagctttggaattgcgcgatggggataaatcccgttatcaggggaagggtgtattgaatgctgtcaataatgtcaatacagtgattgccgatgctttgctgggattcgatgttaccgaccaggcagcaatcgaccggttgttgatcgatctggacggcacgaagacaaaatccaatttaggagccaatgccatgttgggcgtatctttggcttgtgcaaaagctgctgccggcgctttggaaattcctttataccgctatatcggcggatgcaatgcaaaagtattgcctgtgccgatgatgaatattatcaacggaggttcccattccgattctcctattgcttttcaggaatttatgattcgcccggtgggagcgaaaaccttccgggaagctgttcggatgggagcagagattttccataccctcaaaaaagtattgcatgatcggggattgagtacggctgtaggagatgaaggtggtttcgcacctaccttgaaaggtacggaagatgccttggaatctattatcgaagctattaaaaaagcgggttacaaaccaggcgaaggggtgatgatcggacttgactgtgcttcttcggagttctataaaaacgacatttacgattattccatttttgaagggccgaatggagcgaaacgtacttctaccgagcaggtactttatctggaagagttgatcgataaatacccgatcgattcaattgaagacggtatggctgaaaatgattgggatggctgggaaatgctgactgcaaaaatcggtgatcgttgccagttggttggagacgatctgtttgtgactaatgtcgaatacctcaagaaagggatcgaattaggatgtgccaattcgatcttaattaaagtgaaccagatcggaacgctaaccgaaacactggatgctatagaaatggctcagcgtgcagggtatacgaccgtgacgtcccatcgttcgggtgaaacagaagatgctaccattgcagatattgccgtcgcaacaaattccggtcagattaaaaccggttcgatgagccgttccgaccgtatggcgaaatacaatcagcttctgcgtattgaagaagaattgggtgaagatgctgtgtttgccggaaagaagttcaatcttaagaaataatacgaacgaaacaacgtatccggtttttttagttacagaggttacaaaggtgaaaaggggttcggaagtttatccctaagccttgtaacctcttgttaattgtatattgaaaacaaatggctgtcaaaaccatcttttccgtttgaagaaaaatagcatcaggataacgatagcgatcatgatcccccacaggataaaataggcatagcggtatctgaggaaagggatatagtcgaaattcattccgtaaactcctacgataaaggtgagggggatgaaaatagctgaaaagatcgtcagcactttcatgatgtcgttgacgttattactgatggtagcattgtagctgttttgttggtcggaaagcatggtgtagtagatttcgatagcttccagggcttgggtaaccaaaccttccagatcgcgcagatagttgtaagtatgatcgttgatcaagtcggaatcgcaggtgacgaaacgggtcatgagctcttttacaggacggacattattccggacataagataattcggtcttatagtggtaaatattctcgacaagctccttccctgatgtgagcaataatttttcctgttcctcgatcacattacctaatttttcgatattcaatatataattatcgaccaaggtatcgatcatcgcatagcagagataatcggaggataaacttctgatttttccttgtccggcatatattcttttcgagacatcttcgaaatactcgttatccgtttcctgaatggaaatcaggtaattttttccgacaatcaacgagatctgatcgatctgaaccttacggagttctcggttgaaattcagggatttcaggataacgaacaaatgcttgtcgtcttcgataaatttgggacgttcgtccgtattcaggatgtcttccaggatcagggcactgatgtcgaatttctttccgagtttgccgatcaggttggtatcctgtaagccgcgcacggaaatccaggccacatggtcgtcggaaaggtattcggaaatcttatccaaagctttcacttccccttctttgacatattcggcattgtattgggttacccgaatgcagctgtaatccatcttttgccggccgataaagatcagtgaaccaggagcagctcccttggatttttgtttatcttttaaaaaacgagccataaatcaactaaataggttaaaagttataagctaagctgtatggtaaaacaaaaataagcttttagcttatagcttatcgctttttaactttctattttcaccggcatagcccctgttccggagccggtgttcaggctgacttgtggaaatgggatttcgatgtgctgggcgtcgaaagcttttttgatccggcggcggaattcccggctggctgcccactgctgtcctgatttagtcgtcagttttactttcagaatcacggaactgtcgccgaaactatctactccccataaatctacccccataaggatcgattgccaggcagcgtctttcatgagttcgtcacccacttgtttcattatttcgttgacatggtccgtgtcttctttgtaagctacgccgatatcgactactattgccgaccagcctttggtcatattcgataaggagttgattttaccgttttgaaaaatgtgaacgacccccgaagcgtcccgtaaagtcgtcgttcgcatctctattttctctacggttcctgtcgtaccgttgatgatcgccacgtctcctgtccggatttgatcctccaataggataaagaatcccgagataaagtcccggactaattcctgggcaccgaaacctactgccaatccgacgattccggcactggcgaggatcggaccgatattgatgttgaacttactcagcatgatcagcacgaatatggtccataagaatatttttccaacccctaagataataccggataaggtctctattcttttgttgccttctgcgtcgtcgatattttcattgaggtgtacccgtcgtttggccgctttatttaattttttgacgatataattgagtagtcgtaataagccgataaaaatgagagtgaggatgattatagaaggtacttgggtgattacccaattggtaaaccggtgagtcaggtctttccagaaggttttgtcggccagatttttaatactgtaatcccaaaagatagacaggtcggttactttggtctgggcgggtatactgtcgggggcgatctctccggtcgagtcgatggctagtgaaggagggaggagccgtttgtttatttcgaaattggcatctatttccgggacatataggatgatttcatctaccgaaggtagaaactgactatgaggataggctgttctgattgttcctacggtggaagccagtccgattcccgaggctgtctggaaacgtttatcttttacgatgattcgggaaatacgcgagcgttcgtcgttttgccgttcggtattgacaatgaggagtaaacgggaactatcgccatagatatagtaatagtcggcagtctcgttggatagctcggtacgggttttcagttttttgatccggtcttccggtagggctgcatacagttcttttatcgtcataccctttcggatggctccgacctgagtagacgttatcctgaattcggagacaatgttagccggtggtgtttttgtcgtacttggggtgtgacaggagtataccccgaaaagtaaacagaaaaagagtagtattctattcatgcgtatccatttttttagtcatacgtaaaggaagaaaaaaaagaagaaggattctattaaaaaaaataaaaaatacgataaagtaataatttgtaataaaaaatacattttaagcgataattccgcaaacgtgagcgctctgtacaaaaaaatgtcgtttttgggaagattgtttagaacgatttcattttaaagcgtttcgaaaacttgaaaatcgtttgcagaatcgttgattatcagagttattgcaaatcaggaaaaaatgttcggattaaacttgtttaaaagggaggtttcgctacctttaccatgttttaaaacataaaaatagcattcggagaatgttataagattgttaaaatgaatagttaaagtggtaattttcccttttacatttacaatgaagtaagctgattgacgtcagcaacaattaaaactacttattcaaccatgagtcaagagacaaaagttatcgaaaaacatgatgttgtcattcgtttttccggagattcgggagacggaatgcaattaaccgggcagcagttttcggatacagctgctttatttggaaatgacgtagcaacatttccggattatccggcagaaattcgtgccccgcaaggtactgttggtggcgtgtccggtttccaggtacacattggagaagagcacattactactccgggtgattatgccgatgtcctcgtggctatgaatccggctgctttaaaagcgaacttacgttgggctaaaaaagcaggtactattattgtggatatcgatgcctttaccgacaaacatatcgaaagggccggttatactgcaaatccgttggaagacggttctttggcggactataatgttgttccggtgaaagtaaccgagctgactatcgaagcgctgaaagagaccggtttggatcagaaatcgatattgagatgtaaaaatatgtttgctttgggaatgatctattggatgttcgagcaatctgtagagcataccgaagctttcttcgatattaaattcggcaaaaaaccggctattgcttctgccaacaaaatggtgttgagagccggttataattatgctgctaatgtacatgcgttagccactcattttaaagtagctccggctaccatcgagaaaggtaaataccgtacgattaccggtaataaggccacagcctggggattgttggcagctgcagaaaaagcaggactacctttattctgtggttcttatccgatcactccggctaccgatattttgcatgaattggcacttcgtcgtgatttgggtgctaagacttatcaggctgaggatgaaatcggtggtatctgtaccgctatcggtgccagctatgccggtaattttgcctgtacgacgacttcaggtcccggattggcactgaaatcggaagcttgcggattggcagttatggctgaattgcctttggtgatcgtggatgtacaacggggagggccttctacgggtctgcctacgaagaccgaacagtccgacttattacaggcactttacggccgtaatggtgaatgtccgatgccggtaatcgctgccagtacttcaggaaactgtttcgactatgcttttatggccggaaagattgcgctcgagcatatgactccggtagtcctgctgaccgacggcttcctggccaacggagctcagccctggttgattccttccatggctaaattacctgagataaaattgcgtctggctaaagaaggtgatgattataaaccctatgcccgtgatcccgaaactctggccagaacctgggctttacccggtaccaaaggcttggaacaccggatcggcggactggaaaagatgaatatcaccggaacgatcagttatgtgcccgagaatcatcaggtcatgaccgatctgcgtgaagaaaaagtagcccggattgcaaacgatctgcccgaacaggaagtatacggtaatcccgaaggaggcgatattttgattgtcggatggggaggtacttatggtcacctttataccacagtatctgaaatgcgggctgaaggaaaagatgtcagtttggcccatttcaactttatcaatccgctgccgaaaaatacacgggatgtgttggctcgttataagaaaatcgtcgtatgtgaattgaatctcggacagtttgctaaatatctgaaaagtaaatttcccgaattcaattacctgcaagtaaataaggtggctggattaccttttactgtcgtagaattgaaagaaaaaatcaataaaataatttaagctcttcgacttaaacaaggatgaaagatatttagaatcagaaatcgaaaattagaaattgaaatgagcgaattaaaatatactcctaaagattttaaaagcgaccaggaaatcagatggtgtccgggttgcggtgatcacggtattattaattccgtgcaaaaagcgatggctgaactgggctatcccaaagaatcctgggctgtgatttccggtatcggatgttcttcccgtttcccttattatatgaatacctatgggttccatacaattcatggacgtgctgccgctattgcttccggagcgaagaatgccaaccggaaactgaatatattgcagatctccggtgatggtgatgcattggctatcgggggtaaccattttattcatgctatccgccggaatgtggatattaccattttgttgtttaacaatgaaatttatggtctgactaaaggacaatattccccgactaccaaattgggaactaaaaccaaaacttctccttacggaacgatcgagcatcctttcaatcctggagagctttgcatcggtgctcagggtaaatttttcgcccgttcgatcgataccagcgtgaacttgaccgctgaaattctggaaacagctgtaaaacaccagggaacttctgtggtagaagtgcttcagaattgtgtcatctttgccgatggtgctcattctgctgtaacggataaagagttgaaagaagagcgtcagatcgttttgcgtcacggtgaaccgatgatcttcggtaaaaacaaaaataaaggtttggtattggcaaaatcaggtgagctgaaagtggtcgaaatcggtaaagacggtatcactgaaaaagatatcctggttcacgatgcacataatcccaatccgttcctgcattggatgctcgtcaatatgaaagctccggaattcccggttgccctgggagttatccgtgatgtcgaagcgcatacttacgaccaggctctggacgatcagatcgaagaagtaaagaaaatttctaagatccattgtatggaagacttgctgaatagcggggatacctgggaagtaaaataataagcggacaagtgtaagctgaaaatgaggtgcaatcggaaataccggttgcacctttatttgtttttatttacttttatacgcacaaagtaggaataagggcagtgatcaatcagaaagatttcatacggcgtttgcaacaacgggaaaaagaagctttccaggagcttttttattcctggcatcgtccattgtgcttttttgcctcccggataatcaaagatcaggatgtggcggaggatttggtacaagatgtattcgtcgctttctggaaatacgatttgtccgcctttcccaatgaaaagacgattcgtacttttttgtataccagtgtcagaaacggctgcctgaactatctgcgcgatttggaaatccgcgcaaggaatgatcgtaaagctgtcccggaatccgaagaagatcaggattgtttcctcctcaggcagatggaatccgaagtggtaaccgaattattcgaagcgatcgatgaattaccggaacggtgccgggaaatcttttatatggcttatcttcaggaaaaagaagaaaaacaaatcgccgaactcctgcgggtttctgtcaatacggtcaagacgcaaaaacaacgggccaaggcctatctgaaaggacggttgggagaacttttcgtctatatgactctgttttttttcgaattttaatttttttcatacctcttgtcacctatttccttatcgggtgtgtttaaatagtaaaaaggattaaaatactcagaaatgattagcgtcctttgggtattgatcggtgtcagaccttcggactttctgattaatcaaggatgaggaaataccgatttcagtgtagatatacgaattgaaggagtactgatcaggctaagattaaatgttatggataaaaacgaggaaatctgtcgttgggtggctgcctggataaagggagagctgacaccggaggatgaggccgaattggcctgctggttaaaacaggatcctaaaaatcaggagtggttcgatacttttactacaagagagaatctgaaaggagctttgtcactttatgcttcttttcatacagcgaagaggtgggaagagctggaacgttattgtagaataacgaatcgccgtaaaatccatccgggctattggcggtatgtcgccgcagtggtgattttatttataataggagggatcggtttcctgtatttcgtgccggatacccgtaaagagatgactctggctgcagtcggcccgaaggagtttcaccagcaggcggtgttagtgctggagaatggaaaagaattggtgttgaacggtataaaagacacttgtttgtcgctcgggcaaggggaacgcttatggatcaacgatcaggggcgtttggcttatcaccaggattctttacagcaggaaactcccgaagaatggcatatcctgcgaatcccgagaggaggcgaatatacattggtattggaggatgggagccgggtatggttgaatagtgcatcggaattgcggtatcctgttcgttttacaggtaaaaaccggcaagtgaccctggaaggagaggcttattttgaggttgcccggaatgaagcccggccttttatcgtacaatcgggaaaacaacgagtcgaggtgttaggaacttctttcgacgtcactgcttatgagggagagccggggatatacacgaccttgttgcagggaagtgtcgaagttagcggtgaaaagggcaaacaattattgaagcccggacaacaggcgatatacaccgaaaagggaatcgaggtgaaagaagtgaatgccgccctttattgttcctggatacaagaccgttttgtgtttatcagtgaagaattggaagcggtgacccggaaactggaacgctggtatgatgtcagtttcttttttaccggggaaagcctgaaaataaaacgattctccgggagtattcctaaatattcggatttatcgaaggtattgaaaatgttggaactgacgacgaatatccggttcaaaaaaacagataaaacagtcgtagtcgaaatgatacaataaaaaatacagaaggtggtcgcaacaccttctgcataaaaagtcgatctaatacaaacgattaaaatcaaacaaagttatgaaaaaaaaacgaaacggtaggtcgggaaaactccctggcctgagaaaaatggtgttaatgatgaaattatgtgtcttttttctgttcgcttcatttttatcggtggcggcaaacggttattcgcagaataccaggctatcgctgatgaaacaaaatgccagcgtgatagaggtcttgaccgagatcagccaaaagaccgatatgcagtttttatataatgataacgaactgcaaggtattcaggtgaatgtgtcgcttaaaaatgcgacgctgcatgagatgttggataaaatatttgccggtctgcctctgagctattctattctggatagtgtgatcgtcatttcccctaagggaaaaccattgccacaagcactgaaaacagtgacgattaccggtcagatcaaggataaagacggtaacccgctgccgggagcaacggtacgtatcaaagatactcaaatgggggttgtctccgatcaggatggtaagtttaaactggaagtaggcgaaataaaagatctgatgctgcaggtttcttttatcggttataaaacacagaccgtaaaacccggtgaacagagggttctgtatattgtgctggaggaggaagctcagaaaatggacgaagtggttgtgaccggttattttaccaagaccaaaagttcttataccggttcggcagtaaccgtacaggcagaagaattgaagcggatcagtccgacgaatttgttcaaggctttacaggcttatgagccctcgttacagatcgtcgagaataatgaatacggttccgacccgaataaattgccggaaatccttattcgcgggaaatcgagtttcgaagggaaatccaataatcctcttttcattatggacggttatgaagtggatatgcaaaaagtattcgacttcgatatcgagcgaatcaaacagatcacaatcctgaaagatgcttcggccaccgctatttatggttcacgggctgccaacggggtgattgtaatcgaaacgaaaatgccggaaaaaggacgcctcaccgccagttataattttaatgctacggttgaaatcccggatctgaccgattatgacttgttgaatgccgccgaaaaacttgaattcgaacgtttggccggagtgtataaagataaagacggtaatatcgaacagcaaaggaaattggatcggttatatgagtcacgtcacaaagaagtgctccggggagtaaatacctattggctttccaaaccgctccgcacggctttcaagcatacgcattctttatatctgggaggaggaaatgaaaattcccggtatggaatcaacatcaattacggcaataatccgggggttatgaaaggatccaagcgggatcggttgggtttgagttttacctggaattatacgatcagtcaaaaattacgtatcgggaatatgttgtctgttgatcagaataatacagaggaatctccttatggaaatttcagtaaatatacggaagttaatccctacgaaagagcctatgatgagatgggacgctgtattaaacgcttgtctaacggagaggctaacccggtatttgatgctacactgaataatgtcaataaaagtaagagcacttccttcaatgacaattttgattttgaatggtatattgtcgaaggaatacggctgaccgggcgttttgcctatacctacgggacgacccatagtgatgtctttgtatcgccaaaatcgagtcagtttgaagatcagcaggatgataaagataaaggatcctacgattatagtagcagttcgacccattctatggatggaaatattgtggtgaatgcctggaaatctatcgataagcatatgtttaccttggtgttaggggccaatatgcaggataataaagaagataataaaagtttttcagctaccggtttcttgagtgataagctgactaatctggattttgccatgcaataccgggagggtgcgaaacccagaggatcggtatcccaggaccggttgatcggtttctttgctaatgccagttatgcatacgacaaccgttatttgttcgatttttcttatcggacagacggttcttccaaattcggtaagaaaaaccggtttgctcctttctggtcggcaggtatcggatggaatattcataacgagaaattctggggaaatccggagtggttaactcaggcaaaaataaggagttctgtaggatataccggtaatgtgaccttttccccttatcaggcccagactacttatcaatattcatcggataatatttacctgaacggagtcggagccgatatcattgcattgggaaatgaggatctgaaatggcaacgcaaatttacggtgaatctgggatgtgatctggatttctgggagggacgtttttctctgaccggagagtatttccgtgaatataccaaggatgtattgatggatatcagtctgccaccctctcttgggtttatcgattataaagaaaatttcggagagatggaaaataaggggtggtctctgaatttacgtactcagatgctgagggatactgaacgggaactgtattggtctttggctttcggtaccagtgacagtaagaataagatcaaaaagatcacggataagctgggagcgatgaatgatgagaacaataaaaatgaaaccaagaaaccggtacctttatacgaagaaggagaatcactcgatgccttgaaggctgtgccttctttgggaatcgatccggaaaccggtaaagaagtgtttgtgaaaaaagacggcagcctgactaccatttgggattacaatgataaagtggtttgtggaacgacagatcccaaattcagaggcactttgaattcttttctgacctttaagggaattagcctgaatatgtctttcaatttccaatggggtggacaaacttataatcagacgttggcttcccgggtggaaggggtgaatcccaatagtaattgtgaccggcgggtattgtatgaccgttggaaaaaaccgggcgaccggaccttttttaaaaatatcgctttggaagaaaatgtgtcgaatctgacgacccgctttgtacaggattacaattattttcagatcggtagtatatcgctcggttatgaaatgcgacgggaattatgccggaaaatcggtcttaccggcttgcgttttaatttcaatatgggagatattgcccgtttctcttcggtaaaagaagaacggggattgtcttatccgtttgcccggcaatttactttttctttgtctgctagtttgtaatagggtataaatactaaaaatgagaattatgaggaaatatatacagataataagttttctgctggctgcggttacattaagcggatgtgaaaactggctggacgtgaaacctgaaactgaagtgaatgaggatgatatgttcaataccgagcaagggtttatggatgcgttgtacggaatatatgtaaacatgggaaaaagcgatttatatggaggtacgttacagactgccctggacatgacggctcagtactatagttattatgatatttctgaatgtccttacgggcactatcaaaccttcgaatatgagcatccctcttgtacagctatatccgatgctttatggatgcgtatttattattgtatcggtctgacgaataatttactgaaatacctggataaacctgaagcggtacagatttgtagcaattatgattatttgagaggagaagcgttggctctgcgggcctatctgcattttgaattaatccggatttttgcaccggatgtaaagaaaaatcctgaatataagtcgatcccctatcggaaaactttttcaccggatatcgaacctcagttaaaagttaaagaggtgtatcaggagattctggctgacctgactgaagcaaaacaacttttatccaacgatgtgatccggacaaatggtcccgactggttgggagaaagtgaaaagaaagaagaatcggacgatgtaactgataaaaatgagggttattatacatccgattttctgaaaacaaggaaataccggatgaattattatgccgtattagggacactggcacgggtacacctgactttagggacaaccgacgatatggagaaagcctatgattatgcgatggaagtcatcgaaagcggtaaattccggcccattcaggaagaacatattctggtgagtggcgaacaggcgaaatacagggatattctgtttaccgacgaatttattttcggattatattcagcacaggtagatgctttttataagtcgaatttcgatgaatcttatggagttaaaaagattttaatcaataaattgagtgatatttatgggcagggaacacgtgatctgcgtcagacacattggtttaaaacatcctggggcacttcttatttattgaaacataatgcggatttggagtatgccaaagaaaaggtgaggatgataacattggctgaaatgtattacatcgctgccgaagctcatcccgccgaagcatacgatttgttggaggagattttgccttcccgtgaaattcatagttctttgccggtgaatgccggccggacggaagtattgaccgaagtgttgaaagaataccgcaaggaatatatcggagatggacagttcttttatgcttataaacgcctgattgaagaggaagcggctatccttcctttaggtataaatattccgaatgaaaataaagttctggtatggcctttaccacaggatgaaattaaatatggggaccgggaatccggaatttggaaaactgaaaaataaataattatgaaaaataaaataatcatcgctttggtggctgtcattgcttggttaggacagtcgtgcgaaacagatcctgctttcgattttaaagatgacggtaagatatatttcaaatatccgaaaaaaataaacgatttaggaatagaaacagatctgttggtggatagtattgttcatactgtatatgggaaagaccttccggatgggaaagatactttgtggattcaattacagattatgggagcccgtaaagatttcgacagaaattataaagtggtcgttgttgccgatagcagtaccggtaaggaaggtgtggatttcgataagttagcggatgaatatatctttcaccgtaatgtcggcgtggattcgttccctttggtgctgaataaacaggcctttgagaaagtttttaaccggaatgttttgttaaaactcgaaccgacagaagatttagggattgcttatgttgaattttcaactctgaaagtgaatttcagtgcttatgtgctggaacccgattggtggtgggcttttgaatttatcctgggggaataccatccgttgaaatatgagaaagtggtcgaagtgtatggaagtgaggaaatcgacccttatgggaataatccttattgtgcttatgtagctaatgttgtccgcgaatattttgaaaataatatcgtgatcgatccttttaccggtaaacgcctggaaatatagtatgctaattaaaaaaatgatgaacttatgaataatataagaatatatgcctttttctggatgattgtgcttcttacagtttcctgttatgaggataaaggaaattatgactatcatccgatcaatgaagtaaaaatatcggggattaaagaagacccttacgaaatattgcgctgggataccttgaaaattccggttactttagaaaatagcctgaatgagaaagctgaattgatttatgcctggtatctggatcagaaaaagattgcggaaaccgaagatctttgttatgttgtatcggataaggctaaaaaatatcaggctcgtatggaagttactttgccggaagatgatagtgtccgtttttttgctgattttgaggttcaggttttctcaccctattcaaaaggactattgttattgagtgattatgaggattatccggaagtttcttttatgagcacattgaataatccgactaataaaatcatgcgggatgtgtatagtttggagaataagagagagttgaaggggaaggccttagcaatagagcagtccgatgaatactcttatggtggaactgtttttgtacatacttcagcttcctctcatgagttggatcctgtactatttaaagagattgccttgttcgacgaaaattcatttaccgggcctgcccaggaatatgatatggtgtattgccggtttgaagatgcgattaccgaattcggaggggctatcggcaaagatgggattatttatcctaaacaggcccgtcaaagccgttatatggcttcttctctaaaaccgatccacgtcgaaggagatgcagaaagattggtggactatcggttgtctccgatgcttttgaatacccggaattcaaccttggggtatgataatctgtcggggcggttcatgtattttatgaatagttacgatattccttcttatgatgaaaatcagtatgatgaggttcggatatcgcagacttatatcggactcccctggctgggatggggaaaaaatatgtctggcggaacatatcaattcagttctttattttatgatccggttactgatcgggctgcactggcccgggctcattccgcttttggaaaactggcgggaaaggattcgctggtttttctgtccggtcatcatttagccgaaggttcggttatggccgttaattccggtatcaattggttgtattattcggatggaggccgtcagctttatgtgttgaatttatcggatcctgattttaagtttccttctatccctttcgaatgtgctttaccggataattgccggataacgatgctgaaagtatctgtcgataatttggccttgtttgtcggagtggagacagacagaccggagaaatacaaaggagatgtgtataagataaatgcaaaagacgggacaattctcgaacattatcagcgtttcggcgggacaccggtggatatggtcgaaaagaaatctgtcgaatatgatgtcgaggagtgaggggtaggaggtaaaaatgaaaaaacggtaaaattttaagaaatgaagcaagtttattttatcatagcaatgctgtgtggattggccttgggtgggcaggcacagggaatacgctttgcagaaggaagttggaaagaactgttggaaacagcgaaaaaggaaggaaaattgatctttgtggattgttatacggaatggtgccagccttgtaagcaaatggaacagcaggtttttccgtcggaaaaagtggggaagttttacaacgagcattttataaatgtgaagatggatatggaaaaaggagagggaccggtgattttgaatacttataaaatcaatgccttcccgacccttttgtttgtcaatggcgaaggtggtgaagtttaccggattgtaggcagcaaaaaggaagcggaattgttgcaggtaggtgctgatgcattggcttcgaaaaccgtttatccggtcaattcgcaggctcagcagcaaatcgctttgatcggacgcgaaatacctgatttttgttatcgcgattcgactggcaaagaagtgaagttttcttctttccggggaaattatgtgtacgtggatatgtgggccacctggtgccggccttgttgtgaggagattccttatatgggcgaattggaaaagaaatttcacggtaagaaaatctgttttgtcagtctttcctgtgataaggatttacaggcctggaagaagaaactcagaaccgaccggatgggagggattcaattgaattgtggaggcgatcctgcatttatgaaatttttcggtattcagggaatcccccattttattttgctcgatcctgaagggaaagtcgtaaatccgaatatgagccgcccttcacaggaaataacggtggaaactttaagcaggctcaaaggaatttgagactgctttacaagtcttgatcggtgatttctttcagcatatcgatgggcggaattacggtttggataaaaaatcgttttttagccggccggtgtctgaaaggaatacagattactgcaagggatatacccttaaaaccgataaagcaggccgatatttcctccgatattcagcattttgttgaaaccgatgttaccttgggtatattcgttgtactcatatgcatcgtcgattcgggggacataatcggccctcactttcaggtccatccataccttgtccgagagttgaaacaagagaccgccatgaagccccactcccggtgaaaacagaaacaggtgttttgaaaaagaaagggaggcagaataaccggtatattggcgtcctacatcgagctgggagaaataccccccgaactgaatgcccagataaggcaaagtggttctgttccatgtcgggacataaaaggtcgcttcgagcaggaccgggatcaggtggtatttatatttttgggagacatcgtctttgtttagattgactttggttttgaaaccgtaatatcctgcctcgaaacctataccgatcatcttgttaattaggtatttggccgatacgtttcccccgataccgtttttcaggattttccccatatcgcctgtcgggtaaaaatatccggcattgatgcccggtaaaaatccgcggtcgggacggtagtattggcctttggccagtgtgattgtgcagatcagacaaaacagatagatgatttttttcataattcggcttctttagtctgtcgttctccgatgtatttttctatttcctgcagccgttcggtagcatgtttgtcgccgatttttatttccaacgctttttgataatagaatttggcaatggcgtaggctttttcagcgtaagctttgtcggctttatctatattggtctgataggctttgtctaaggcagccagttgttcggcttcaatcaatcggtctgtttcggcgatccgttccctgatgctctctttgtcggccggtgataaggtcaatgctttttggaaatataccttggcagaagcatagtttttctgttccagattcttttcggccagtgttttgtttttattgtattcggccagtcgggctttgtatttcgaagaatggatgatttgctcgatctctccgaggcgtttacggggataatcttcgcccaggttaagttgatcggcttcggaatagcgtagtttggccgcactgtagttttcgtttttgaatgcctggtcggcttcggctatgatcccggtgtatttgagttttaaagtgttgattctttcttcttcctggcgttgtttctcagcttcgtcagcctgttgcttttccagggctgccagggcttgctcggctttgccgatcatattccggggataggcttcttccgattttaaggccagtgcctgccgataagtagtaatggcctggcggtattcctgggcttgataggaacggtcggcttgggcgattgttttttgataggtagcttcggcttcggctaattgctgttgtgttatagcttccttttgggcgatctctgccaataaccggtcgatattacggatttgttcctggggataaggctcttttgtcttgatttgtttggctgaggcatacttttctttagccgccgggtactcttcccggctgaataagctgtcggccgcagcgagcagtagccggtaggtttgttcgttttgaggttcgacactctttcgggcttcttccagttttgcttgttcctgagcttccgcaattttttgtttcacctctttgttgccgggcttcatattttgagccagggtccagctgtcgatggctgcctgccaggctttccggccgaacgattccagtcctttattgaatagttcggcaaatttccgttcctgttcgatggcggcggcatcccgggcagctaattgtttttttacagcttgttcggtttgggcgatccggtctttgattttatctgaatacgatttgtcgaacgtaaaatcgtccagttcggcctgataggtcagtatggcaataggctgatcgaatatggatagatcgattttttcgacacttggcaacagattgatgatcaacttgacgggaggaaaatcggggttgttttcaatgctttcttccggtacttcggtgttgatgctgataattttggtgatataacctgttttttcgaaagaaattttgtagtcggcatcgaaggcgagtttcaaatcgaaatgtccttttttattcagcacctgttcgtcgagcttattcccgtttttgattacgacaacccgcgttccttccgggctgttatttgcaatagcgacgttgccgttgatagctgaatgctgggctacgacaaacggagaagacaatagaatgccaaggagtataagcaagtttttcatgtcgggatcgaattattccacagtgaggaatgctacacatactcctgcaaaaataataaaaaagaaagaaaaaagccccgttaccggggctttctgttattttttcagtttcaactgagctctttcgatatatttttcaatatcccggccttcaggcgatgccggatattcctgttcgatttgctcgtagacttttaaagctccgctgtagtcgttggatttctctaaggctaagccgtttttcatcaggaaagtaggagttgaaaaatcgttcgttttagaagctgcagcctttttgtaattttcagcagctttccggtattctcctaattgcatataagcatctccgatattggctttagctaagttggacaataacaaatcgtccgaagagaatttttccagatattggatggcattctgatattcgcccatatataaataagacaatccggcataatattttgccagattaccgctgggagtcgagctgtatttgtctgctatttcgataaaccccagcacattaccgtctccgttcagggccagattgaaagaatctttttcgaaatagttttgcgctccgaaaatctggttggcagcttcttgggcatgtggttcagcaatgaatctgttgtatccgaaatatccggcaataatcactaccagaacaaggacgacattcacaatcattttttgatttttttcaataaattgttcaccactggtcagggcctcttccaagtgctcgaaaccatcctcgcgttttttctgttcttttgacatatctgtaatgttataaaggttaccgtgttaacacctaccggctatgcccggttttacattattcttaatagcctgcaaaattagcttttttaattgaaaatcgaaatatccggcagttttttttcgatcgactttaaataagccattgatttgggcgtgttttaggtgaaaaagactaattttgtcctgaattatgaatgccggataaggaatagcttgttaaatgacactgaaggagttaaatatcatcaactttaaaaatatcgcagaggcgaccctgacttttacttccggtttcaattgtttcgtcggaaataatggggttggaaagaccaatgtcctggatgctatttatcacctttccatgtgtaaaagttattttaacctgcctgatctgcagaatatccggcacgaagaaccttttttcgttgtgcagggaaaatacgaacgcgggggagaagaactgacggtttattgtggagtgaaacgggggcaaaaaaaagtgtttaagaaaaatcagaaagcttatgataagttgtccgaacatatcggactgatccctttagtaatgatctcacccgaagattttatcctgatcgacggaggaagtgaggagagacgcaagttggtggacggtattatcagccagtgcgaccgggtttacctgcatcggctgattcgttataataaagcacttactcagcggaatatgctgttgaaatcggctgccggtaaatttctcgatcctgaaatgctggaagtatggaacgagcaattggccgaacatggagaagcgatccgccaaaaaaggatcgcatttctgaaggaattccggtcggtatttcagacttattacgaacggttgtctctggggcgggaagaagtatgtctggaatacaaaccttcggtaaaagagggtaatttcctgacggctttgaaacaggctgccgaccgcgaccgattgttgacttacacgactgtcggtattcaccgggatgatctggttctgaatatcggtgactatgcggttcgtaaaatcggttcgcagggacagaaaaagactttcctgattgccttgaaattagcacaataccattggttacaccagatgagtgaggtgaaaccgctcttgctcctcgatgatattttcgataaactggatgccgaccgggtagaacaaatcgtgaaaatcgtaggaggagagatgttcggacaggtctttatcacagacaccaatcgcgggcatatcgatgatatactgagagcccaggcggtggattataagttgtttacagttaccggaggggagatttcctgattttccggtcgcatttgagatttaatattatatttgcaagtaatttgaaaaagggaattcggtgccttgtttatgaaagaggggaaaacaaaacaaatcgatgagctggtcgaccaggtgcttcgtaatatgggccttgaacagaaatttaaggagcatgaggtttgtatgatctggccggaagttgtggggcaaatgattgcctcccggacgaaaagtgtccgggtgatggatggcaagctcttcgtctctttcacttctgccgtcgtgagaaatgaaattatgatggtcaaagaaggactgatcagagctctgaacgaaaaagtcggaaaagaagtggtcaaagaaatgatcataaactaatggatttacgtaggaaataattatgaatctgatagactcgaacgatatattgaaagcctcaaagttgaatcggtttggggggaatctgggcggaagcctggtggcgaagctggtgatgtatatcatgcggctgaataaaatcaacaagctgtattccgatgtatatagcgataatcccgaagcttttctggaccgattgatcgaagccctgggagtgacgatcgaagtgaatgaagaagatcttcagaaaataccgaaagagggagcttttatcaccatttccaatcatcctttcggtgggcttgacgggattatcctgatcaagttgttgagtaaaatctgtcccgattataaggtgatggctaactttctgctgaagaagatcgtacccatcaaagattattttttaggcgtgaatcctttcgagggactgaaagatatttcgagtgccgggggattgaaagaagctttaaggcacttatcggaaggaggggcgttggggctgtttcctgcaggagaggtatctgcttaccaggccgactcgaattcgattgaagataaagcgtggagccgttctgtgttgaagttgatccggaaagccgatgtgccggtgatcccgatttattttaaaggttccaatagtatgttgtttcagatactcggtatgattcatccgatgctgcgaacggtgaaattaccttcggaactcttgaataagaaaaaccgggtaattaaattacgggtaggaaatccgatttctgtagaaactcaaaattctttcgccgatctgatacaatacggtaaatttttgagggcaaagacttatctattgggatcttcgctcgaagtgaaaaaatttttcctgaaatcccagaaggcggaaaaacaggtcgaaccggtagcaaaggagactcccgtggaaattttacaaaaggaaattaaagatatcatggaagactatctgttgttttccatgaaaaattatacggtttattgtgctcccaccatgaaaattccgaacatcctgaacgagatcgggcgtttgcgtgaactgacgttccgggctgtcggcgagggcaccaaccggagtatcgatctggatgaattcgatttatactattatcatctgtttatttgggacaacgataccgaccggattgtcggggcctatcgggtgggaaaagggaaggatatcatcgaccgttatgggataaaaggattttatatcaatactctgttcaaaatccgcaagcagatcatgcctgtattgtatgagtcgatcgaattaggacgttcttttattatcgaagactatcagcgtaaaccgttgcccttatttatgctgtggaaaggaattctttacttcctgatcaagaatccggaataccgctatctgatcgggccggtgacgataagcgggaaatattcggaggtttcgaaagaactgattatgaagtttatcatcagaaatcattgggatgccgagttggcccggtgtatctctccccgctgtaaatatcgggtagagactcatgatcccgatgtggatgtaatggtggaagcttcgggggataatatcgctacgctggataagttgatcggtgatatagagccttcgagcgataaacttcctattttattgaagaaatatattttattgaacgggcgtattgtcggtttcaatatagaccctaaatttaatatgtgcctggatggtttgttgattctggatttgttcgatgtacctatgagtaccattgaatctttgtcgaaagagatcaatgatgatacgattttgaatcgtttctcttcggataatctggaagtataagtccggattatagcgtttataaggtgtattttaactttgaagagcatgtatgatgttgtttatattttcagaggaatactgatcggactgatggtgtcggtgccactcggtccgatgggtgtactgattatacaaaagacattacagaaaggagctttagccggttttgtcgccggaatgggagcggcctgtgcagatcttttttatgctacggtggcggctttcggattaggattcgtgatcaatgtcatacagactcacgagttgatcctacagatcatcgggggaatttttctgattatcgtaggattgaaaatctatttcgataatcccttgaagcaaatccggatgaaaaagcgggtcactaaaaaagggttgctgggtgattttctgacccttttttttctgactgtttctaatccggtggctattgtcgtttttatggctgtctttgccggtgcttcggttttcggagatgatccttcgtatcggatcgaattgtttgttttgtccggcgtggtgatcggcggtggtttgtggtggtatacgctttcgacgctggtgaacattttccggaagaaattccggcttcgggtattgatcaccatcaaccgggtgtccggggtattgatcaccgtgttgggaggcttggtgattttagctgctttcgagcctttccggtctttgttgcccgcagcctgacctattttttcactctgttctgaaagtgtagggaatctccccacgtatccagttgtatttcgcatccgcttcgcttgacgctttccatcaaccggcgtgtcgattcctcggctccttcatccatgcccggcttattctcatagaggcggtagttgccccggttgccgaggggagtgatattaggcatgattacgttggcaccgatttccagcgctttttcccgtccctccgggtcgattgcctgtaaagctgtcgtcgcggcgatattgatatcaggcatcaacagccggagacaactgaccatatgcagtcctaatcttaaacgttcctgttgggaaggaagggcttcccggtatcgccataggggagtatcccggtgttccagataaggtcccatacccaccatgtcgatatccatcgatttcaaaaaaagcaaatcgtcggccagatctccggtcgtttgaaaaggaagtccgatcatcactcctgtaccggtttggtaaccgcaacgctgaaggctgcggatacattccagccgggtgtgaaaatcatggagctggccggcaggatgaatttttcggtagagtgattcgttcgaagtttcgatccggagcagatagcggtgagctcctgcatcgaaccatctccggtaggtgtcttcggtttgttctcccagcgagagagtgatccccaaacgctggttactcaggtgtttgatctccctgacgagccgttcgatgcgtaggataaaagccggatcatggcgttcgccaccttgtaacaccaccgaaccatagtgattccggtaagcaaagatagctgcttcgacgatttcttcatcgttcagctcgtagcgctgggcctggctgttcgatttccggatcccacaataaaggcaatctttgatgcatacattcgaaatctcgatcaggcctcgcatatgaacgccgttccctatggtcgcatcccgaagctgtcggctatgccggaataattctgcttccgttgtatcccggcaatccaacaacgccactaaatctgttttgctaagttcctgttttcccaatatcgtttttacctccatagttgtctctttgacggtaaaaatacaaaaacaaaagagaatcggtatattttgaatttaatttatatttttagccgttgttttgactcgaaaatttcggtgtcggtagattttttatcacttttgcaaaaatagaatcggtgaataactcttttaaacggcagacttgggaagtataaacgaacatattatccgggatttttcggtaggacaggaaaaggcttttcgtatattatatgaaaaatatgctcctgctttacgttattttgctgcgaaatatgtcggggaggaggaggtgatcgacgatatcgtacaggatgtgtttgtttgtctatgggagaaaagagttgattttaaaacagaagaaacgatcaaagcttttttgtataaggctgtaaaaaatagttgtctgaatacgatccggcatcagggagtgaaagatcgttatgccgaagtggctctccacgaagaagaactggaatctttttgggatcatatcctggaaaccgaattattcgaattattattaggagttttcaatgaacttcctccggcttgccgggaggtataccgcctgagccttgaagggaaaaaacatgaagaaatagccgagatccttcagattaccgtaaataccgtcaaaaaacataagaataatgccaaccattatatgcgtgagcgcctgaaacatattctttccttactggttctttgtcaatttccttaataaaccacagggacggggcatggggctatatttccgggtcgatattgcatgaccaatctttcgatttctgtcgggaatcattgaattaaagattattctacacaggtctgggggctctcgacgggcatgaagtgagtctcggcaaactgaaagttttttaacaaaaactactcgtcggcttaaatttctgcaacccttgcaacttctattttttagttaaaattaaaaaaaatgactttttatattacaccaaagcagggattgcgtgttataatagaaacaacctgcgattgaagtgatgaatattaaaacacaacgacacctgagccgattgatattccgttatctccgggatcgattgaatgaagaagaaagccgggagctcgagcgatggcgtgctgcatctgaagcacatgaacttctttttcggcgtttgttatcctctgcccattggcaacggagtataggtcgttttgtgaaaaatgaatccgatacccaatccgaatgggagatcatccggcaaagaacagttggtcgggacagaggcaagagaacgatccgctggtatcgttatgccgcagctatctttctccctttattgattgccagtggttattttataaaattgagtcgtactcctcaagaaaaaacgcttgtttcagtaccttttattcctgggaaatcctatgccgtgctcgagttggccgacggaacgagtatcgatttgggggaaacagctgtccggggacaaatacaggggggacattgggaggtgaggtccgattctttgaaatattgtgaagagggagtaaagggaggggaagaatatcataccttaaaagtgccccggggaggagagtatactttggttttagccgatggctcgaaggtgtttttgaatgccgaatccagcttgaaatatcctgtacttttttcgggcgatctgcgcaaagtgaaattggaaggagaagcttatttcgaggtaaaacgaaatccggagaaaccgtttgtcgtcgatatcggcggtatgcaggtcaacgtgttgggcactactttcggtatcagggcttatgccgatgaaagagaaattcgtacgaccctggtctcgggccgggtaaatgtgtcggccgggaaacaggtgtatgagttgaaaccttcggagcaagctgtgttcgataaacaaacagaggccgtgaaagtggctgctgtggatactgagttgtttgtgggttggaaagacggacgattggtgttcgataattgttcattagagcggattttgaaagacttggggcgttggtattcattcgaggtgttttatgccacttccgcagcaaaagaaatacctttttctttgaatatccggaagcatgagaaatttgctcaggtgctggaactaatgcagagtacaggaaaaatacaattcgaaataaataaaaatacagtgattgtcaaataatacaaaggcagtgctgctaacactgccctgaaattcatgttcatttctgctgctaacagataatgagcgtttgttgaactttaaatacaaaattatgaaaaaaaagtctttataccctagtccggggtgtagaaaaatcattcattttttagtgatgaaagcgagctttatttttttactgctattgaccttgcagataaaagcaaatgtctatgcacaacagttgcgtttggacctgaatttacaaaatgtaaccctcaaagaagtgattcaggaaatccgccgtcattctgactttagttttgtgtatagtgatgccgatttggtagggatcactcaacggaatgtacaaatgaaggatgcaacgatcgaggaggtattgaaaaactgtttacaagggacgaagctggtgtacgatattacggataagaccattattatccgtaaactcgatgaggttacccagacgaaacaggtacaggttatccagggacaggtaacggatgtccggggtacacccttgcctggtgtaaccgtacggatcaaaggaacccagctcggagtctctaccgatgtgaacggtaaattccgtttcgaattgcccgatacgaaagaagtagtgttggctttctcttttgtgggaatgaaacccttggaagtccggtataatggccagagtgacttgaaaataaagttagaagaagaagtagccgaaatggacgaagttgtggtaaccggtatttttaagaaatctcaggaaagctttaccggttcggtatcgacaattacggagaaagaactgaaatcttttcggggacgtaatttattatctacgttgaaaaatatcgatccgaccttcaatattatcgaaaacaatgtctatggggcagatccgaaccatttaccggaagtacagatccggggaacttccagtttaccgacggtagaggacctgaaaaatgaaacgaaagtagatttgaatactcccttgataatcctggatggttttgagatcagtctcacccggatgctggatttaaacgacgaggatattagttctgtgactttgttgaaagacggttcggctaccgcgatttatggatcccggggagctaatggagtgattgtcatcgagactaaacaacccgaggctggaaaattgaggttgtcttatcggggaagtgtgaatatcgaggtgcctgatctgagcgattacgatgtattgaatgctgccgaaaaacttcagttggaagagaatgccggtttgtataaagacgaatgggcccatatagaaatggcgttgaggaaaaggcaggccagaatcaaacaggaaatagaacggggagtcgatacctattggttgtcgaagcctttgcgtacgggtgtcggtcacaagcacaacctgcgtttggaaggaggtgggaatgacggcttccgttattctgcttctgttcaatataacgatatcctgggggtgatgaagggctccgaccggaaaactttcaacgggaatattaacctgatgtatcagcaagaaaaattattgttccgcaataatcttgaagtcggactgagcgaatcgaatgaatcgccttacggatccttcgatcagtatgtgaaactcaacccttactggcgggaacgcggagaagacggtaaagtgttgaaagaactcgaacaaaaaggagatttttggactacagcccctgaaaatccgctttacaatgctacgctcgatttggtcgataaaaaaacctatacgactattaccaataatttcgatgtagaatggaaaccttgggaaagcctgactttacgttcacgcatcggattatcgaaacaggtgaatgattatgataattttaaacctgccgaccataccaaatttaaggattattcggatgaacagattttccgtaaaggagaatatatctattcttcagggaaaagctttagttatgattggagtctgactttaagctattcccgtaactttaaagaaaaacacgagctctatgtcggtttggattacaatgttgctcaggaaaaatcgcattcttatacttttcaggtagagggttttccccaatccaatattaaatttttgtcgatggctcttcagtatcagaaagatggaaaacctaccggatccgaatcgctcaaccggcgcatcggtgtgacggggaatgtgaactacatctatgacaatcgttatttcgccgacgtggcttatcgtatggacggggcctcccagttcggtagttcgaaacgtttcgctcccttttattctttcggtatcggttggaacatccataaagaaaagtttatggaaaatgtattgtggctggatcgtctgaaattacgcggctcttatgcagtgaccggatcggtgaatttcgatgcttatcaggcccttgctacttatgaatattataccgacgatcggtatcggtattggtttggaagccacctgcaaggtctggccaatgaggacttggaatggcagaagaccgacaaatggaacttcggattggaagtcggagcattccataaccgcttgaaagtgacagccgatgtatatacaaatcagactaataatttgttgtctgaaatgtaccttcccttgacgaatggtttccctagttatacggataatgtcggtaaagtgaagaataagggagttgaagttgctttgtcaggatatcccatccggaatacggaaaagaatatcatttggtcggtatctgccagttttattcatgaaaagaacgagatagtcaaaatctccgaggcattgaaagtggccaacgaggaattggaattacaaggcggatctaacccgaatttcatgtatcgggaaggagaggctttgcggaccatctatgtcgtcccttcgctggggatcgatcccagtaccggacaggaattgtttatcgaccgcttcggtaatgtcacattcaattgggatgcccgtgataaagtggcctgtggagtaaccgatcctaaattcagagggaacatcaataccatgtttactttccgcgatttgagtgtgaacctgtctttcggttatcgtctgggaggatctcaatacaattcaaccttggtggaccgggtagaaaatgcggataccagatacaatgtagaccggagggtgtataaagaccgttgggtaaatccgggggatcatactttctttaaagatatcaagaatacgcaggaaactcagatgtcatcccgtttcgtgcaaaaagagaataccctcgaatgtcagagcatacaggtaaaatacgatttcttacagccttgggtgaaaaaacacctgggaacccaatatttgtctctctcttttaatacggataatttattccgcgtatcgagcatcaagcaggaaagaggtatcgcctaccctttttcccggagatttactttctctctttcagcaaccttttaaaatttcagcaacatgaaaaagacgatttattatataatgataggctgcctcctgttagggaccggatgtagcgattggttgagcgtcaatccgaaagataaagtcgagcaaaaggaaatgttttcggatgaaaatggctttaagaatgctttgatcggtaattatattatgttgaaagacagtaaactgtatgggaaaacgttgaccatggagttttgtgagaatctggctcagcattggaagacgaatccgcaggcaatcgatgggtataccgccgcttatgattataaaaatactgaagtcgaagaattgatcgaagagatttacggaaaattttacaatacgatcgtcaacatcaataatctgctcgattatgtggataatggggttttgacttcagatatgcatgacctgatcaaaggagaggcattggcgatgagagctttctgccatctggatattttgcggctgttcggccccataccgggcgaacaaacaaaagacaggatcttgtcttatgtacgtacggtatctaaagattatcatgaggtaaatacttgggaagagtatgtgggctatctggaaaaagatttgaatgaggccgaaggtctgttgaaggaagtggaagaaaaagggatgaatgatgagtttttcagttatcggcaaaatcgtttgaactattgggcggtgttggctttgaaagcccgtttttacctgtggattcaggataaacccaaagcagcggagtacgccggtcgggttattgccaacaaaaatttcagattgaatcaagggggagattttgctgcaaaagacaatattgcttccccggagcatcttttttctttgcatgtctataatctgaacgatatcgtttctgggtattttttaaatgccggtggagtacaacaggatcaaaacaaggtgaaaaccgatattttcgagtcggatgttaccgatttccgccctcgttatttatggaatgaggttaccgaaaaagcgggaacccgctatattctggagaaatataaacaggaaggcatgcctgatgccggtttgcaagaagtgccgttgatccgtttgtacgagatgtatttgatcgcgatcgaatgtaccgatcaggaagcgaagtataaacccttggtcgacgagttggtcgttgcccggaatatctctgtgataaatgttgcaactgtcgacttgaaaaatgcctttgtggctaaagaataccagaaggaattttacggagaaggacagcagtttttccagaccaaacgcaggggcgataaaacgatcctttggaccgacatagaaggaagcaaggaagtttatgttttgcctttgccgaaaagtgaaattaagtttgaataattaaaagcttgaacgtatgaaattaaaatatttattgggaatagggatggcttgcttgatgatttgtagttgttcggaagaatatatgtccttcgaaggaacagatcggatacaatttaagacaaaggccgaagaggtatacacttttgcttattatcccgaaagcaaacaggaagatactgtacgaatcgaaatcatttcggtaggagaagtgacggattttccccgtaccgtcagattcgagcaagtgaccaaagaatggaaatatacgtatgatgaggaagatcccaaaaaggtggtcgattccacttatgtagatatggaatttccggcagtggcaggtgtacattacaaatctttaggcgagaaaaatgaattgatcctgccggcaaatcaaaatgtgctgaaggtgaatgtggttgtaaaacgggaagatatcagtttgcagaaaaatgcccggaaattagtattgcggctattgccgtccgatgatttcgaaaccggggaggtgaataaactggtgaagagcattacgatatcggataaactggaacgtcctacccgctggagagacaatgattactattatcaaaggtatttaggaaattggtcggaggcaaaacatcgttttatgatcgatgtcaccggacaaaaatgggacaataattttctggcttatattataaataattatgatacttggacgctgagggattattatctggctaaaataaaaaaggaattagccgaatataatgcagatccgaaaaacaatcctcctttgaaagatgagaatggtaaagaagttattttcccttaaaacgaatgaactatgagaacggtatatttatttttattagccttattgtctgtactatgctggtcgtgttatgacgatcaaggcaattatgattatcacgaactgaatcggaccgcagtatccggaatagatcccgtttaccgctgtgatttgttgagccgtttgtctattcctgttgtcatccagtcggaagataaggaccggacatatgattatgtgtggatgtatcataaaagtgagggatcgaaaaagatcgatactatttcgcgggagaaagatctggattgggtcgtttgggcaggtccgggagtttatcggcttattttcgaatatagcgataagcagaccggtgttgtgaattatatagaatccgaaatgatcatagaatcgaaatatttcaggggatggtatgtgatgaagcaaaatggggagacgaccgatgtcgatttcttttctccggaattacagaataccgggctgatacagaaaagtcggggagaagcactggccggccggcctcgttctttgggttatatcggtgattatgcctatttggacgaagaaaaggaagcgatggtcaaggataacgcctgtctgatggttgtgtcggagaaagaattacaagtggtccggattctcgatctgaaaatggttggcgatttcaattccctcttttatgagaaacaaagtgtcgttgctcccggtaaatggttcggtggatcggacgaaaacggtttggtgaatgatggaaaagtatttgccatcgaagtacgtggttcccctttaggagcgggtaagttcgcttatgcgaaggagggcgattatgaattggcccatctgatgacgaagaacggaactatgagccccctgtttttcgataccaagagcagtaaattttgtaccgttgtccgtagaaatccgaatttggtttatttggatagtgatgatcattctaaatttcctgaagcttatcctgatcaggagccgctttatgccggttttctggatgaggggatgtgggaaggtggaaaaggatacgttgtcatgcagaaaaaagacgcgaccaaagcccgttctattcttcatttcgatcttaattgtttggtgtcttggatgtcgggtttcctcaaaaacagaattacagccatcgataagattccgctggaaaatgagttcactcgagccgaatgctttgggatgaaccgtactttccagatgctgtatttttctaaaggcgataaactgtattattatgacctgcagaacaaacagacgcaggaagtgaaaagagtgggtggacaacccgctgtgccggcaggagaaaagatcgttatgatcaaacatattatcttcgacaataattatgaggcaccggatgagtacacgaataagttggtcgttgctaccggaaacggaagtagttacaaactttaccttttcgatacttcggcggataaagtaaaggacaatccggaagtttaccagggtgaaggaatgccttcggaggtaatgtatatgagttcgaaaatggataatgtatatttatgttattgatagatagtcgagtgtggttgctatggttgttctgttgtcttccgtggggaggaatcagggcggaggaatttgccgtgataaagggaaagatcgagggaaagatacccgtaaaggaagtacgactgatgaccgtagaaaatggggtaccggtaaaatatgccggtaccactattgccggtaacggtagtttcgcttttatgttccagccggcagagactggtttttattacctgtatgatggaaataattatcaccggatgtatataaaagcaggagatgaaatacaacttcagagaatcgatggggtttggaaacagataggttgtgtcggtgaagaaaatcgtttgttggcacactggacagaaatggaacgccctttgaaaacacgttccaaagcagaagcgtacggtgcctatttcccccgcttcgattcggtccggcaagaggtggaccggtggctggaaaaaataattgtccgggattcccttttccggaaacagttgaaggaaacggtcgaatttgatctgttgtatgattttgtttcttatattgctaaaaatcaacaattttatgaatccgaagaacgacaatcggcctattatcggcagatcatcggacatttccctcttgaagatgaacgtatcctgcaacaaccatacggcattcagttgcttcggaaatattttgcttacaaaaggagttttgttgtacgtcagggagaatattcgctcgatgagtggttggctgaaatcggatctccggtattgaaagccgaatttgtgttggctgaaatagataccgctagtttcgagcggttttgtgattacgaaaagaagtatttttctctgatgcaaaatgaggaacagcggctgcgattatgccagtataagggacgtcctcattccatactacaaaaaggagaacgggcttcgaattttatctttcccgatactaccgggcaatatcgttctatggccgatttccgggggaaatataagtttatcgatctttgggcgacctggtgtgccccctgtaaagccgaaattccttatttacaagagctggaggttgaatttcagggggaagagattgaatttgtcagtatctccatagatgaaaacaggaaaaaatggaaagaatatgttcgggagcatcagttgggaggggtgcaattgtgggccggtgattggagtcgtcttccggaagagttacacgtcggttctataccccggtttattttgatcgataaagagggtaattgggtagataccgaggcactccggccttctaatcctgcattaaagaaattattgaagaatctattgaaaaaatgatcggtttgaaaaaagtgatattgaccttcttcgtctgtctgataggagtgggggggatggaaaacgtatgggccggtgataaaacagttcgggattttcatgaattcgagttgtggcacaaactattgcaatacgggttatctccatccggagaatgggcgatgtggagaatccaggccggagagacaacagataccttgtttgtgcggaatatcgtgtcgggcaaggagtata

SEQ ID NO: 5947 - DNA, 21310 bp, Unknown
  gut microbiota DNA sequence
gaattttccaaagattcccactggatcgtcttttcagaaccggcgggagaaaatgcggctgccggtattgcttatcaggtaaaactggtttgccttaccaatggggaagaacaaatcttccggggaatggaaagttttacttttaccaatgatagtaaatatctgattttgaaaggaataaatgcaggaggtgccgtagaattgaatctttatgatcttgaaaaaaaacggataaagaatatagccaatatacaggaatatacggtcgatccaacggggaaatacctggcctataccctaaaaactgaaaagggactgagcaatagcctggaggtattggaactgaatgattaccgtcttctgtttttagaaaacgataaaaacggatatgaaaaattgaaatggacagatcacgggcttctgtttatgaaaatgttgtcggacagtacagggcagaagcaaggccgggaaattcatgtcgtccggaatatcggaaacaagcagcaggcctgctgttttgccgcagaggcctgggccgattttccggcaaatatgaaaatcagtgaatattacacaccccaatggtctgccgatgggaaaaaactgttcttcggtattgctccggaacggtatcaaggggaatcccgggcggaagttacagcagatgtcgatatctggcactggaaagatcaggaaatccagtcgcgtcagaaaaaccgctattacctgaatcgtagccggacctatttgtgtgtatggtggccggaagaaaaacgctggaggcagctggccgattcttccttgttcgatatagccggtatctctgccgacggggcatttgttttggctgtcgacgatcagccctatcggccccattaccgcgaacttcatcgggatatttatgtgatacagacggaaactggaaaacgtacccgcttgttggagaatacaatattgtcggcttctttttcccgcgaaggaaagtatgtttactattttaagaataaaaattggtgggcatacgatttggcgaaagaagaatatatcaatcttaccgctcaggtgactactggattaagcgatatatattacgatggccccatcgatatcgctccctcgttcggcattgccggttggctgaaagaagataaggctttttggttttatgacgaatatgatatctggagtgtcgagccggctacgctgaaattgaagcggttgacccgaggacgcgaagacaagatcactttccggaaatttcagcgcggagttttgactcccggctgtaacctgctgttgagagctaccggtgatgacggggcttccggaatttatcgcttcgatcccaaagggcatcatcgccctttactgtatgggccattcggtacattacgtttggaacagtcggcagataaaaagatgaacttactcggatgggctgacaatattacagctcccgaactattcgtttgtgatgaaaacctgaaccggcttcaacaattgacacatacgaatttgcgtccttccggatttattttccgcaagagtgaattgatccgttataaaaattcgcagggtaaggagttgaaaggagcattgttttatccggtaaactatcgggaaggtcaatcctatccgatgatcgttcatatttacgagaaactgtcccagcatttaaacgattttgtttttccttcggcatcggatctttataatacgatgaattatgtgttacagggctattttgtttttcagcctgatatcacctatgaggtgaaccggccgggcgaatcggcagtagactgtgttacggctgctgttcggcaagtgttgaaaagagaagatatcgatcctgcacggttggggttgatcgggcatagctggggcgcttaccagacggcttatatcatcacacaaactccgctttttgctgctgccgtggcaggagcacctctgacagatatgataagtatgtataatagtatttattgggaaagcggacgttccaatcaagaaatgttcgaaacgggacaggcacgtttcagattaccctggtggcaaatctcccggcaatatatctgtaattccccggtatttcaggcagaaaacattcagacgccgctattgatgatcttcggaactgaagaccaggccgtcgattggagtcagggactggaaatgtatattaccatgcgcaggcttggaaaaccttgtatcctattgacctatgagggcgaaggacatacaatcggtggacaaatgaataccttggatcaaaccgggcgtgtcatggattatttcgattattatctgaaaaaaacggttgcggccgattggatattggaaggacgaacttacctgaaaaagaaaggagaagaataattttaccagatcatgccggcagtgccggcattttttattaattttgctttgaaatagcttgttgtataccgacgttaaattgtatgaaaaaagggattctattatcattattggccgttatcctgcttgctgtcgttgtttgtgccatttggtatatcaatgaagaggggaaaatgcgtgccggtagtaaagattcttttatcccttacaattcggctgtcgtggtgacggttaatgccggggctgagttagcacctgagatccggcaggcttttgcggccgatttgaaagtgtttcgccggaagttgttggtccggataaccgatactttacaacaacaagggctggtgaaggcacatccttacgttgtggcagcccgggtggaaggcaagagcgacgtggctttcctctatgtgatggataataaagatgtcatttcccggggagaagtaaccgatttcctgaaccggacttttgctgccggaggagagaaggtacggaaatacgaccggcataaaatatatactttaaaacaagggaaagagatcgcttattttgctgtttgcggcggtattatcttgttgtcggattcggacctgtatatcgaagacggactgaaacaattcgacctcgaagaagccggggaaggagtcaaaccccattatcagaatctgaataaatatttttcagccggtgccggtataaatattctgttgaataccggagcttttacagagttgatgcctttgtatatccaggttaaaaaggtttttccccatgtcgatatcacccgttttttcaaatggggagctttggacggagatttcagcagccaggggatttgtctgaacggatttatgaactacagtggactggatggttcgtacatcgctacattggaaaaacaacaggcccgggaagcgaatatcgacggggtactgccttccggtctgctctcgttaggattgctgaacctgagtaatcctgcggcttactttgctgctttggacaattaccgctatacggtaggacaaaaagaaaatatcttcaggcgaaagcagcagttcgttaagatgttcggaaaaggacgcgaagaagagttgcgcgatttgttgcagggagagtttgctgttgtagatctggcctataatgaagcgacccgcgaaagggatgggctcatcgtagccagtcttaaatcgggtagcctgtgtaaagtggtgttggagaaaatgatgaaggaatatgcccgtttcgataatcagtctttagaaaactatttaaaagaatataacctcgaccgggaaaaaactttccgttactatcttttcccggctgatgatctggctgccgtttattggggatatatttttgaagggataaaatgccgttgcgtgttggtggaggataactacctgatttttgcttcctccgagagtgcggtaaagagttttgcccgcgattatgtgcatgggagcgtcatccgcgatgccgaatggtatcggcatctgaaaacccgtttggccggaaaatacaatatggcttattttgcccgtacggctgaggttttgcctttttatacctctttgactcagggaagttggcagcagttcctgactcgacgtcaaaaggaactgtctgtattttctacctgggcctggcagtggtccaacgagggagatatgctctataccactctttttctgagtacagccgagataaaggatgaaattcgtccgcatgtattgtggcagactaaattggatgggaaagtgagtatgaagcccgttcccgtgaccaatcatgtgacgggtgagaaggaattgttcgtgcaggacgatcgccataccgtttatctgatcaacgatgtggggcgtgtgctttggaaacttcctctcgggcagcagatcaatagcgaagtatatcaggtcgatctcttcaagaacgggaaattacaatacctgttttctactcccgacaagatgtacctgatcgaccgcaacggtaatgcagcggggcgtttccccgtcgctttcaaaggaaagtgcgagcagggaatatccgtgtacgattatgataataaccgcaactaccgcatctttgttccttgtgaaaaccgggaagtatatctgtacggtttggatggaaaaccggtagaaggctggaatccccaaaagaccgataaaccggtcgtttcgaaagtacagcatttcagggtggccgacaaagattatatcgtctttgccgatcggtatcgtttttatatattggaccgtaaaggcaaagagagagtgagagtttcttccgtattcgatctgaaacctcataccgatgtctatttaacccgtaaaggcggacaaccggttctggtatttgctggtaagggagggcagatacatgtggtgaatttttccggtcagacagagacttcccgggtagaaggattgtccgatcggtttgaaatgaatatagtggattgggatggaaatgggaacggggatgttttgtttaccgatggaaaccgggtattggtcacccgtttggatggaacgccgcttttcgagaagaaaatggaggctaaaactttaggtttcccttatgtataccgtttctctgctaaagacgtgcgtgtcggcttgaccgatccggaacaaaaccacttgtttttgttatcggctgatggaaagctgtccaaaggatttcccattaccggcgattcgcctttttcaatcgtctttttaggaaatgacggatttttcttgtttgccggaaccggaaacaatacgatcctgaaatataaggtgcaacgatgacttgaagacgtttaaagtgaatgatttagaaaatagataaattgcaaaaaatagtttttctaaaaatttgattttccaaaaaattaacacaattttgcactattgtgtaaatgttatatttatgatgaaattttgtttgaattggggtggtgcggctttgttgtctatgctgcttttgtgtacttcttgtggtgatgccgatcttttcgataccgataaatggaccaatgaaatagaaggctgggagccgggtgtttccttaaaagtgcttcaggggtcttttactctttgggatttaatcaatcagggcgatgacgatgtggtcgtaaaagaaggaaatgatctgatcattcaatataccgaagaaggtatttatcatatcgatatcggtcaggtcttcgatatgcctgctgaagatttggaattcggctactcatacacgatacccggtatggtatcgggagttcatttagtattggaccatccgttagaaattgaatttcagacttcaaccactttaaaagaagtgcctgatggatgtgaactgaaaaaaatccaggcttctgcccattttgtgttaccggaaataggatatccttatgagatcgaggctacattccccgatattgagatgaacggtgagattctgcatattacgaagtctgtacctgctaccggatcggagtctatcgatttaaacgattttatactcaccctcgatgcagagaaaaaggtcgatttagaagtaaatattgtcattccggcgggaactgaggtgacgaatcctgccttggatttgatatttggcttgaataatctcaaattcaaaaaagcagaagggaaaatcacggtcgatccgatcgctatcgacccggataaatttaatatggatatcgactttttggatgaaatcgggggtaagtttaagttcaccaagcctgaactgaatattattctccgtaacaaaggtatcggtgtcccgatgagtgtcgatgctactttctatggacaaaacgcagaaggagatacgttaacgctgaaattagaagaaggaaaagagttgctcactttagggaataagtcgaatatcgtgctttccgatactttagggttgaataaggataattccaatattgtagacttcctgtctttgccaccgacaggcgatatatcctatcaaggtacggtgacggtaaatccgcaaggagacgaggataatgtgatttacagcgacggtgaaatcgatctggatgcttatgtccggatacctttcgcattgagtgccgaaggactcaattacaaagacacgctgaacgatattgatatcgaccccaagtatgcggataagatcaaagaaggtgtaattacgattactgctgtcaatggacttccattgaatctccggattccgaccctggtgctgttgggagaaaatggcgagaaattggaaagccttaccgctgtgaaagggcgggatattattcaggctgccaacggtaaggagagtgtgctggaatttaatctgactcaggcacaagctaaaaaattaggacaaacagaaaatatccttttggaagtgaaagcttcgacaacaaataatcaagaagtggttgttgctgcagatgcgaaattatcgttcgacctgaaactggtcgcaaaagccgtgatcaccgatctggacgatttttaacatattcgggtaaagagtcggaataaaaaacaatagaggttacaaggatttcaagggttcatttaccttttggccttgtaacctttttgtcttaagaatatacactcaattaatttatacctaggtttaattttttttctttctattccgatttcggattttataccgtcaggccggttcgcctggaacggtccggtaaggctttcgttgatttcatcggttcttctcctgctcggaaaaacaaaagattttgtttttctctcgcttattcgaagaactcactgaccggcggaactcctcacttcgttcgtcaaacaccaccggtcgggcgttcggaaaacctaaccggacactcgttcctgttccaatggttttccgccacaaaaccctccatcttccgtttgcactacagaccaaagaaaggagaaggaaaatattataagcttgaaaaacaggtggaatacggatacctaggctatttgaccggattttcttattatttacaaaatactgatttctaaattaattcgtaatcttaatgtaaggaatcggaaaacggctgtttcgtagaagttcatgttttttaggtcacagtttgtttcccatgtagtgataacgtgagtcgaaggtgttcgtgttcgggaactattggagctctgtcgagtgtcgtcttgctttttctgaacgtccgatttaaagtaacgggagccgccggcagtgatgaggaaatcgtagccgaattgagccagatgatcgagatggcccggaaaacatccgattaggagagaaatattcaggaaatagataatactattgatgacgtgtattattttgcttcattcagcttgatagtacacgtcatttatttacctgaacctttcttgttactcttcctcttcgatttcgatgtgtaatccttcctcttctgccaggttatagtctttaccggcgacgatcagcacaatctctcctttcacgccgttttgtttataccagccggccagttcttcgagagtccctcttttgaattcttcgaacattttactgatttcccgggccacacaagcatgacgggtcgggccgaatacctctgccatttgttccagggcttttaccagacggaacggggattcataaaaaatcatagttctgttttcctctgctaaggcactcaacttcttttgccggccttttttctggggcagaaatccttcaaaacagaaacggtcgcaaggaaatcctgaattgaccagggccggaacgaaagcagtcgctcccggcaagcattccgtggctattccccgttctacgcaggtacgggtgagcaggaagcctgggtcggaaattcccggagtaccggcatcactgatcagggctatattctctcctctttccagtctttccgctatccggtctacttgctggtgttcgttgaatttatgatgagaaagcaggggagtggtgatctcataatgcttcaatagcttggcactggtacgcgtgtcttctgctaaaaccaggtccacttctttcaataaacgaagtgcacgtaatgtgatatcttccatattccctacgggagtaggaattaaatataatttacccatgactggttatacttattggtttccaatttatattgcatacaaaggtaatgattcgcttgggaaatggaatataattgagattccagtttgaattttagtcgggctttacatcggtaagtacaaactgtttttttattttacattttcttgtcctattttgctaaataatagaaggttagataaaatgttgaggattttgagaaaaaaaaagatattttttttgccaggaaataaatttgccgtatatttgcatccgctaagcaaaactatggtctgttcgtctaggggttaggacgcaagattttcattcttgtaacacgggttcgattcccgtacagactacgaaagacataaggtctgttcgtctaggggttaggacgcaagattttcattcttgtaacacgggttcgattcccgtacagactacttgaaaagttgaatttttatatttgtagagatggcaaatcataaatcatcagaaaaaagaatcagacagactgcaactaaaagagaacataatcggtattatgctaaaacgacccgtaatgcggtgaaaaaattacgtatggtaactgatcgtgctgtagcagttgaattactgccgaaagtagttgctatgctggataaattggcaaagaaaaatattatccatgataataaagctgccaatttgaaatctaaattggctttgcacgtcaataaactgtaattcgtttattctctaaaccgatatacaggagatgagtaaaactcatctcctttctttgttatctcccatatttttcgtaaattgtttatctaaaacttttgcgttatgggtgatcagtatctaccgatgaattcctgggctgctgatgaactgcctagggaaaaattgcttacaaagggtgttgctgcgctttcgatcagtgagttgttcgctattttgcttcgttccggtgtcggaggagagacagctttggagttggcccggcgaatcctcgccgataataacaacgacttgaaccaattggccagacgctcggtcagggagttgataaataagtataaaggggtaggcatggctaaggccactgctattgttgcagcgatagagatcggacggcgtcggcggcccgagaccaaaagaatgaaatcggtgatccgctttagcagggaggcttatcggtatatccgctcttttatcgaagacttggatcatgaagaattttgggtcatctatctgacacattccaaccaggtgaaaggatgtgaatgcttatcgtcgggaggaatggacggaacggtgatcgatgtcagattacttttccggggggctttagacatgaaagccacttatatcgttattgcccataatcatccgggaggctctttggtccctagcacatacgacgagctgattacccgaaaaatctatgagggaggacaactgctcgatatcaagctctatgaccacattatcgtcggagaaaatgcctattacagttttgccgatgaaggcaaattgaacttttccaggaaaaaacaataaacagaccggtttgggtgccacattgtcagcaaaaactgccgcattaacagaatgacaaccacgcctgtcagcggtttggtattggcaaagtttttgcttagttttgctttagcaatttttatagtatccggggatactctatttgcgtaatacttgttgataagatagtgtaaataattaaaataaacgccatgtctaaagatgtaaaggatactgaagcacaggaagaattgaaagataaagtaaacgccggggatgtaaaagaagagaaagaaaccaaagaaaaacacgccaaagcgaaaaaagaagataaagaccagaaaatagaagaactgggacaaaaattgtctgaaataaatgataaatacctgcgtttgtcggctgaattcgataactatcgtaaacgtacccttaaagaaagaatggaattgacgaagaacgcaggagaacaaattctggaaaaaatcctgcctgttatggacaatttcgaaagagctctgaaaagtatggaaacggccgaagatgtgccggctttacgcgaaggagttgaattgatctatgccaacttcagggatttcttatctcagcagggagtgaaagaaatggaatgcctgcataccgatttcgatcctgaattgcaggaagcggtaacgaagattccggctcctgccgaagagttgaaaggaaaagtcgtcgattgcattcagaaaggatataccttacatgataaagtaatccgttttcctaaagtagttgtcggtgaataataaatccacgattggaacagaaggtgtgtctggaaattcggattttggattacagcggtaaccccaaatccggaacctataatcaaatataaaagtaatggctgaaaaaagagattattacgaagtgttgggggtggctaaaaatgctgaagcggccgagataaaaaaagcttatcggaagctcgctttacaatatcatcctgacagaaacccgggagataaagaagcagaggaaaaatttaaagaagcggcagaggcttatgatgtattgagtaatgaagaaaagcgccgtcgctatgatcagttcggacatgccggaatgggggcaggagccggaggtttcggcggggcaggaatgagtatggacgacatcttcgcacatttcggagatattttcggtagtttcggtggcttcggtggttttggaggcggaggacgttcagccagacgggtaaatcggggaaccaacctgagagtgaaagtgaagatgaccctggaggaagtggctacaggcgtagaaaagaaaatcaaagtaaagaaatatgttgctgatacccactgccacggtaccggagcaaaagacggtaactctttttccacctgttccacttgtcatggtaccggacagatcacccgggtacagaataccatcctgggtgccatgcaaacgacatctacttgtcccacttgtgaaggagaaggcaagataatcaatgagaaatgttcccattgtaacggagaaggtgttcagctttccgaagaagtgatcaccttgaatatcccggccggagtggctgatggcatgcagttgtctttgagtggaaaaggaaatgctgcccgtcggggaggagtaaacggtgatctcatcatattgatcgaagaaatcgaacatcccgagttggtgcgcgatggaaacgatctgttatataataccttcatcggtttccccgaagctgtattgggcgattccgtcgaaatcccgacactcgaggggaaagtaaaagtgaagatagaacccggtacacaacccggaaaaatcctgcgcttgaaagggaaaggaattcccgacatcaatgggtatggtaaaggagatttgttggtcaaagtgaatgtctggattcccaaaaatctttctaaagaggataaaaaaactatggaggatttgaaagaacgtagcttcttgaaaccgtccaatgtcgaaaataaaaaaggatttttccgcaaggtaaaagactttttcgaataaaaatctcaaatacacgacctgaatgatcacactgacccagctggaatatatcgttgctatcgatgaatatcgtcattttgctacagctgcagaaaaatgtttcgtaacccagcccactttaagcatgcagataaaaaagcttgaagatgagctgggagtcatcattttcgaccgttcgagacaacctgtcgtaccgaccgatctcggggcaaaattaatcgaacaggcacgtatgaccttatccgctacgcaacggataaaagagatcattcaggaagaacagcaagaggtcgagggaacactgaaaatcggaatcataccgacactggctccttacctgttaccggttttcatcgggccctatatccgcaaatatccggcagtaaaagtcgaggtcgaagaattggtctccgaagagatcattcgccggctgaaacgtgatatactcgatgtcggcttattcgttaccccttaccacgacgaaaaaattgtcgagcgtcccgtattctacgaagagatgttggtatatgcacatcctgattgcgaattgctgaagaaaaaagaagtcgggcatgaagatatcgttacctctgacatttggatgctgggaaatggccactgtttccgtaatcaggtcgtcaacctttgtgaaatgtctgcgagccagcataagaatctgcctttcgagttcgaaagtaattccctcgaaacgctgatgcggattgtagatgtggaaggaggcttcactttgattcctgaactggccttgcaatatatgtcgcccgaaaaaaagaaacaggtcaggtctattgccaatacgaagcctctgcgcgaagtaagtgtcatttattcccggcatttcaccaaacaacgtttgataactttgctttgtgatgagattaaatccgtagttcctgcgcatatgttgaagcgggataggggaatgatcgtcgagtggaaagtagaaaaaaatgaataatattaaaatagaggggaaaggaaattatggatctgatcaaaaatagttttttagaagcacagcaggtgctggaagcttttatttccgatgagaaaaatctcggacaagtaaaaaatgccggagatctgctggtagatatgttccggcaagggggaaaagtgtttagttgtggcaatggagggtccttgtgtgatgccatgcattttgccgaagaactcacgggacgtttccgtcatgagcgggctgccctgccggccattgcaattgccgatccttcccatttcacctgtgtatcgaacgatatgagtttcgactcggttttctcgaaatacctcgaggctttgggtaatcggggagatgtgctcttagcgatcagtacttccggtaactcttccaatatactacaggccatcgacactgctcatgtcaaaggaatgaaggtgatcggactgacaggaaagacaggaggagaaatgaaagaaaaatgtgatataactatcgtagtaccctggaataagtatagcgatcgtattcaggaaatacacatcaaaatcattcatattttgattgaatatatcgaacaagcattatttaacaccaataaataaatttaacacaaaagtaatatgggtaataagattaacgacccgatagctcgtctgatgggattgagatataaatcacatccttggcatggtttggaagtaggtgacgatgctccggaagtggttactgcatttatagaaatggtacctacagatacagtaaagtatgaattggacaaagtcagcggatacatcaagatcgaccgtcctcagaagtattcgaatgtggtaccggctctctatggctttatcccgcaaagttattgcggtggtttggtcgccgaatatgcgatgcagcaaacgcagcggacagatattcagggcgactgtgaccccttggatatttgtgtattgacagaaagaactatctcgcatggagatatcattgcccgggtacgtccgatcggtggcttccggatgctcgacggtaatgaggcagacgataaaatcattgctgtgttgaaacacgacgctacgtacaacgtatataatgatatttccgaattaccgcacattgtcgtcgaccgtttgaaacactatttcctcacctataaagatatgccgggtgaagaaggccagcgtaaggtcgagattactcatgtttatggcagggaagaagcttatgaagtgattcgccggtctctggaagactataaaaaccatttcgaaggtttggaggatattttgagccgggtgtgatttacggcttgctccttccttaactcccccacgattcccggtccaggcttcggtattgaatagcctccgcaatatgttgcggcaggatatggtccgaacttgccaggtcggcaattgtccgggagagtttgataatccggtcataagcccgtgcagaaagtccgaatttctgcatcgccatttttaataaagaaaggcattgtttatccaacggacaaaagcgtttcagcagaggcggggacatttgggcattacagtagatacccggataatctttaaaacgctccgtttgaatgttgcgggcagtgatcacccttgcccggactacgctactagggtcggcttcttgtattccggcaattttttccagttctaccgggacaacctcgatatgcatatcgatccggtcaagcagaggacccgaaattttggataaataatgctggatcgcacttcccgaacaggtacattctttagtcggatggttataataaccacagggacaaggattcatggaagcgatcagcataaaattggccggataatcgacactgtagcgggcccggctgatggtaattttccggtcttccaggggttggcgcataacttctaaaacattgcgctgaaattcagtgagctcgtccaggaaaagaacaccgttcgtagcgagagagatttcaccgggacgaggaaaagctcctccgccgatcagggctatcggagagatcgtatgatggggtgaacggaaaggccgggtcgtaatcagcgaacaattccgggatagttttcccgcgacggaatgaatttttgtggtttccagcgactcttcgacagtcatcggagggagtattcccggtaaacgcctcgcaagcatcgtcttccccgagccgggtgctcctaccatcagaaggttgtgagcaccggcggctgcaatttccaaagcccgtttgacggtttcctgccctttcacatctttaaaatcataaagaagatcgttggttacttccgatagggtcggatcgaaggtgaacggttctgcctgctgtttgccgttcagaaaatcggtgacttcccggatatgggagaaaccatagacgtgtataccttcgactacagcagcttcgtttgcattttccaacggcacgataatgcttttgaaaccctcgctcctggcattgatagcgataggaagtaccccttttaccgccaccaaacttccgtcgagtgataattctcccaacatcataaaattctccagcccttcgggcgagagttgttcgttggcagccagaataccgatacagagtgggagatcataagcagagccttcctttttgacatcggcaggagccatattgatgattacccgcttgcccggaatccgggaaccgatctcccgcagggccgaatcgatccgttgctgactttcttttaccgcattgtccggtaagcccacaatgataaatttagcaccgttcaggatgttaacttccagcgtaatggttgtggcctcgattccattgacggcaccactaaatatcttcactaacatgacaccgcagatttaagattaagtgtatgtaagttaagataattttacaataaatcaaagtgaaaatcctgatttttatcttcggtctcgagcactacttcccgaccgtcgaaactggcgaaactataataggtgatccagtcccctgtgttgatatagcggctgcttggcgaaagagtaaaatcgataggcagatgccggtgtccgaaaatgaaataatcgaaatgttgtccttgcagcacttcccggcaaaaacgaacgatctcttctttttccgctccccggaatgcatcggcttcgattttgccgttttccagacgggaatgcgacgaccatttccgcgcaatcaggattccgatatccggatgtagccatctgaaacaccgttgtaaaaaacggttgtgaaaaatacggtagaggaatagatatcctttatcctgtgggttcagtgcatctccgtgtccgatcaggaaacgcttaccggctatcctgaaaatttcattgtgagtatgtaggatcacgccgcattcttccgggagataaccgaatgcccagatatcgtgattacccgtaaagaaatgtacaggtatgccctggtccgtaaactcgcatatcttggccagaaagcggacatgccctttgggtactgcccgcttgtattcgaaccagaaatcgaagatatccccgagcaggaacaactcgccacaatccggacggatggtgtcgagccaacggatcaggcggttttcccgttcccggtcattatccaatacaggagcacccagatggacatcggaaacgaaataaaccttttttccagcctggagccggagggtatgctctgtatgggggattcgctcactgattttcatcgattctgcctctttctcgctcttggggtgagtaattttaaattattttaaaaggtcgttcaaacggtcttccaggcgttggcctgccagatttttcccgacaatttcaaatttagggttgataatataattggcaggtacacgttgtatgttccacatctgagcagcacggcttttcaaaccatccggatcccagacacaaatccaattgatatccaactgttttacgagactttgccaggcaagtttgttcggatccagacaaacctgataaatctgaactccccggtttttaaatttgttgtagatctttttcatttcttgaatatagccgactccgtctttgctgttcaagacagtaaaatcgagcaatatatatttccctttcagcgaactaagggcaatggtgtccccctgtgcattcggaagatggatttccggcagtgatccttcgctgttgttgatcaattgttttattttcatgttttggatcgccttgttgatttggtccaaatgattcaggatcgctttcgtatattgcgattccggatacatcgctttcatcgaagaggcgacgactttataagaatgcaaatcgttatccggattcaggatgaaattatcctgatcgaatttctgatacaaggcataataggaagccggcgaaatggcatgcttcaggataaaatccttcgaaaagttaatttgtttgttcacgatcgaatcccaggcggctgcaattttttgacgttcgctggtcgcttcggcaggaagggcggcaaagcttttcttcagtgaatccatcatgacatgagtattgttcagttgaaaattcagcagctttacccaaagggaattttcagatccgtctacccagtaattctgggaaagtccgttcaacgttccgctcaattcgatatgatcttccggttcagcaatgaaagtaataaattccttcggaccgatttttacattatagaaagtggggagggatgttgctgttttaaaggtgaaatgtccgtaccggtcggtttttgtcgagtcgatgatgacagcttgatcgacattcaactgctccaggtacactttttgattttcggcttccttgatctctccggtaattttaacattatttttacttgtacaggcagccaatgcaagtaatacaaatacagacgaccgtatattttttctcaacatgatgaaaaaggttagttattactagattttaatcgtacgaaaatacaatttttttcggctaggacaaaaggaatctattagttaaaattctgtcaagaattatttctttctgttgctttctaaaggaaaagaatatatttgcaaacgatgttgaaattgggcaaacagatattgcatacgttagtgctgcttattaccgggatggcattgattggagtgaatgtaactcagtcgggttgtattcattcggaccgcacatatctcgaagtcagagtcctgcctgcagagaacacatgtccttgcgaagaggaatgtggctgttgtcagggggaacggcaattttgcaaagattgttgtcatgcttcttcccgtcatgatttttataaagtgaccgattcttcattggtagagcggggtttacaaatgcaactttccgtatttaccttacctgaatgcggttgggagatgacgatacagattcttgctgtgcgggacggaaaggatggctttgctttttaccggaagtttcccgggattccgccctcgctggaatcgttgtgtactttcctttgttaaaaccttttgccggtcagtcctgaccatggatttggataaggtgtgttgtcatttttaatcttcaatcataaggtaaatagtgtaaaaatgaaattgttcagtttaatggtactgttatgtgcctctctgggaggatatgcccaggatataaagggacgggtggtcgagcaggagaatggaaaaaaggtcggtttgccgggggccaatgtctattgggccggaacgacagacggtgtagtgacggatgctgaagggcattttaaaatcaaatggaataaatcggggcgcttggtcgccagctttatcgggtaccggaccgatacgcttacggtaaaacgcacggataaacaggtcgagatcgaattggtggcaggagaagtactcgatgaagtgaaagtggtcacccggggaaatacgacgattatgagtacccgggggcctctgatcgaacaggtgatcaccggcgaagaattgtgtaaagcagcttgttgtaatctgggagagagtttcactaccaatgcttcggtagatgtggcatatgccgatgctgtgactggggcgaaacagatccagttgttggggctgaccggtaaatatgtgcagatgatgacggagaatatgcccaattttcgggggatttcggcattatacggattgaattatgtcccaggcccttggatgagcgctatctcggtttcgaagggggccggttcggtaatcaatggctatgaagcgattgccggacaaatcagtgtcgattataaaaagcctgctacgagcgaaaagatttttgtcaatgcctatgggaatagtgaagggatgatcgaattcaatgccaatacaggcatccgtctgaatgacaagtggagcacagccatcctggctcacggggattggctgaccatggaacacgatggaaaccacgatggctttttggatatgcctaaaacgacccaatacaatgtgatgaatcgctggcaatataagaccgatacttggtttttgcaattcggagggaagctcctcgacgaaacccgcctgggagggcagaaaggatttaggaaggaaatgcggggtagctatggagagggtactttgtatgggatcggcatcgactctcgccggtatgaaggctttttgaagttgggttatctgatgccgcagtacgagaataccagtatggcgattttggtgaattataccgatcacgatcaggattcatattatggcgcccgtgattatcaagcccgtcagcagactgttttttctaactatatttttcagtctatattcggacagaatgaaaatcagaaatattctgcggggttgtcctttaatttcgatcgttatgatgaatccttcaacgactatttagtgggttccggtcaaaagacggcaaccgtagatttcgatcgtaacgaacgggtaggaggggcttttttccagtataccggacttttctggcaaaaattgaccgtaatggccggactgcgttatgactaccataatattttcggtagttttgtaactccccgtttacatctggcttatgcccccgacgattttacgatgttgaaggtgtctgccggtcacggtgcccggacagccaacatcctggccgataacagttatctgttggcttctgccaattcggtatacgtcaacgataaattgttggcagcccatcccgaagaattagatcgtttggatatggaaaaagcctggaatttcggagtacagttgaaccgcaaatttctcttgttcgaccgtatactgaatatcaacctcgattattaccggacgaactttaccgatcaggtcgtggccgataatgagactcaggtaggaaaagtcaatttttataacttagacggtgattcttactccaattgttatcaggtggaagtgaaatacgaattgatcccccggttcgacgttttgggtgcttatcgttacaatgatgtgaagaccacgatgggcggccgtctgttgagggctccgctgcaaagtaaatacaaaggcttgttgaatttgtcatattacaccaatatgaagaaatggcaattcgatttcaccactcaattcaacggtccgggacgtattcccgttcctgtgtcagaaaattcaggacaagcggatcgtttcgattctttccgtatcatgaatgcccagatttccaagtttttccgtaaatggagtatttatgccggatgtgaaaatatcggtgatttcacccaaaaacatcctatcctggctgccgaccgtccctggagtgacgctttcgactcttcgaaaatttggggtcctgtacacggacgtaaattttatctcggccttcgcttcggattagaccgggaataatattgttttattaactttgatacataaatttaaaactaggaaccatgaaagtagtacgattagttttgataatggtagtagtattgtcagctgtcatgagtgtaaatgctcagaaaaagaatgagaaaaccgtcatttttaatgccaacctgcattgcgaatcttgcaaagcaaaagtagaaaagaatatcccttatgaaaagggagtgaaagacctgaaagtggatatgaaaactcaaaccatcacagtcactttccgcgaagacaaaaataccaccgaaaacttgcagaaagccatcgagaaattgaacatcgaagtgaaaggaatcgaagaaagtaacacttctgccaaaacccaagccggcgaaaagtgtgaaaaatcctgttgtgaaaaagaggggaaaacgaaataaaaataaagaaaaagagggtg

SEQ ID NO: 5948 - DNA, 576 bp, Unknown
  gut microbiota DNA sequence
atataagaaatgaaatacgacttaatcgtaattggtagtggtcccggaggatacgtggccgccattcgtgcgtctcaattaggaatgaccgtggccgtcgtagaacgtgccgaactgggtggaatttgcttgaactggggatgtattcccacgaaatctttgctcaaatcggctcaggtgctggaatatgcacatcacgccgcagattacggggtaaaaatcgagaatgccactcccgatttcgatgccatcatcgcccgcagccggggagttgccgacaagatgagcaaaggaattcaatacttattcaaaaagaataacatcaccgtgatcgaaggtcatggaaaattgactgcagacaaaacagtagaggtaacaaatgctgctggagaaaagaccattttcgaggctcgacatatcgttttagccacgggcgcacgttcccgtcaactaccgaatatccctcaggatggaaaacggattatcggttaccgtcaggccttaactcttgaccacaagccggaatccatgatcgtggtaggctccggggcaatcggttccgaattagcatatttc

SEQ ID NO: 5949 - DNA, 39869 bp, Unknown
  gut microbiota DNA sequence
aacaatgaaagaatttatccccaattttgaacatatagagaaagggaaaaatttggatcagaagatgtgacattcatttaagagttgaattgagtggagtttcatcacttgggatgaaactccatttttttatagattattcgctggatttttaaatcaaatcatacataaatatagaatttatgaaaattaatatttgtattttatatcgctattcagtgagctgttggggatgtggcagatttataatttttttaagaataaaaacgcggtagttttataaaagtatgtatttttgcaaagattgattggatattgtatattagttgtaaaatagagagatgctaagtttattgtcagataattggagattggtgctatcgatggtattggctttgttgatcggctggaatattcgtgtgccggtgttcaagatggccatactgaagaattttgtggataaaccgaataaacgttcttcacataccgggtgtgttccgaatattgggggaattgttgtttttttagcttttttgtgttcatttttactgtttgtcagattcgatagccggccggaatttcagtatgttttattgggggctattttaatttttctggtgggtatttatgacgatttgctggagatatctcctcgtaaaaaagttaaaggagagatgttgggggttttggtactgattgtgggaggagggttttatctgactaatctgcatggttttttcagcttctacgagatcagcccgtgggtaggtatcccattgacttttgtgggtttggtcggattaatcaatgcgatcaatctgatcgatggaatcgatggtttgtgttcgggaatggccatgatcgattgtatttttttcggtatttggttttattattgtggacatatcgagtatgctttgatgtgcggggtgttgactgctgcccttatccctttctttttgattaatttgttcggaaagcgttccaagatgtttatgggggattccggtgctttgatggttggatttttgcttggagtgatggcgattagattttgtgaaacggatatcaatctgaaaggtatttgtgcggtagaagcagcgcccggagtggtgttcagcgtattggctattccggtgatagatacgttgcggttgttcgcttcccgctggatgagaggaaaatctccttttgcgcccgataaacggcatttgcatcataaattattgaccatatataacggtgtgcataaaaaagctacctttactattttaggtttgaacctgttatttatggcattcgcatatatcggaagagactggagaaatgaaatattggtcggcggagatatcgttctgttcgctgttatgttctatattgtcgaccggttggcaaagagaaagttagctcagaaagctgcgaaataaacgattgcagagaatcggtattcgcccggagatgattccgggttttttagtttttatttataaaaaacgagatcatgaaaggtataatattagccggagggtccggaacacgtttgtatcctattaccaagggggtttctaaacagttgttgcccatttatgataagcccatgatttattatccgttgtctgttttgatgctggccgggataagagagatattggtgatttcaactcctcaggacttgcccggttttcgtcgtcttttgggagaaggagaggattatggagtgaagtttacttatgcggaacaaccgagtccggatgggttggctcaggcttttattatcggccgcgaatttatcggcagtgattcggtttgtctggttttgggagataatattttttatggacagagcttttcacatatgttgcaggaagcagtgagaaatgccgaggaggagaagaaagccacggttttcggttattacgtcaatgatccgcaacgatatggggtggcggaattcgatgagaagggaaatgtattgagtatagaggaaaagcctgtgcagccgaaatcgaattatgccgtagtcggattgtatttttatccgaataaagtagtcggggtggcttccggaataaaaccttcggccagaggagaactggaaattacgaccgtcaatcagacctttttgcgagacgaggaattgaaagtacagttgttgggacgaggttttgcgtggctggataccggtactcacgattctttatccgaagcttcgacctttgtagaagtgatcgaaaaaagacagggcttgaaaattgcttgtcccgaagaaattgcctataaaaaaggatggatcgatgcccgaaaattgagggatttggctgttccgatggcaaaaaatcagtatgggcaatatttattgaagttacttcgataaatgctgttagcaagaataaaaatagtggctatgaaggtgattaaaacaaatatatcggatgtcgttatcctggaaccccgggttttcggtgacgagcgtggctattttttcgagagtttttcccagcgtgaatttaatgagcaagtggctgaggttacattcgtccaggataatgagtctaaatcgtcgtatggggtggtaagaggtttacactaccagttgcctccttacactcaggcgaaattagtccgtgtggtggaaggtgaagtactggatgttgtcgtggatctacggaaaaattcggctacttttggaaaacatgtggccgtagtcttgtctggtgaaaataaacgacagttttttattcctaaaggatttgcacatgggttcgctgtgttgagtccacaggcggtttttcaatataaatgtgacaattattatgctccgcagtatgagagtgggattcagttcgatgatccggcgctggggatcgattggaaaattcctgaagcagaaatgattctctcggcaaaggacagaaaacataagggattgagtgaggcgtttgtttttgaggggtaggttaggggaacggagaatggagaaattgagggacttttaatagttgtaaaggtttcagtggttgcgggagtgtgagtctctgttgtagccgctggtactgggaaatgtacatttaatttataatttatggcgaatatattgattacaggggctaacggacaattgggttcggagttgagaaagatcggtttttcccctttggatgaagtgttttttacagatgttgccgaattggatattaccgattatacggcgatcgaaaagtttatccaggtacatgaagtggatacgattatcaactgtgcggcttatacggctgtagaccgggctgaagacgaacccgggccagctgctgaaattaatacccaagccgtagcgaatttggcaaaggcggcacaaaagggagattgtctgctgattcatatctctacggattatgtattcgacggtaccgcaacgacaccttatacagagaaaataaagacttgtccggtcagtgtgtacggtaagaccaaattggccggagaagaggcgatcatccgttccggttgtttttatattattattcgtaccgcctggctttactccgccttcggtcataattttgtgaaaaccattttgcgcctggcagaagagcggccggagatcaatgtggtaaacgatcagatcggtactcctacttatgcagaagatctggccaaagcgattgtcaaaattatggctaacgatgatcgggtagaacatgaagggatttatcattacagtaatgccggagtctgttcgtggtatgatttcgcagttgaaatcgtacggctgagcggtttgaactgccgggtaaatccggtgactacagccgaatatccgactaaaacacatcggcctgcttattcggtattggataaaactaaaataaagcatacctttggagtcgaagtgccggagtggcaagaggcgctgaggaggatgatgggggaaataagtggggaacagagaaaggaaaaaatataaagttatgaaaaatattttaattaccggaggtgccggttttatcggttcacatttagtacggttgatggtaaataaatatccggagtatcggattataaatctggataagttgacttatgccgggaatctggctaatctgaaagatattgaaaagaaaccgaattatgtgttcgagaaagccgatatttgtgattttccggccatacaggctatttttgaaaagtatcaggtcgatggcgttattcatttggctgccgaaagtcatgtagatcgttcgatcaaagatccgttttctttcgctcagaccaatgtgatgggaacgttgagtatgttgcaggctgctaaattagcctgggagggccattttgacgataagttgttttaccatgtttcgaccgacgaggtgtacggtgctttgcaacccggtaaggaactgtttaccgaaaagaccaagtacgatccgcattctccttattcggcttctaaagcttcgtcggatcattttgtccgggcttatcacgatacttacggtttgccggtaaagatttcgaattgttcgaataactacggttcttatcagtttcccgaaaaattgattcctttgtttattaataatattcgtcataataagccgctcccggtgtatggaaaaggagaaaatgtccgggattggttgtttgtcgaagatcatgcacgggctatcgatttgatttttcataaagggaaagtcggggatacctataatatcggcggttttaacgaatggaagaatatcgatctgatcaaagtactgatcaaggtaacggaccgtttgctggggcgtcccgaaggggcttccgatcatttgatcacttatgtaacagaccgggccgggcacgatctgcgctatgctatcgattcaacaaaattgaaaaatgaattgggctgggaaccttcgctacaatttgaagaaggtattgaaaagactgtgaaatggtatttggaaaatcaggagtggttggataatgtgacgagtggagattatcagaaatactacgagatgatgtacaaataagtcgaagatgaaataaaaaacgatttcccggcccgaacgaccgggaatttttttagtgaataaaagccgggtgaatattttgacccggtaatttcaaggtgtcaaagaccagcgtagattcggcagaatcggtttttagcaggttgtatacttctttggcgcgtttgatttctttcatcaggtcgttttcgttcagtgcgtgtgctgcgtcgcgttgcagttggtatttataggcttccatgaatgtgttgaaggaaattttgtctacatcgacactggatttaacggcggtaaatgccaatacggattctattttttgagtgatacctactacagtaaccttgcggatccaggatttgacatctatacgtaccagtgccagaccatcgaccatgatgaagtagtccgaatgttcggcttgtactccttcacccgatcccatcagcatattgataccggctccgatcagtgctccgactccggagattacgttttcactacctccggtgacgaagctttttattgcattagtcgcttctccgacgattttggtggaatcgtctttacaataggccctcatttccgaggtgtcggcaatgatatgggtaatcggaatggtagggttttcgatagtcccggctgtgcggatattgtctgcaatctgcgtcttgaagtgatcacatttgctggttgccagttcgaaaagcaggttcaggttcagcatgatttcttctttcttttcaggtgccggatcggcttttttaatggaatttcttaaactagacatggcttttaaatttaaaaataaactgttgttttgtaagcttacccggcaaaagtagtcgggattaaaacggaggagtaaataattttttaagaggtaggtcattgtttgtagatcgttggttaggttatttaaaaagaaaagcggatggttgataaactccaattgacagtttaagaaaggaaagaggatttaaaaacaggagctgttatttttggtaccgtaagcttacagcagtgttattcattaaaaattttaaatcatggaaaatcaagaatttgatatagaacttttggaaaaaaagttggaagaatatgagcaggctgattcgaatgtgcgaagcgaagaagtactcgaatttgtgaaaaaagtactggatatcactttactccagctcagtaaagggaatgtatcggatcgggatatagaagaggatattcggtttgtccgggatgaaatcgggaaaccggactttttgaaacagttggttctgcatgtacaacaggctgctgataggtgggcctctgcatcaaaagaggaaaatggacaagattaccttttctctgaattgtgtcttttaataaagttgggaaggaatgccgtttgtacgttgggctttttatgttgcagagaaggaaaattcggggttttatacgattttatgacggcaggaaatcaagtgttgggtgggtattatgattggaagacccggcttagatcgtattttatgaatctgatcaccccttctatgctggcagaggctttcgattctttacgtctggggaaagtggctgttcagacagccggttggcggacggacaataccatggcggtcccacagctggtgtccgattattttctttatgtcgataaagcttatggagaccggttggatgtacatctgcggggagaaaccttggctacgcctgccaggctgggattccccgctgtaaagttcgaccttttttatgacgggagcaccggactttttaagttgcctttcgggtttcagggctggttcgggctgtgtggtgagagaactatcgttgcctttgctggaacacgtcttttgcagctggggacggtatttaccgatgcagagcaaattttcggtccgagtctgatctatgcctgtgctgtggggatggtcgctcttgtggctcagcatatggggcaagggaatttgttcgtgctgggacattctttaggaggagggttgactcaattcgctgttgcagccaatcgttcgaatcatattgaagggtggggattcaattccgccggtttatcggaaacttctgtcagagctttgcttactgctgctgatgtagcaggtggcatggaaaatgtcgttcttcatcattatgttaccggagccgatcctgtttctaaactgggaggattggtcggaacggtgacgacaattccgggatcggctgacctggggcatacgcgtgatgacttgcgtcaggtaatttaagaccgattacctggggggaggtatcttgataaggacttgtcggatacttccttattcaattgaaaattaaatacaatcatatggaaacatcaggaaaacgccgtctccggatggggaagaagggccaatcgacccgttcaggtaaaacattggtagaaaatcgatctgttcgtacccgtagttgtttggattccgaagctataaaaacccttcaaattgcttatgaatttcatggctattgggaagaaaccctggtttgtcagggagaaaaatattgtaaaatagagatagaaggaggagggcatttacaaactgtgggggctcctaacctgcctcaggaaggtatttatgtgaacatacctgagaatgcaaagtttctgaatttgcaagtcggggaatgtcacgaaaaaacaatagaagtggaatatccgatagctccgaatccattgcctgctttagaaggggaagaattactataccgcaaagacagtacaatttatgattccgggtctttgtttccggcagaagtggctgtattctcagccgttcgtcgtatcgggggagtaaaggttgtacatatattagtgaatcctgttcgttattatccggtacaacggcaacttcaggtggtggaaacgatgattttgaaaataacgtatgaactatcggaagagacggacactatcgggaagccgcggcatcatcggtgcggaggccctgcggtggatattttggggatgccggagatggatggggtgactaccaagggagggggcagaggaggtagggaagatatacgaacgttaaagaatcccgctaattgtgccgaattgctgatcgtgactaaaccggacttgagaccggcgttcgatgatttcctcgaatttaaaagccgggatttcaaagtagctttggccgataccgggcagatcatatcggaattcggcggacaatcggggatggatgagcagatccgggagtttttgtgttatgctgctgaaaattggcgtatttctccccgctatattctgttaggtggaaatattacggatataccgacacattgggaatactttttgggggccagaatttcgtccgatcatttctatgccgacttaaagggcgatttgtcgcccgatgtcgtcgtatcccgttttcctgcatcggagccggaagaaatgaagaacatgtgtgattattttattcgttatgctcaaacgcgtaaggagtggggaaaatctgtactgctgtcttcctataaccgggaagattataacgaatgtacagaagaagtagccggtattatcgcttccgatttccaaatttataagtgttatgacggtcaggcgacaaaagaagaaattatcgaaacgatcaatcagggagtcggatttatcaattatcggggacacggacttccgacgggctggcaggcagggaatgggctgacttctgacgatctggtgcaattgaagaatgtagataaaatacctcaggtattaagtatcgcatgttcgaataatgccctggaaaaagagcattgttttggttgtgaatggatccggcaaggcaaagctgtctctttcctgggagctgccgtaccttcttataccgttgtcaatcatgaattcgataaatggctttgggaaggaatcgctctgaaaaaactgaaacgtgccggcgaaatattcaattacggtattcaaaaattgtatatgaataatcccgaaaacgatttggtaaaacatacgatttatgcttatttgttggttggagatgctacggcagaatgtgatttttaccgttcggaatgataaactattttatcgcattggcaaacatatgttttgtgtttgtgaaatttatttttgtatcttatggtttgaatttatttttccttctgtatgttattaatattatatgtggatggaaaaatattttatgattaaaacagaagggcatgtattggtgatcacaatcatgcaatgtccggagagtaatgtagtctgtctggaatgtgatacggaagaggaagtgtatcggttgatacggaaaatggattgtgagattacttttgcacaaccttttcattggagacattccggacagtctgtttggagagggagaaaagctgattttttttttgtaaaagaaggggcttatttccggcgtatcgattttaaattcatccgttggatcaaggcggagggaagctattgcaagctgtttatggataatgcccgggaattgttgttgtcgttcaatctcacggagattacttcctatttaccggttcaggattttgttcgggtacatcgttcttatatcgtcaatataaatagcgtggattcgtttatcggtaatatgttgtttatcggcaattgccggataccgatcagtaaatcccataaaaatgaagtgttggagcgtttgaatttaatcggggaggtctgattaaactctggttccgtttgtaaacaaagaaataaaaatctatctttgcggacgtttggtggggatggggaaaacattgattatcagtaaaaataagatataaacatgattacagtttcagatttagagattcagtttggaaagcggacgttgtttcaggacgttaatttgaagtttacgccggggaattgttacggtgtgatcggggcgaacggagccgggaaatcgacttttttgagaattttgagcggagatttagagccgacccgggggactgtgatgttcggaccgggagagcgtttgtctgtcttgaaacaggatcactttgcttacgatgagtgtacggtattggacaccgtgttacagggacatatgaagctgtgggaggtgatgcaggaaaaaaatgcgatctatctgaaggaagatttttcggatgaagacggtatccgggctgctgagttggaagaacaatttgcaggaatggacggttggaatgccgagagcgatgcagccaatctgttaagtggattgggaatatccgaagatttgcattattctttaatgaaggatttaagtggtaagcaaaaagtgagggtattgctggcacaagccttgttcggaaaaccggataacctgcttttggacgaaccgaccaatgatctggacctcgagactgtcatgtggctggaaaattatctggcgaattatgaaaatacggtgttggtggtttcacatgaccgtcactttttggattctgtatgtacccattcggtagatatcgattacggtaagattactctttttgccgggaactatagtttctggtatgagtccagtcagttggctttacgtcaggctcaggctaagaataaaaaggcagaagaaaagcggaaagaattgcaggaatttatttcccggtttagtgcgaacgtggccaagtccaaacaaactacgagtcgtaaaaagatgctggaaaagctcaatatcgaagagattatgccttctacacggaaatatcccggtattatttttactccggaacgggaagtgggcaacaagattctggaagtccggaatctgagcaagagtatagatggaaaatgcctgttcaaagaggttgagtttgcggtagagaaagacgataagatcgttttcctgtcccgggatccgcgtgccatgaccgctttgttggaaattattgccggtaatgaaaaaccggatagcggtgactatacgtggggtgtgactataacgaccgcttatctgcctttggataattcggcatttttcgataccgaaatgcgtctgatcgattggttagggcaatattctgccgatacgagcgagactttcctgcgtggtttcctggggaagatgctgttttccggggaagacatatacaagaatgtgaaagtgttgtcgggaggagagaaaatgcgttgtatgatcgcccggatgatgttgaacaatgcgaatgtactgctgctcgattctccggctaatcatctcgatttggaatcgatacaggcttttaacaatactttggtatccttcaagggagtggttttgatgaattcgcatgaccatgagtttatccaaacggtttgtaaccgggtgatcgaactgactccgaatgggattatcgacaaacgaatggattttgacgattatatcgtcaacgaaaatatcaaagaacaattggataagatgtatcgggagtaacgtttttaggtaatcttataaaataaaagggttatgggagatctcctgtagcccttttttataagagttggaagagttggaagagttgtaaaagttaaaagagttataagagttgtaagagttataaggggggcagaggttatggggaggagtatagttaaaaagggggaagtaggaaattggtttattttttcgtggatattctaataatgttgtatatttgaaaaaataaaactattcgtgcaaataaagtattaatatgaaagtgagaacttatttttttgggtgtttgttgagtgtgctgatgtggcagtgtgctccgaaagagaatgaatatgtagttattgccggtaagggtgttgctgaggatacggcttggatgaaagtggcggaggccttacagaataagcatcgggcggctttgttgtcctatcgggaagatccggcggaattattgccccaattacaacagatacatcccagatatgtggctattgtagaaaaaccggagactctggggagggattatgtaatggaaatgcatcggttgagccggaaagtagataacgatatctacgctgattttttatggggaattatcaccggatatgatgctgccggggcgatgaaaatggtaaataattcaacggaacctttgattatcaaggatgctgtcgcttcgatttgggagttacattcggccaaatggttcgatcggtatggttgggtggacgatcatacgcagggaatgtggggagaaaaaaaatctgcacaggatacggtagtgacctatcagttacctcaggtaccgacgaagatgttaagtcgtaaccggaaaggcgggttcgatacggtaatgatgccgagggtaaatccggtggatgaaatgcagactttctataatttatatgctacttataatcctgatttggtcgtgacagctgcacatgctaccgagcgaaatctggagatgcctttttctttgggaaatatcaaagcgaaagacggacagttgtatatggattttccgaatgatccgcaaaatatgaaggaaagcggaaaaagaaaagtatattttgccgttgggaattgcctgatcggtaatgtcaataataccaaagagagtatggcgatcgcctggatgaacagtggtaatgcggcgacgatgatcggatatgtcgtgactacctggcatggtcgtaacggttggggaggattgaagtattggctgaccaatccgggacgttattccctggcagaggctatatatatgaatcagcaggatttaatgtatcaactgaatgaatgggatcctaaattagttactttggcctatccttatacggaagaggaattccaggaagctccccgtttaattcaggagacgatcggagtagaacctacacatgatcagatcggttttgtgcatgaccgggatgttttggcttattacggagatcctaaatggaatgtgcggttacaggaaatagccgaagagaacgattatacagtgaatacttctgtacaggggaacaagtgtactgtgacgatacaaaccaaggaaaatttcagtttggagagaatgaaaggagaccggttcaaacaagaacatgtactcgatctgccattcagttatttctttcctcagcgtctgaataatccgcgtctgtctgccggtcaggattggaaagctgctgtagatgagaattttctgttgatttacaatgcagatttcaaaccgggtcaaacttatacggtagaattggatataaactgaaataatcgctaacatgctgaaatattggttaggaatcgtcgggttgtttgtttgggggggatgcagtacgggctttacccctcaggaggtgaaggtgataaaggaaggcggggggataatgcgggtatggaagaccgataaccgggaagattctttatttttacgtcagcaggccatagaattgactcccggggagatccggacggaactttttcaggtattgaagcaacggatgctggcgacagtaaacgattcggcggacccgggtgtcggtattgctgctccccaggtgggaataagccggcgattgatcgctgtacagcggtacgataaaccgggagctccttttgagttttacatcaacccgggtattgtggcggcttctgaagagcagtctttgggaaaagaggggtgtctgtctgttccggatgtcgttggcgaggtatggcgttcgaatgaaatcgtggttcgttatatccctgaactgacctcgattaaacggatgttgagtcgtgaaaaaacggattcaacttttaaattcgaggtgaaggtggagtatcggaatacgtgggaaccggtatgcgatactatccggggatttacggctgtgatctttcagcatgaaatcgatcatttgaacggcatcctttttacagataaaatgataaaagaataaatttatcaggacaatgaattttagtttataaagtttaatggctagttttataaactgaattgaataagctatgagaacctttgtcgaaaaaatacttaatgcgcctgccggaagtatagttatacggcggccggatatcgtgatgagtcatgataattctgcccgtatccggaaaatttttgaagaaatgggtggggaaaagctgaaagatgccggaaagttgctggttgtactggatcgtaaaatgaccgggacaaccgatgaattgatccgggattataattcgatccatcgttttatggacgaacagaaagtagagcatttcttcgattgtgacaaagggatctgtcatgaaatattggccgggcagctgaaaccgggaggattgattgtaggaaacgacagccatacctgtacggcaggcgctttcaattgtatggctgtggggttgaataagacggaaacggcggtactttggaaagaaggcgaaatgtggttcagggtacctgaaacgattaagattagtttgaaaaatcgtttgccggagggagtatatgccaaggatttggctttgtggataatggggatgctccgggaagaaaatgtcgcctataaatcgttggagtttcatggagagggggtgcctgccttgtctatcgccgaccggatgaccctggctaatgttactgctgagatggggttgaagagcgcagctttcccgcccgacgataagttggcggattatttcggtgattatgccgtacagggtgtttgggcggatcgggatgctatgtattacaaggaattcgaggtcgatttggcgcaggtgatcccgttggtgatggaagtcggagaaataaacgagataaaagcacctggagaatggggtaggctggaaattcagcagggattgatcggagcttgtgccagtgggcggttggaagatttaagagtggttgcccggattttggatggaaaaaagattgcttcggggttccagctttctattgtcccggcttcccgggagatttatttgcaggccattcaggaggggattatcgatcggttagtgaagtcaggagcctctatattagggtccagttgtggtccttgcttgggtagcagccatatgataatggcggatacccgtcgttttattactacagtaaacagcaattcgatgcgaaggctgtcggctatcggtgtagagaaatacgtagcgtccccggcgactgtggcgatgactgctttgaccggagttttgacagtagaagttgaacggaccgatgcaaaatatccttattgggaaatgcctaaagtgtgggtaactgtgaatgagttcgagcgtcgttatcataatcgggtttggaattatggggatttgaacagcattgcctgtgaacaattgttcgatgaagcatgcacttaccggattgcaccggataattttaaagcgatacaaccttatttgttggcaggtttggatgcctcttttgcaaaaaacgtccaggtgggcgatttgatgctcggaggagaaaatttcggctgtggaaagttattacaacatgcggttgtcggtttaagggaggccggtatcaaagcgattatcgtgaaatcggtggatcgccgtttttttagaatggctgccaataatggattatggattattgttgcacctgccttagtggagaaataccggagcggtgaccagatagaaatagatgtcgaagatgaacggatttttctgaatcgggaagaatttaaattaccttttatcgatgccgcttttaccgaaatgatccggaacggaggtatctattaagtaacattctcccaatttatgatacaactatttagctacttgttcgtccccaaagatggacatctttgtctgaccttattccttctataagacttttcttaaaattaagcatttagacgtaaagtattatcgcaaaaaataactttcttcgcattccaaaattttaaaatttaattaaaatatatatgaaaaaatgttttgaacaatttaagacagaagattgggtggttgtggctgtcagtattcttttactggcttttgccatcattactcccaattatcttccccgtattcccaaacatctggccgatacggaatcctggggaaatgcaatatttcttttcgttattgtattagtcatactttatatcggctggcttttactcggcagacccttaaaaggtttattcctttccctgatcgctgtattttctgtctctttattggcacagattacggcagccctgcctcaagtaagctattatggattcgaatctgtctttttctctgttatcttcggtttgattattcgcaatgtttttcgcgtacctgcctggatgaaacctgctattcaaagtgagtttttcattaaaatcggggtggtttgtttaggagcgactattcttttcagtgatgtcatgaaatccggtgcagtaggtcttgtacaggctgtcctggttgtgagtatcgtatggtttttcgcctattttatctcccggcggttgggagttgaccagcgttctgccatgatcctgtccagtggggtctctatttgcggagtttctgcttgtattacagctgcacgtgttgcaggaggcgatgacaaaaaattatcttatattgtttctttggtgttaatcattgtcgttcctatgatctatatgatgccctggctggcccatctgctccttcctgtcctattcgacgaccctcaggtaatacaggaagtggccggtgcctggatcggcggaaccatcgatacgacaagtggtgttgccgcttccagtgctatcgtcagcgaattatcgaaccagcatgctgttattatcaaaggggcccagaatgttttaatcggttttgtagctttttttatagccttatacctttctacccggggagagaaaggtagtaattctccttctctggggattgtctgggaaaaattcccgaagtttattatcggttttgttgcagcttcactcgtattcagtatctttcaggcaaatgaccttttcctggtaaatgaaaaagggaaactcatcgaaccgggaatcgctaaaatgttcagtactgtttttttcagtttggcatttgtctgtgtaggactggaaacccagataaaagatattgtctcccgtgaaaaccgcaatgtcatgtggtcttttcttactgcacagacttttaatattctggttacttttattattgcctgcctgttgttcggcatcgttaaaccgatgctgggataaattaagctgagagatgagataattcactggaaatgtctcatctcttagcatatactcatccggttctcgcccaatcagacttgggtttatttcgttagtaattcgtcttcggtgatcggaattggcgacccggtcgcttctgtcggtcgtctaactttttctatcactgaccggcggaactcctcgcaagctcgtcagacaccaccggtcgggcgttcagaaaaagcaagacgacactcgacagagctccaatggtcgccaatcccgatcacctccgacttacgttatcactgaattgcaaaccagtcttgatttaagaaagattattctcactggaaataatccggacggtccggcttcctgctgttgcaaatttttggttgtattttctttgccggttagctctgccgtgagatgaagggttttatgccggaagaccattggagcaggaacgagggtccggttaggttttccgaacgcccgaccggtggtgtttgacgaacgcagtgaggagttccgccggtcagtgaaggaaagccttaacggaccggtccaggcgaaccggtctgacgggataaaacccggaatcggaatagaaagaaaaaataaacctacgtttataagtgtaaatatgtatataactgctttattttattcttattgggattgctatggatttgaagcttgggctgtctttttgtcactttcatttttttggcataacaattgtgtatttacttgcgtaaacttgaatttaaaactaaaaaacagatatactatggcaactggaaaaataggagtatcaacgcagaatttatttccgattattaagaagtttctctattcggatcatgaaatttttcttcgtgaaatagtgtcgaatgcagtagatgctacacaaaaattgaaagtattggcatcttcgggagaatttaaaggggaggcttctaatttgcgggtgcgggtgaaagctgacaaagaggcaggtactttgacggtatccgacagcggtatcggaatgacccgggaagaggtggaaaaatacatcaaccagattgctttttcgggagcagaagaatttttggaaaaacataaagatgatgccgctacgatcatcggtcatttcggattgggattttactctgcctttatggtgagcgataaggtggaaatcgtgaccaaatcgtacaaagaaggagcgcaggctgtaaaatggaccggtgaaggagataccgaatacaccctggaaaataccgaaaaagccgaacggggaacggatatcattatgtatatcaatgccgaggaaaaggatttcctggaagagaataagctacaggatttattgacgaagtattgtaaattcctcccgatagagattgttttcggaaagaagaaagaatggaaagatggaaaatatgtcgataccgaagaagataatatcatcaatgacaccaatccgctgtggacacgtaaaccatccgaactgaaggaagaagattatcagaaattctaccgggaattgtatcccatggcacaagatcctttgttccatatccatttgaatgtagattatccgtttaatctgaccggtattctttatttcccgaaaatcgataataagtttgaaatacaaaaaaataaaattcaattatacagcaatcaggtatatgtttccgattctgtcgaagggatcgtacccgaatacctgactttactgcatggggtgatcgattcgccggatattccgttgaatgtatcccgttcctatttgcaaagtgaccggaatgtgaagaagatttccaaccacattacgaagaaagtggccgacagcctgaccgatatcttcaaaaacaaccgggaagagtacgagaaaaaatgggatgacctgaaggtatttatccaatacggcatgctgacagatgagaaatttgccgaacgggccaatcctatcgtgctgctcaaagataccgatgggaaatattttaccctggaagagtatgaaaatctggtgaaagtcaaccaaacggataaggacaatcatatcgtttatctgtacgctaccgacgtacaggaacaatatacttacatccaggctgcgaaggataaaggctatgacgttttggtgatggatgggcagttggacacgcattttatcaatcatatcgagcagaaaaatgccgatcataaatttttacgtgtcgactcggatgtgatcgataaactgattcctaaaaatgaaacgaaggaaaccgattggagcgaagctgaacaggaggagatgaaggatgttttcaatgcacaactccccaaagaaggaggcatgtatgtggtcaatttcgaagcgttgggcgaaacggccgatcctgttttaatcacccgttctgagtttatgcggcggatgaaagagatggctgccatgaatccggggatgggattctatggagctatggacgaccagtttacgttggtggtgaataccgatcataagctggtaaagaatatcctggctgatgaacagaaagaaatggcggctaaactcgaaccgatcgatttcgaaattaaagaaaatgaagggaagaaaacagagatcgacgaactgaacaaagggaagaaagaagatgaaattccacaagtcgacaaagaccggaagaaagaatatgacgataagatcaatggcttgagaaaacaaaaacaagagctgttgcaggaatatggtaaaggtaatcaggtggtcggccagttgatcgaccttgccttactcgctaacggtctgttgaaaggagaagcactgaataaatttgtgaagagaagcgtagagttgattaaataaccgaaagacggaagatgtgaaagcgggcattgttgaagatgcccgcttttattttaataaaactatttccaattttgtagacgttaagtaagatttcggctaactttttgtaggtttgtaaatcccggaggatagattttaaggatagattacgatcttgtgggagagggatatgagatatttagtataaaaaattaactttgcaaattattgaacttttgtgttgatcgggcgttatacctcttgagactgaagttaaacagaagattattattaaaagacatcggaatatgaaatatgtcggagcacatgtcagtatatcgggtggagtggagaatgctcctgtaaatgcttatcggatcggagcgaaaggtttcgctttatttacgaagaatcaacgccaatgggtggcagcaccctattcggctgaaaatgtggaacgctttcagcagcgttgtcaggaattcggttatacggccgatcagattctgcctcatgatagttacctgatcaatttgggaaatcccgataaagaggctttggaaaaatccaggagtgcttttctggatgaaatgttgcgttgtgaacaactgggactgaaactactcaattttcatccgggaagttcgttgaagaaagtgagtgaggaggagtgcctgacgataattgccgaatcgatcaatatcacgctggataagaccaagagtgtctgtgccgtgcttgagaatacggccggacaagggtctaatctgggatatacttttgaacagttggcctatattatcgacaaagttgaagataaagaccggattggagtatgtatcgatacctgtcatgctttcgctgccggatatgacctcaagagtgaaaacggctttcaggaaacttttgagcatttcgatgaagtgatcggattgaagtatctgaaaggtatgcatctgaacgattctaaaaaagggcaaggttctcatgtcgatcggcacgaggtgctcgggaaaggcgaattgggtatagagactttccgccggattatgagagatccccgtttcgatcgtatgccgctgattctggaaactcccgatgaagaaaactgggcggaagaaataaagatgctttataaattagaagagcataagagcttatgaaaataggattattatcggatacacatggctggttggatagcaagatattggattttttcaaagattgcgatgaggtttggcattgcggggatatcggtgatttagcggttaccgatcgtttggccgccaactttaatttacgcgctgtatacggtaatatcgatggaggagagataaggacgatgtttgcccctactttaatattcgattgtgaaggagtaaaaacagtgatgacccacatcggaggatatcccggacattatgacgccggaatacggacgctattgtacgacgaacgcccgcagctgtttgtctgcggccattctcatatcctgaaagttatgttcgataagacgctgggatgtttacacatcaatcccggggctgccgggaagtatggtttccataaagtcaggacagccatccgttttgtcatagaaaaggggaaaatgaaagatttggaagtattggaacttgagaagaagtagagatataactattcctggataacgaagtaactttaaataagatgaaaagactttttattttgacagggctcttgctgctgacaggagcactattcaaccggacgatagcacaaaaccgggagaatcaggtgagagaacaaagcataaaatatcagcggctgatggcctatatcgatgccttttatgtcgataccgtaaatttgcagaagctgacggaagatgcgattataaaagctttgtccgatctcgatcctcattcggtttatatcacgaaggaagaagtggatgagatgaacgagcctttggaaggtggatttttcggtataggtattcagtttactattctccgggatacgttggctgttgtggctatcgtgcctggcggcccttccgagaaggccggattgatggcaggagaccggatcgtttccgtggacggagagaatatcgccgggaaaaaattatcgaatacagaggtccggaagcgcttgaaaggagaggaaggtacgattgtcaaggtcggcgtgctgagaggacatgaaaatatggatttccgcattatccggggaaaaattccgatttatagtatcgatgctacttatatgctggataagacgaccggatatatcaagttatcccgttttgcagcgaccacgatcgatgaattcgaggaagctgtcaaaaaattgcaggctcaggggatgaaagatttgatactggacttgcagacgaatggagggggatatatgggagccgctatcggtatcgccgatcacttgttggatggacggaagatgatcgtttataccgacggggtcaattccgggcggcgcgaagaatattcaacgcctataggactcttgcagggtggacgggtggtcgtattgatcgacggcaattcggcttctgccagtgagattgtctccggagctgttcaggattgggataggggcgtattggtgggccggaggtctttcgggaaaggcttggtgcaaagacagtttcctctgaccgacggatctatggtccggctgacgatagcccactattatacgccttcggggagatgtatacaaaaaccttattcgaaaggcgaagaagattatgaagccgagttgtataaccggtatcggagcggagaaatggtcagtgctgacagtattgtagtgaatgattccctgaaatattttacgaaagtaaaacaacgccctgtatacggtggaggaggtattatcccggacgtgttcgtgcctctcgatacgacgatcagctatttgtactttaaccggctgatcgctaaaaatgtaatcggtgagtttattgccaattatatcgataaaaacagggatcagctgaaaaagaaatatcctgatttcgattcttttgtgaagaattttcaggtgaccgatgccatgatcgatgaaattgtaaaagcaggggaaaaagcggatatccccagagacgataaagcactgaaacctcttttgcctaccattaaattgcagctgaaagcattgatagcccgggatctttggaatatgaacgagatgtatcagattatgaatgaggagaacgatatgctgaagaaaggattggaagtgttgaaggacggtacgtacgaaaagatactcggcaaatagatttataaatacagtgaaaacggtgatgacagctaaaacaggaacgggggtttaacagaaagaaagcaggcggttattgccggaaattccgctgggtcagtatatcggcttggggcagataatgcggcagataatccggtttgttggcccggcaaggacaaatatctatcccgccacgacgggtgtataagcaacttaccatgagaatttcgggttggaaaagatcactgaggcgtttgaaagtcatctcacaaatttcttcgtgaaaatgattttcattacgcagcgaaacgatgtatttcaacagagaggcataggccggttgtgtccggcctttcagatgaatgtacaaacttccccaatcgggttgacgggtgatcttacagttacttttcagtagatggctacatacttttaattcccctgcttcctggatgttttcggtcagtaaggcggggttttcctgatagacggaaaactggagtgcataggtgtcgggctctttttccagcagggtgtaatcattgaaatcaaaaggcagaaaagaaggggcatcttcataaaaatggacttttacttcggtacacaacaacgcactaagatcggcagctactgtggcaacgaatcggtcgacagcctgcccgagtgtcttgcctaaagcttccatatgaaaggaacctaaatacaatttcaaagatttactttctacaatcgagggactggaagccggataagtaattttcaacatcccggctaccggtataccattatccaggataaaactggcttcgtaggcatgccagctgtcataaccacaaaacagacggtccgggtggtctatgccatagatttccctgttcagccgccgggggaccgctacaagaatagccggacaatagtgttggggatattcgacttgttttcctaaaagtttatcttcggttgtcataatgagttgctgagttatagagttgctgagttatagagttgctgagttactgagttgctaagttactgagttgttgagttactgagttgctgagttactgagttactgagttgctgagttactgagttatagagttatagagttgttggggggctgagttaatgggtggggtgttgttgcagataatggataaatttgttaattgctacagataggccctggcaatcctgaaggagcaattcacttttttcttcggatatgtagtttaaatctttagcaatataaagcatacttttaacttctccacagcttcctttagatatacagagaaagcgtttgaacatcggattgctcccggattcaaacccttctgcgatattattcattatcgaaatagctgccctttgtatctgctcattaaaacccatatctttaatggatgcagtgttctggtatatttccttcacaatccttcgggcttcctgccaaatattcaattcttcaaacttaactactcctcccataatttatttatttaaattcatatataaactcaataactcagtaactcagcaactcagtaactcagtaactcagtaactcagtaactcagtaactcagcaactcagtaactcagcaactctatcccctctaaaaactctgcatactatacaatttggtataaataccattcagactcaggagttcttcatgagttccccgttcgacgatttctccttcatggaagacacaaatcaggtcggcatttttgatggtagacaggcggtgggcgatcacgatagaggtacggtttttcatcagattatccagagcttcctgtactagtttttccgattcggtatccagggcagaagtggcttcgtccaggatcatgatcggaggatttttcaatacggcacgggctatactcaggcgctggcgctggcccccactcaatttgcctccccggtcaccgattatggtttggtaaccgtgttcggtttgtaaaataaattcgtgtgcattagcgatacgggcagcttgttcaacctgttccaaagtggcattttcgataccgaaagcgatgttgttatagatcgtatcgttgaatagaataggatcctggtttacattccccataaattcccgcaaattataaaaagaaagttcccggatatcaataccgtcgatacaaatttttccactattcacatcgtaaaaacggggtaacaaatcgacaaaggtactttttccggaacccgattggccgacaagggctaccgtttttcctttcggaatgaccagattgatgtttttgagtacctgtttactttcgttatatgaaaagttgacgtctttgtattcgacagcttgttggaattgttccagttttcgcggattttcaggttcctgtatagaagattctgcagccagaataacgtctatacgctccatcgctgccaatcctttttggacgctgtaataggcgttagtcaggtttttcgccggattgatgatagaataaaacaaaccgatatagataataaaacttggacccgataagttgccggtattattcaaaatcagcgttcctccgaaccacaggatgatgactacgacgatcgtaccgagaaattcactcatcggatgggccaatgaacgccgccgcatcagacggttttgtattttccggtagctttcgttttccgttgagaatttttcagtcattttgggctctgcattgaaagccttgatgattcgcaaaccggataaagtttcttccattaaagccagaatttctcccattttcgtttgtccttcccaagaacggcgcttcaggtttttacctacccggccgatcaataaacccataatggggagaagaatgaaaacaaataaggtgagctgccagctcataaacaacatggaagtcagatagacaataatcaaaatcggactttggaagagcatatccaaagaactcatcacggaggcttctacttcttgtacatctccggtcatacgggcgataatatcccctttgcgctcttcggaaaagaagggaagaggtaaggataatattttggcatagattttacgacggatgtccctgacgactccattccggatataaatcaattcataagctcccaaataggcgaaaccggtttttaaagcagtagttacgatggctaccaccccgatcagaattaaggttgtcgatggaccgtaagtgtatttgatcgttgtgatgtagtaattaaaaatttgtccgatagattcactgttaaattcgaaaggaacaagttcagttacatcctgttcgttgttgaatataatcttcaggataggtcccagcatcgcgatggaaagacttccgaaaatcgcatggaggaaattgaagatgatacttttggtaacccggagtttataaggtggaataaaacgcttgagaataaggattaaatcgtgcataggtaaagttgctgagttgttgagttgctgagttgctgagttactaagttgctgagttgctgagttgctaagttgctgagttgctaagttgctgagttactgagttgctaagttgctgagttactgagttgctaagttgctgagttgttgcactcttaaactccaaaacttcatacctctttaactctataactctataacttagtaactctataactcagcaactctttaactaaattcctgtataattcgagggagtaatctgtttcagagtttttttcagttcagctgaaatatcgagtgtgtcgataaattctgcgatagattcctgtgtaattttattgttggtacgtgtcaaggctttcagtgcttcgtaggggttgggatatccttcacggcgcagaacggtttgaatggcttcggccacgaccgcccagtttttttcgagatctttttcgatcgcttctttattgataataagcttgttcaaccctttcaaagtcgatttgacagcaataatcgtatgggctaaagggacaccgatgttccgcagtacggttgagtcggtgagatctcgttgaagacgtgaaatcggcaacttattactcaggtgatcgaatatggcattggcgatgcccaggttaccttctgaattttcgaaatcgatcggatttactttatggggcatagcggacgaaccgacttcaccggctttgattttctgtttgaaataagtcatcgagatgtaagtccagaaatcccggtcgaggtcgataataatattattgatccttcgaaggttatcgaacagagctgcaaaattatcgtaattggaaatctgggtcgtgtatgtttcccgttcgatttttaatttttgagttaaaaagcggtttccgaattcagcccagtcgatttccgggaaagcaatgttgtgtgcattgaagttaccggtagctccaccgaattttccggaaatggctacttttttcaataactccaactgacggctcaaccggtaagtgaatactttgagctctttccctaaacgggtaggagaagccggttgtccatgagttttggccagcatcggcacttctttccattcttcggccagctcttcgagtttggcgatcagttcgtcgatgacaggataatagacatcgtgaacggcatcccggaacgaacagggaaccgctgtattgttgatatcctgtgaagtcaggccgaaatggatgaattctttgtatggttgcagatttaaagcatcgaatttttctttgataaagtattcgacagctttcacgtcgtgattggtgactttctcgatgtctttgatccgctgggcatcttcgacggtgaaattgaggtatatttcccgtaattgctcgaaagtctggtgattgaaaccggccaattggggaagaggtatttcgcataaggcaataaaatattccacctccaccgttacccggtaacggattaaagcactttcagaaaaataattggacaaattttcgactttatctctgtatctcccgtcgatcggggatattgctgttaatggttgcatagtatataacaagtgaatattagatttatgttctacgaatttggttcaatcagacaatctgcactatttttgctcacaaaaatagaaaaaatagccggaaaatctgctttttcctccttacatttgtcttcaatttaaattgagtttgataaaatgggattctttacagggatacagctttatggaaaagcattcggaattttgttcagccggaaattctggtggtttttactttttccggttattattttattgctattgttcattggtggaaatatcctgatttctttagcgggggatagcctgtacggcttgatcgaggctaagcttactgcctgggtggggggcatctcctggctgcaatgggtgacgaccacgacaagcgtgctgattaagattgtattgcggatcctgtatttcttccttttcgttgctttcggcggatatattgtgcttgtcgttatgtcgccggtatattcctggctgtccgaacggacggaagctcatcttaccggaagggaatttccctttagtttcaaacagtttgcctgggagatttcccggggaatcctgatcgccctgagaaatatgatttttcagttaggtatttcttttgtattatttctttgctcatttattccgcttgtgggggtaatcgctccttttgccatcttctttacctcggcttatttttacggttttgcctttatcgattatgctatcgagagaaagcgttttaatgtcagacagagcgtccgttatgtgaataaaaatatcggtttggtgacaggaataggtactgtattcgctttggctcttatgattccggccctaagcctggccgcttgttgttttgtgtcattattgtcggtaattgccggtactattgcagtagaaaggatgaacgataaatctgttaaataaagcaatcgctattttccaacccatctgcatcggatttgctgttcgatttcttctttggagaggggtgtgcggatttctgtacggaaggggtgacccgggagcagatctttatagttgtctgtaaaaaccgcttttactccggggaggtaaaacatgacatcacaggccagacggtcggtggtggctgtcaggtattttttgccttgctcttcggatatttgaatctgaatatcgggttgtctgagcagtaactctttcggtagagcaaaatatacattttggcggtctacgatttttttgccttgccggatggtgatgacggccatggtttcccggtgtgaattgtcttgcagcaaaccggcgattgacgatgctgcgattggggcggcttcgttggctttgattttatatttgccttgccgggtttgatgcagttttccgtcgaatccttttatctctaaggtataggttcctgcgagaggagttggcagatcgtttaccacccagagtttcagactgtctgccgttaactggggagctaatatcaccggcttgcaggcttcccgtagcgcatactgggccgctttccagttgtggtaataatcggttgtcgaccagctggctaccggccagcaatcgttcagctgccaaaccagcgatcccatacaatagggcatatgccgccgatgtgtttccatggctattcgcatggcccgggcttgcaatacctggctcatgtacagcatttgcccgaaatcttccggtacctgataataccagcccatgtattcccggatgcgcaggttgccgattccactgcgttgatgagccgacatgatctccgattcgatgtcgtaatcttccggtaaagtgtattgccggacggtttcaaattcagggaaggattggaaaccgtgttcactgatgaaacggccgatgtttttttcgtattcttcaaacttgtgtttttcgtgccataccccccagtagtggttatccccccggttggcaggacggatttcatggtctccgatttccggtcccgacatcggtgaagaaggccagtaatcgtctccatcggtatatttttcaatcacttcgggcaggagccgatggaagacatcggtgtaggccttgaaaatccgttcttgttgttgctgggtatactctcttttccatccccaacctctccaggctgcatctatttcgttgttaccacaccacagggctatacagggatgatttcttagccggataacgttatcgacggcttcttgttttacattttccagaaattcaggattgccgggatacatggcacaggcaaacataaaatcctgccagaccatgatgccgtggcgatcacagagttcatagaaataatcgtcttcataaatacctccaccccagatccggatcatattcatattggcattcgcggcatccgtcaccattttttcgtaatccgaacgactgattctggggagaaaaacatcgttgggaatggcattgactcctttggcaaaaacagggattccgttcaattcaaagtagaaagtttctccctgggtatcttgccggcgtactaatttcagagaacgcagaccggtggttacttcgcggctggcaactacttttccgtcttttttcaaatcgatccggaatgaatagaggttggcttttcctaaaccgttactccaccataatctgggttttttaatggtaaacgggagggttaaccggttttctcccggttgggtttccacctcgcttttcgccaatatccgggaatcacattttacttctgcgatcagtttttcgtgatgttccgtcgtcaaacggacagatgctttcaaatcggcttgtacgggagtgacttgcggctgttcgataaaaacctgttcgatattcaggtcatcccagccttccaggaaaatcggccgccagatacctgaagtgactaaccgcgggccccagtcccaaccgaaatgataaggggctttccggctgaaaacgctcacccggttagggcccattcctccgttttcgctttggtcgttggaagccggcaagggtaatccgtatttttccatttcttccatactttgccggatgggagaacgaaagcgaagatgcagtatattttctttaccggaaagcaggccggagacatctgctttccaggtcctgaacatattgttggtggatagaagaggctgaccgttcagggtgatgtcgcaccaggtgtctaatccctgaaatacgagctgtttgtgtttttgcccggccaattgttcgtccacctgaaaacgaagttcgtattcccagtcggctttatcgatccattggatgtgtttttcattgtcgcgatagaacggatcttcgatgatcccattgtttatcagatcggtatgtactgtcccgggtacttcggccggtaaccatttaccgatatggtattgcctgaattgccagttatttcctagctcttgccgtatgggaggggtagaggcaaaactcatcgaatagagtgaaaaaacgactaaggtaattacaaatttgctcataaccgggattgaaataatgaaacgttacaaatatatgcaaaggcaggagtaaaaacaacaaatttgtttgattgattttgccgggctgcatcttatatttataaaagaaaatttgatggaaggagttggataagataaaaaagcttatatttgtttacctattacaaaataccgatgatgcttatgtcagggatatatacgttcaggaagcttgttttgcttgtgctggggatttgctggttgaacacgcttggggctgccgaacccgaaaaagtcgtttataaagtggatattaaagacgagatcggtccggaagtgtggcgtctggcccgaaaatctttcgacctggccgggcaggaaaaggcggattatattttgattcatatgaatacttacggtgggatggtcgtgtatgccgattctttgcgtagtatgattctgaactcacggaaaccggtatgggtatttatcgataataatgctgcctctgccggggcattgatttctattgcctgcgacaaaatctatatgcgcgagggggcgaatatcggggcggctacggtcgtgaatcaaacgggtgaggcgatgcccgataaatatcagtcctatatgcgctcgatgattcgttctacggcagaagctcagggcagggatacgttggttcagggcagggatacggtttatcgttggaagcggaatccgcatatcgccgaagccatggtggatcagtctatttatatccagggtattaccgatagcggacgggtagtgactttcactgcccgggaagccatgaaatacggtttttgtgacggaatggcagaaagtgtggaggaagtattgaaaaaagaacaggttgaaaactatacgatacggagctatcatcctaccgtcaccgatcggattatcggttttctgatcaatcccgtgatacagggattgttgattatggtcattgtcggtggtatctatttcgaattgcagaccccggggatcggttttcctttggctgccgccctgacggcttgcctgctctatttcgctcccttgtatctcgaagggtttgccgggtactgggagatcattgcttttgtcgtgggagtcgtcttgttgcttctggaaatttttgtgattccgggcttcggtgtagcaggtatttccggaattgtattgattatagtggccttggtttttgcagggatagatcatttctctttccgtttcctgggtgattttgtacgtccgttggtgcgttccctgtttctggtggtgagtgcttctttggtatccttgttgatgagcatgtggttgggggctaaattattcgggagccgtcgttgggcttttgccttgcatgctgaacaaaaaccggaagacggttatgtaggagtagatttgtcggtacgggaagaaatcggcaaacaggggatcgcggtgacagatttgcggcctgccgggaaagtggaagtaggcggagaagtgtatgatgccgtctctttgttgggagattatatcgaaaaaggaaatcgggtgatgataaaaaagtatcaggcaggacaggtatatgtcgtgaagtgtgaaaaatgaagattgtaattaagtaggatgggagttactgatttacaagtgttgcaggcttttaaaaaaggacaattggaattgttttaccgtagaatttatccgggattattgttgtatgctgtaaaaaatgcaggtgaccggcatgattttctggcagaagattgcgtacaaaatgctatttttaatgcctggaaaagaagagactcttttgattctatctatacattgaaatcttttttatacacttctgtaaaaaatgagatcatcagcctttaccggaaaggaaaagcacaggaacgatattcttcccagctggaaaatgaagcattttttgccaatacggttatcgaccaggagacacagttgttgttgttcaatgctattcacagcttgccggatagggaacgtcagatttttgaattaagttttattgaaggtttgaaaaatattgaaattgccgaacaattgggcgtttcggatagtacggttaaaaaggcgaaagccaaagcgctcgaaattttacgggaaaaattggatccccggttatttctttttttcttcctgggataataaagaggaccgatggataataaacgaatttacgataattatgcttttataagctataagcgtgaagatgaaaaatgggcggaatggcttcaacgtaaactggaagggtataaattacctacaatactaaagaagacaaatccgtcattgcccaggcatttacgtccaatcttccgggacaagacagatttggggggtggtatattaagcgatgaacttgaaaaacaattacaaaattctgaattccttattgttatctgttcgcctcatgcctcacgatcggaatgggtgaacaaagaaattcaggtatttatcgacgaaggacgtttgggaaatatcatcccgtttattgttgaaggacttcctcatgccggttctgctgtagaggaatgtttcccccaggcgttgaagaatatacccaaggataaggagttgctggggatcgatgtacaggagatcggtaaagaacgggcttttattaaagttatagcccggatgttgtcgcttcgcttcgatagtttgtggcagagatggcagcgggagaaaaggttacgtcgtagttatgtcgctacgatgctggcttttttgctgattatcttttatttttttgctattccttcaagggtagagctcaccgtgaaagatttatctcaccgattgccgttgccttcctgtgcaaaaattattttcaacggtacagaacagaatatcggttctttggatacggttttaatcctggataatatccggccgtattataaaggacggccgtatatgttggaatttaatgccggttattacgatactttacgttttcagggacatttttcctggggaatgacgacctatgtgacattggagttgaaacgtgacagtacgttcggtgtctatcagggaatagtttacgatgaacaagagggggtgcctgtccaggatgccgttgttactgtcgataatcggacaaccagaaccgatgtccgtgggatttttaaaatagtttttcccttacaggaacagactttgtccaagtctgtccgaatagagaaagaaggctatcttccccgtttacgggtcgacgagtgtcctgatgccaaaaaccttactccttatcccatgcggaaaaatacgtaggaccggcgggtgggcttgagttaaaagaattgttccagcatactgatcgggttaaaattaaatgaaaagaacgattatgatgaagtatcagtcaataaccatactgtttgttctgcttttcttattccggatagcacaatcgcaatgtatagagaccgggtatgtcaaagaatataatggggttgaggaaaagacacctttgccaggagtagaacttcaggtggtcggttctccttcggctgtcagtgacgagcaaggacgtttcgaacttcattttgccgtgttaaagccaggacaggccgtaaagtacaatgagatttataaaccgggatacatcctttttaataaagaagcgttggagatatggaggatttccgataataagactccctttgtggtggtgatgtgccgggaaggtgagttccgggctttgaagaaaaagttttacgggattattgaaaaatcgtaccgcgacgattatctgcgtcagaaggagctggctgaaaccagtattgccaatgaattggaactaaccgaaaaattgaaacaactggaaaaatcttatcaggaaaaactcagtaatataaatacctatgttgaaatctttgcccgtatcgaccggaacgaaatggacgataaaataagccgggccttgcaattggtggaagaaggcaagatcgatgagggaatacgtttatatgaggaattggaactgatcggtcagacgaacgagcagttgaataaatggaataccggtgaaagggtgattcaggccggacagactatgaaaaacgaggctcagcaggatttattattgatggctgataaacttcgtcagcaagtcggtctttatgaaatgggtggttgggactataacgatcagcgtatcgaaactactcataagctggtagaagtttaccggctgctgaataaagcctttcccggcgaatttgcaccccaattagggcaatggctttgtctggaaggggataactcgaatgatccggataccttgtttgctaaagttaccgaggctgcccgacttccatcctatgccggactgattatgttaggaaatttgtatgaataccgttcggtcaaggagattcagtatcttgagaaagcgcgaagctgttatgaacaagctttatcgctgatctctgctgatgatagtagccgctacgcagagaaaagattgaattctttttatgattttacagactcgacgaccggacatcctatttattataaaatattgtcggctcaggaaaaaacagtcgctatttggcctaaaagtataattagctataatgatcctgagggagaattggttttacctgagtttgtaaaatacaaaggggagaaataccgtctcgtatcgatcggagctaatgcatttaaaaataataagcggttgttgtcggttacgctacctaaaagtgtcaccgggatcggtgaaaatgctttttacggctgtttttctttggaatctatccgggtgggagaaaatgtggaaatggtagctgagggggctgtacctgaatctactttattgatacttcccgataatacccggaaattacagggatggctttatgatttcatttataaacgtttcgaatttatgcttcaggattcgaagaacatcggacttgccggatatgccatttatcatttggccgacgacctgttgaaagataaagtgacacctgatgatcataaagctttttattggtatctgaaaggacatattttagctgatagtgtatacgccgagtgtaatttagcagaagcggcagcttgtttcagacaagcgcttgaaaaggggggtgctgttgcagcttatcggctcggtttactgtattattgggccggggattatcggaatgcttatgatttttatgttcgggctgccgatgcggaaattttggaggctgataaccagctggcttatatgtatgcaaaaggtcagtatgtaaaacaggattttacaaaagctatggtttatatcgacaaagcgattgcccgggattctgccgatccgaattacatcgattccaaaggggaaatctacctgatgatgggacagcgggataaagctgccgaagcctggaataaggtggttaaaatggacccggcgtttgaccggagccggtctgatttatataaaaagctgtatggaataccggaaacccaattgtcggattccagtaagagactgaataattatatcgatattgttcgggcagtggcccggacagaacatgcccgtttctttaatgcttgtgaaatgcctgaatatgaagaactactggctatcggaataattgccgttcaggtgatgataaagaataaaacccccgaacaattggaaaaatacaatgctttctatttggctactgcaatccaatgggctattcaaaatgaattgcagataagatacaaatggtatggacaggttattcctcatcaaagaatggagattaaaaaagaaaataagtggttaaatcaaaatcaaatgctttttctttctatataccggaccatcgttttactatataaccatatcggtttgtttcaagagaataatcttcggtctgaaattgagaatgcaagccgtattttattgcaggcaatcgatagtatccctgtttctcaccgcgatcttgcccgacaactcatttatgaacagaagtttgtgagtgaaatagccaaagaacagggaaaaacatttgaagcatgttacagagatattatgcctgttgtaaattttttgtgccaggcaatcagtatagttggacagaaaatagaatataataagaacatcacttttgatccggatttttctgattcttccagtatgcttttttcagagcctcctaaaaaatatctcgatatcgttcggattattgcacaggccgagcaaaaaaatcttatcgaccgtaaacagaattttatcgattacgaagaattgttgtcggtcggaataatcgctgtgcaagttttaacaggaaaaaaaactgccgaagaattggaaaaatatagcagtgtataccttgcaagttcgattcattgggccatccagaatgaattgaaaatgcgatacaaatggtatactcctgtccggttcggcaagctgatgagtactgaaaatgagcaggattcgttgctctctcaatatatgactgtcgtctggctccaaactgccggagctctgtataacagaaaagattctatcgataaccgttcactcagagcggagatagaacaagtggggagtgccattcttaaagaaataagccggcttcctgccgatcagcgtcagtgggtcacagccctttttattcatcagaaagaacttggagaaattgttgaagcgtatggcatccgggtggaagattgtttgagaagcctttcaccgttttggaaaaaaataaaagaaatagggagaaagaaataccgatagcctgaatcagtcactttcggatatttttagctaccttataaaaaaaattcaaaaaaaattgtctttttttaccccattttagatcgattgcgttatagggatgttttaaggaaggagctaaaatggaaaaattggaacatactgtctttcagatctccgaattgatcgggaaagaaaggtttggaacgctttcggaggaagaaaatgaagtgttggaggagtggcgccggcaatctgctgaacatgagaccctgtaccaaaaattgcaggatacccgctatttatcggaatctgttgcccggttgtccggtatcgatacccggcagcctttactgcatatgcagagacaaattgccggctttacccgtcgcaggcaagtccttcgtctgcggcagatcggtggagtggcagctctattccttattttgttggggagcttctggttggttcaccggcagtcttcgcttcggcaacctccggtcgaccggcccattctggcaggagggcctcgtgctgttttacatttgggaaacggcgaactcatccatttggataccttgcaacaaacgattacacaaggagaggtcaggatttctaagaccgacgaccggaaattatcctatgatagccggcaggaaaaaaatgagaaatcaggaaaagtggtgtataatgaaatagaaattccccgtggcggagaattcgatttggttttggcagatgggacccaggtatggttgaatgcagaaagccgtttgcgttatcccgttgaattttcgggaaaagagagaaaagtcgtattagaaggggaagcttattttcaagtaaagaaaaatccatcacttccttttcgcgtagaaatccgcaatcaggtcatcgaagtgttgggtacggaatttaacgtttcggggtacaaagacgaggtacatgtctatacgacattagtaaacgggaaagtaaaagtagcaactaccggcagggatatgactttgttacccggtgagcagtgtgtgttggataccggtgacggctcgatgatcaggcaacaggtcgatgtcgataaaataatcagttggaaaaaggggaaatttattttggaagaacagaccctggagcaaattatgcagaagctggcccggtggtacgatatcacagttttctatcagaatccggcattgaaaaacaaggtttttaaaggaagtgtaccccggtatgctgaattacagcaggtattgaatattttagaaaagaccggtgaagtgcaatttcatattcagaatcgcacggtcattgtcaaggaatagatatggattttctgactactcaaaccggtt

SEQ ID NO: 5950 - DNA, 16512 bp, Unknown
  gut microbiota DNA sequence
gacattcctgagctgtctctaatttcacaatctctacactatccggccatttatccgccacttcaaaaacgctgccgccaacctcaatctttcgtaaatattctaacctgacagggtaagtgacaaggtccttctcttccaaactatctaaatcaataataattaacctgttaaataaagaatcattattaattctcaaatcacttgaatgacctgtattcttacaattccataataacacagtatataaaacggaaataatatacaccgacttattcaattttatcctaaacattgcaaaatttaatttcatagctaacggagttatctaagaaatcctttaagtaacatccttatggcagcaagtttgctcatctcctctgccgaatcaaacgtgaattcgtaatttcggcaaagccttttgtaattatcaaaccatgagaaagtcctttccataacccagcctttactactagtttaaagccttttgacttgtccctgcttacttaaatatcaagtatgtacccgaaagcctttttgattttatcggcgctccggttccagcatccgcaagaatgactttaatgctacagcaaagctctttcacgaatcgtgccaacaggcgggctaccttaccgtcatttatacaagctgtagacaccatgactacaatcaggaagccattcttgtctatgaccacatggtattaattcctatacttttttgttgccgtctatatcgttcaagaagcaattatcgccccactggacgctttgactgtccatgatgcccacacgcttgctttggcattttgacctttttgaaaacgtactttctctcataagttgttcattaacaaattaagaaagcctatttcgctaatagtaataaacagtccccaggaagcgaaatgagaagggggcatacgccattggcaacccgtcttcacgaagtagaaaacgacattccatatttcacgcaaatcatattttcgttttcttttttgcaagttcaagattttcttgaaaacttgtctttgtatttcttctaaatctgttaaatacataattatttcaagtgcggtaacttaaaaataatcatcttcccggaaagaaggaacactcttgcaacattgaactctttatgataaacaggctcctaatcaggtaacggcccaggtatcgtagaaaacagcccggcctctatatcccatactatacaagaattgtaaatatagagaagaagtgtagtactttctctttgtaaaggcgtttcagaagatactataaattcacaattactctgattaaacacaacattactaatattaacacaattctcattattcctctttacctgaacatctttaaatattccttgtgctgcaagtttcacatgccatatatgcaaacctgtattatatatatcacgtctacataatatagcattaggagctttttgtaatccaccgtcaatcagaaaagaataagttgaactattaatccccatatcagcagtagaagacatacacataggagttattaaaaaagatgttaacacaggaggatcagcatattctcgcatttcaacataatttctcattttttcagaaaaatagcactcttgctttaagccgcccgacaaggtattccaagcaccttgagcattataaacatttacagccgataataaaatcccaacggtacaagttgtaataaatatccattttttcatgacttaaaattttaaaattccctactcacttccattggattttcgggatactctattaccgattttcatacggacgatttaaaatcgtccgtatgaatcaaaatattttaattaaatacaggatttgtaaaatttctgcgtacggaatagtttccccaatcatagacaccatcatattcaatatgtaatgtctgagtagcaggctcataccaactttgattattagtaacccgataattataaacatcgccattccagccatatataatctctactttctttcgttcatttccaacatcttcctctgttattttaaatgcttgagttgtctgatcccagaacgtacctgcccagccaggactaaaaataacttcctcatcagaaacattattaattagattctggcaacttgcatctcccaaaccactttttttcattgcttttaaatgataaagttgtgcatttataacagcacctgggctagttgaaataccactctctccatctaaaatagtcattgtccaggaacccgtatacttatctctcatattaattgacaaataagtaacagcaccatcctgaatctttaccgaagaattatcacatcccgttatccgtattggcaaaagatactcttttccaccaggtgcagcagtcaagctggtcggagtcacttcgatctccgctgtagtagttacttctcctgccttaattttcaattccggagtcgtataacaatctggtaaaagttcataagaagtaccattctgccgattataggtaacgagtaaatccgggtcggcttcataggtaaaggtcagctccatatctttattctcgaaaggcaagtctatgaccaaaggaacagtgactttatccatattgacattccgccacggatcacagcttacctctatcaaactccctcttccgcgcaaatttgcctgaggtgtattcagccggatcgccagcaacagataatctttatcggtattgacctctaccccctcggtcaggctcttgatccgtaccggataaacgtacttcacttcttcatctttcggaatcagtgttcgaagagtagtcatatcgaaagtcagttgtgtacctcccaaggtggcgtcggcagccagactcaggcgtttttgccccaaagtaccgacatgctcaggtaatacttcgaaatccagtccctcctgagtcagctcctgataatcggtcagtactgtcggatcgtacgacaattctacttcggcggcattatcgtaataaccgctcttatccacatatacatcccataccaaagattcttcgcccagatcgtatatttcttgcaggttgtaaccactcactcccagataaagtttggaaggatagagcttcagattcgactcgtcgatttctccgcacgaagccaataaagaagcgacaaaacaaagaattaaatatttgattttcatcttttttcgtttagaggttaaacattaccaaccgggattctgtttcagatccggattcttcataatagcagtctgtggaatcggctgtaaatactgtctttcgaggaaaacacgggtttcgaaagccgtacgctgataatattcggaacgcaaagcattcttagaagatatgtttacattcataccgtaggttttcccatgattggtctccgttgcaatcttccagcgattagcatcgaaccagcggatattttcgaaagcaaattccacctgacgttcccgatggatcaggtcacgtgccagattctggtcgctttttacatccggatatacggtctcgatatccggcacaccaccccggttacgcacggcattccaatagcccaatacctcgtcgtccaactcacccagctcaatctttgcttccacataattcagtaaaatctcggcatagcggaaattcgaccaactccgttcataattcagattgtagggattcagggtcgatcccggatgaacgaatttagtaatcaaatacccggtacggttatagtccgaactattactgccgtcggttccgtatttattgatatacaccggtttatcggttaccgtattcggccataccccttcgttatagaatatactggcataaaaacggggttcccggtttttatacatattgaacatctcgctggtaaaacctttgtagtccaaatcaaaagtaggtacggtaaaagtggaaaagccggattctgtataaccggattcctcgtcgatcaccggcgaaccgtcgttgttatagccggtaatcggataacgcccgttttccatggcataagcgtctacctggaactgagtggcacaattggtggcatgcccattcaggaaacgatctccgttcggagcaggtccttgttccagtaaataaacgtaatacgtattgtttgctccgggaaattcggcatcgatcaattcactgttccaagcctcgataaatactcttttataggttttcccttttgcattctcttcatccgaaccggtcaacagctgatgaggcagggaaccgtcttcacacatatcgatgaagttcttggcagcattggcagccactctccatttttccggatctttggttgtcgggaataaagccgttccgtcttttttctttaccgatgaaaaataagcattaccgttaaataagggacttgccgtataaagtaataaacgggaacgataggccagggcagcaccacgggtcggtttacctttgtaagtatctccctgagtcggtggcaactcgtaagccacagcttccaactcatcacaaatccacttcacacaatcttcccaggagtctctttcccgataaatcgtggaatttacatcgataatctcatttttcaccaacacgataggtccataaatcatagccaaccaataatgacacatcacattgatatatctggcttcggcagtccaggcttccagttcgccatcttccaattctttacattctcccacatgttcgaggaatacattggtttcccggattccgcgataaagaggagtccagaagttaagagaaggattggaggccgacaaagtaccgttctgcataaaagcatacacccgaacagcaccccattccgcctcatcgctggcaggtacaaaaggccagccatacatcggcggaacgatacataccgcatcatactgttccggcaagtaagcataagcattggccagatattgctcggtagtgctacgtttagcgaataccccctcgatcgtttgcatatcgtcgggctctttatccaggtacgaatcacacgaaacggtcagaaaagccaaaccgacagcgatataaaaaagtatttttgatttcataatcttcatgttttaggttagaagttaatgttcacgccgaaattagcggtacgcatcaaaggataaccacgtccgtccgttgaattgatttccggatcccagagtttcacatccttggcaaaagtgaggagattcgtaccggaaacgaagaaacgcactgttttcaaacgcaatttttgagtcaccgatttcggtaaagtatacccgagttcagcagttttcaaacgcaggaaagctccgctgcgttgccaccaggtggaatttttatagttgctcccatgccatccttcatcatacaagagagggatttctgcatcgaaattctgtttggccggatcgaaatatttatctttcaaatcatccagaaaacctgtccgtccgatattcggataattgaacgggaaataggcatctcccaggaaaaaagtcgtccgggccaccccctggaaaaacaacgataaatcgaatcctttgtaattcatacttactcccataccgtatacaatttccggtacatcggaataaccgataggcacttcgtcggcatcgtcgattacgccgtctccattgatatctttatatttgatgtctccgggtttgaggtaggaagtaccgaactgggaagggctattggcaatctccgtttcatctttaaacaatccgagtgctatgagaccgaattgctggccatatttttgtccgttccggttccggtatttatcgatataatcgggttgatcgttatcgatttgtttgttgcgggcatacgtaaaggttccccgggccgacaagaaaaactcaccgaaacttttatcgaattcgagcgttgcatcgattccctgattctgcatctttccgacattggaccacggcatggtagataccccgacataatcgggtaacgactgccgttgaacaaaaatacctttccgtctttcgtaaaaataatcggcctgtaaacgtaaagcattgaataaagacaattcaaaaccgacatttgttttggtagatacttcccacgacacatcctcattggcatactctccgacagcagtacctccggtataggtatgggaagtaccccaatacgttccgtaagctccgacaatcgtaggcaaatacacgaaacgccgtcctcctccgatttcgtcgttaccactctgaccgatagaagctttcaatttcaacatatcgatgatatgggttacaccacccatgaatttttcattcgaaacaatccagccgatagcacctgccggaaagaaaccgaaacgattaccgctggcaaagttctccgatccgttatacccgaaatttccttcgataaaataccggtcgtcgtaagaataagtcactcgtccggcaagcccctgatcccggtaaggcaaagcgtcgatagaagaaccggcagctacctgataattccgctggttgtataaaaagagtgctccaacccgatgtttcccgaacagccggtcgtagttgatacgtccttccaaatataaagcgcgttctccattcgcataagaagtatagcttaacgtatttgaacctaacgacttttcctcgtataccaaattattatcatcatctctcatccgggcgtaccaggtatgaggcgaacctccccgcaaaatctgattccaggaattggcatcgaatgaaaatttaatttcagccttcaacccttcggtcaccaatttcgaaaaatcctgttccagagctatcatggcgtttatcttagtccaccagttatcgttataccctgcctgagtcaaagtattataaggattcggaactgcctccccgtattcggcataacgaacagccccatcctcatcccgatcgggataaaataaaggcatcacgttcggagaagtattcatcgcatcgttaaatatcgagctaatactgttgtatggctgatgtttggtctccatacttccaccgatattcagtttcagaatcgtagtgggatgaaggtttacatccacattagaagtgaaattatagcgtttgtaattgatcctggaatcccattcatgttcgggatcactgataaacaaaccgttttcgttaaagaaagcgcctgaaatataataacgggcaatactccccccaccggtgacattcagattcacccgttgttgagtagtatgatttttcattaaagcatccaaccaatcgatatcgggatacaaatagggatcactgtgatctttgtatttttgaatttcttcaggagtatacagaggagccttatcgtgagaagtacgggctacattatacatctcggcccaggtagccgagttcgccattttgggcactttggtaggtgtaaggataccgacctgtgctttcacgttgatatcgggtcgtccctcttttccccgccgggtattcacgatgatcaccccgttcgctccccgcactccgtagacggctgttgccgtagcatctttcaggatagaaaaagattcgatatcttcggggtccagcaagtcgagacttctttccactccatcgaccaggatcaacgggtctttgttggcaccgaaagtactgattccccggatccagaactcggaactttgcccgggttcaccgcttcgctgcacagcaaccacaccggccagacgccccgccagactgttactgatctgtcccgtcggttgtttcagttcagccactccgacagtcgtgatcgctccgattacactctctttacgttgagatccataaccgacgacaacggcttcctcgatcatttcactggtttcttccaactggaaattaatcacatcttcttttcccaataccacttcctggcttttatatccgataaaagacaccgaaaggattgcatttccctgagggcggttgagcgaataatttccggcagcatccgttgctgttccgctggtcgattccttaaaccataccgtagctccgacaatgggttctccggtctttttatcggtaacccttcctttcactacccgtttatgttgctgtggcgctgccggcgtatcgccggcataggctgtaaaactacctgatataccaaaaaataccagagtcgacatccccaatagcaaacgcaacatgtttacttttagcattttcttcataagacatcatttaatggtttgtaataagtaattgtatgtataagagaggttacttaccccttactcttcaatcacattttatttctatcgtatattggtccgtatctcctttcaaataagcgatctgaacctcataaaccggaatataacggtaggttttgctctctccgtcaacgacttcgatcaagaggacgccatatccgatccctcctcccgcaccattgaacagagtgaccggtgataagctcaacaagccgtcggtccccagtgtttttttcataaaagcagtaacatcgacagtgtttttatacatttcctcccggtagatattgactgccgcatatttcaccggttgtccgtcccgggtaatattcaacactaagttcttcggatatttgggttcttccagcggaatgaatccttcttgtccccgcaccagatttttattccggttgatcagtaattgtgcatattcgctccaggaatctcccccccagcaaatattcatcatacaggtcaccgggctgaacaaggtcccgctgatcgggttcgttttcacttccatcgcatagatatcgggaactccgcgggcatgccctaattcatgggccaggcattcggaagttttgtaaggggataaaatatcgtaggtagtggccccgccgtcaggtgctcctttattgttatcggaaatgcaaacgacctcgatcccccagccggtccaatcgctatgtacccgttcatcggaaaaatcaccgactttaccgtcgaacatcacaagataaggataatcgccccgataggtcacagcatgatccaggacttcctgagaagaacaatcgtatacacaagtttcgtcgaagaaagggacaaattctatatcggcatcgaaataggtgattccttttttcccatggtaaagctctcttacttctttaaaacgctgtttcaatttattgtttacaacgtttgcggaagaaccgtaagatttaaaagtcgcccggtcgagcattacttttacatcgaagctccatacttcccggccggtctgttcccctcctccttcttctcccggttcatctttaggcgtaacctcgtcttctccgtcactactacatcctgccaccgccagacataataataaactcagccaataaaaaatttgtttacctttcataaaatgtatttgttagattacacaaaaaacgttcgattaaatcagtcgaaagtttataaagttcataaattccctggactctgcgggtactttgttaattgacaattgtcatttgacaattgataatgtatctttaaacctatggtttgttttttatttgtttgataatcaatgattatcttctttattcttgctctcatttttcttttatttttcattctttaacggaagcgaagcttccaatatctgtcaattgtcggttatcgtttgtccatttttcttctggcggattttcgccaaaagaatcgaacgttttttaagttaacagatgccatacattaaataaatctctataattttaataactattcacactttcagatacgacttatgctttttgctgtagaaactacttcaaaaagcaccagtcgttaaaaatgtattaaaatgtcgtttgttccgtacgacaaatgatctcgttctgcaaatcttcgcccaggtcgttgaaataatcactatatccggcaacccggacaatcagatccctgtagtcttcgggatgtttctgagcttcccggagcgtatcggcatcgaccacattaaactggatatgatgcccgtccatccggaaataagcccggatcagatgtaccagattattacatccttcttcggttgaaagaagcgaaggagtaaatttctgattcagtaacgtcccgccggttttgatatgatcgattttggcggcagaacggatgactgccgtcggtccgttcgtatcggccccctggaccggagagatgccttccgacagcactttccaggcattccgtccatccggagtagctccggtcactttaccgaaataaacatgacaggtagtaggcaacatatttacccgatagtccgccccccggggagatttatgtcccgacaaaacatcatagtacatatcgaacacctgtacctcctgctcgtcggcataatcatcatcgttaccgtatttcggagtatgatacaccaactgatactgcaactcttcgaaccctttgaaatcgttcgccaaagctttctccatagtctccatcgcgatggtctttttatcatacacatgatagcgtaaagcggtcagcatatccgtaatgctacccaggcccaccccttgcacatagctactgttgtaacgggcgccaccacacatataatcttttccgttccggatacaatcttcgatcagtacggacaagaaaggtaccggcatatatttcataaatatgcgttcgatgatattgttaccggtcagtttgatccgcataaaatgttgtacctgtgctttataggctgcaaacaattcctcataggtccgataatctgtagctgtcccggttttcagaccgatctgtttgccggtccgcttatcgaatccgtcgttcagggtcaattccagaattttcggcagattaaaatagccggtaaggatataagcttcggtaccgaaagccccggtttccacacatcccgagcacccgccgttccgggcatcgcggacatcttttcccgcccgcaacatttcctgtaccaaagcatccgtattgaacaccgacggttgaccgaagccggttttgatgatttcgacagcagcccggataaaacggtccggatttttcttactgacctgaatcatcgaactgggttgcagtaaacgcatctcccggattacatccagcaggatatacgacatctcgttcaccccgtcgctaccgtcttccttcacccctccgacattgatcagacaaaaatcggtataagtattactttcttcagccgtaacccccactttgggcggagaaggatggttgttgaatttcacccagaaagactgcaacatttcgtatacttcttcctgagtgaccgtcccctcttccagctgttttttatacagcggatacaggctctgatccaaacgtccgggattgaaagagtcccagggattcaattcggtaaccacacccaaatggataaaccaataatgttgtaatgcctcatgaacggttgtcggagcatgagccggtacccgacgacaaatcatagccattttctccagctctttctttctcaccgggtctttttcttcagccgccagctcttccaggcgttcggcataccgttcggcatagcggatcattgcatcacaaacgatatccatcgccctcagctcgtcgcgtttatccacgccttccggatcgtttaccaggtcggtcttagccagactttcggctatttcttctttcaaatccaacaacccggtacgaaacatctttatccctaaagccgtatgtcccggcgccctttgttcctgaaattccgtaaatacaccggcagtataagcctctttccactcctgtggcaaattctgaaatatccggtcgcgattacttttccctttccagtagggaataatgatatcccggtaagcagcccgggtagtttcatcggatttaaaggatactttcgggcgatcgttcaatatctcgagatcttgtaacgagtggatacagatttcgggataagtcggagtagccttcggggccggtccccgctcgccgacaatcaattcaccctcattcacacaaatatacttatgttccaggatatatttaaacgctaaagcccgttgaaccggtaccggttcggcatcggccatccccgattgataaaattcagtaatcagtaaagctctttccgccgagatccgattctcagcattcagactctgctcacgtagttttctgattcgttcggtcattttcataataagtatggttttgatttatagttttttaacaggttatatccgaaagccttgttccctgaacatttcccggatatctttcaggtcttcctctttcaggcccggaagatctcccatttcccaatccataccgagccgtttgtatttatctgcccccgtacggtggaaagggagcagattcacctctttcaaaacaggcatcgtctgtaaaaaacgaatcgtctcctgcacactcttcttatcgtcgttaaaaccgggaataacaggtatccggacaatcactccggcaccctgtccggcaattttcctcagatgttcacacgcctcccggaatcctttaccgatgtacgcttcgaacttttgaggatcggcagtttttacgtcgtaaagaaacaaatccgtataccggcatatttcttctaaatatgctccggaagccactccggccgtatcgatacaggtatggatacgacgggccttacaagctttgagacattccaacagaaaaaccggttgcaacaaaggttctcctcctgaaaaagtaacgcctcctcccgattcttcgaaaaacaccgcatctttagctatctcttcgactaattcatcgaccgaaatcccgtagcccaccttccggatttcttcgaattcacggtctcctaatttccggacttgtttcatcgacacagttcccacagcctgactttccgggttatgacaccaacgacaatgcaaacgacaccctttcaagaaaacagtcgttcgtattcccggcccgtcatgaatcgcataacgcttgatatcgaatatatttccacgcatgacgaaataaatttagaataataaaatttatctcactctcaagataaaaaaaacacagagaaaaattgtccttcggattcaggataaagaaaagaatccgctaatataaccagcattcaaaaagtcctttgtaggaacggttctgcaatatgcgaatttcatttagcataatcatcgaataaacatctcaaagataaaaacatttttttataaaacaaaaatataagtatcgaaaatacacttcaaatgataatttttttaaatttgaagcaaaaaaaaggaaaccgccagaggggcatgtgctacatcactattaaccaaatgattatgaaaacgtttgtctttatcttattctttctatcgctcgcttcactctccccgaccttcggcattccttcccaatttcgccattatacggttgaaaacggcttatcgagtaatgctgtacaatgtttgttgcaggaccggacaggatatatctggtgtggcacttcagacggtctgaatcgcttcgattcgcgccatttcaaaactttccggcatattcccggcgacacggcttctttaggcaataatgtcattcattctttattcgaggattcgaaaggtaatctttggatcggtactgagaacggtgttttccgctaccgggtatccgaagaaaaattttcgacctttcatctaccggatatcccggaccggctttctcaaaaaatcatctactcgatcaaggaagaccaattgggaaaaatctggatatcggtttatggaagcggtgttttccgctacaatccttcggacggcaagatcaaacattacagtcacgacatcaacgatgaaaagagtcttatttccaatctgaccaccaaaattctgatcgaccacaccggagaagtatggatagccactcatgatcagggagtatgtaaatacgatcccttcaccgactcttttttccggatcgatgctacagataaacaaaaaggatatacagcccgttacatttacgccctatgtgaagattctttcggaaatatctggttgtgtgacaacggacttttcaaatacgataaaacaacccgcaactgtacggcctgcctccctcctgctgacgaaccgataacctatatccattttattaccgaaatacaaccgggtatattgctcatcggttccaatagcggactgacacaatataatctggcggagaacactttttctacgatcggatacaatgttctttttccgcaaggattaaatgacgggattgtctattcgattctgaaagaccgggaaggaggtatctgggtgggaacgaacgccggaggtatcaattatcttacgccgggtaccaattggttcaatacgttctgctatacaccgggcaaaacaagtgccccggggaaagtcatcaattctttttgtgaaaacaccgacgggacgatatggatcggaacagataataaagggctttggaactacaacccacacgaccaatctttcactccggtatacttagacgccaaaaatccggacctcagcgtgcacgccttatattgcgaccaccatgaattatgggtcgggacttatgctcacggtgtgtaccggttaaattcagctaccggtaaagtgaccaactattcggataaaaatatcaagggcttgaatccgggcagtgtatacgctatatacaaagacagctcaggcaggctctggttcggtacccaaaccggcatcctatattacgatatcttcagcaattcgttcgttactatcgccgatctgggatacaacagctacatcaccgacatcaccgaagacgccaaccacacgatctggtttgcttcgcaaggcaaaggattgatcagctatgacctgaaaaccagtaccctcaaatttcattccaacgatcagaccggtttaccacaatctatcgtgtgcctgtgcagcgatcagggcaagttaaggatcggtacgggcggatacggactttatacctacaatccggccgatcatagctttacccgtcatcccgatccgttatttcgtacccataccaccatacagacgatcatctccagttataatgaattgtggatcacgaccaatgccggtttactccggttcaatactttggatgaaaccatcagctattacaatcaggaagacgggctcatctgccttccgtttaccaaccaggccggcctgcaaacttccggcggtcagatctatatcggcggcagcaatgggttcaatgtcttccatccgcaaagtatccgcaagaatgaagtgattccccatattgtttttacggccttccggcttttcaatcaggatgtaacaatcggcggacattcggttctgcaagctcagatcgaccgtcagcgctcggtcattctccctcacaacgaggccgttttctctatcgaatttgtaacgaccagctattgtgccccgagtaaaaacaaatacaaatacatgttgaaaggtttcgataaaacctggaacaacacggacaatcaaaacaacatagccacctacaccaacctatccccggggaattataccttccaggtgatggcctgtaataacgacgaggtatggaatcccgaaaaagcagaaatccggattacaattcttccaccctggtggttgtcgaacggtatgttagtcgtttacggtatcctgatcgttttagcgatcgctttagggtatgcacttttattacaacggaccaaccgacgccaccgtaataagatcgcagccttgcatcacgagaacgaacgcaaactattcgatgctaaaatcggatttttcactcatattacccatgaaatccgtactccggtaacgctgatcctggcccccgtagaagagatcatgcgtcaaaaaaatatcccggaggaaatcagggacgacctggaagtcgtcaaacgcaacagcgaacggttactggacctggtaaatcagatcctggattttacgaaagccgaacaagaagctttttcctcccaaaacacctggttcgacatcgatgatctggtggaaaaaactgtacagcgttttacatctgcagctcagcaaaaggggatacagctctcccacgatactccacaaccgatccggatttgcaccgaccgggaagcactgaccaaagtgttgagtaacctgctgaccaatgccatgaaatttaccaaagaccgtattctggtctccctcactgaaaatcctgaagcacatacggtaacgatctctgtcgaagacaacggtacgggaatcaaacctacggagaaagaaaaaatattcaacctcttttaccaatcggccaataaaccccaactcccgaacaaaggtttcggtatcgggctagccatcgtcagcctgttggtgaaacgaatgatgggaaagatagaagtggaaagcgaagaaaaccggtttacccgtttccggatcacgcttccccaggacgaacaaaacgacctttct

SEQ ID NO: 5951 - DNA, 3846 bp, Unknown
  gut microbiota DNA sequence
ctattagcgtgaatgaaaaaatttaattatttaccaatacaaattaaaaacaaaagttatgttcaaaaatcatcctaaagggttgcttactgcggctctaagtaatatgggagaacgtttcggctattacatcatgaatgccgtgttagtgttattcctatgttctaaatttggtttgagcgaagccgccagtggtaccatttattccttcttttatgctggtatttacattttaagccttgtcggaggtcttattgcagaccgcacgcaaaactacaaaggaaccattaagactggtcttgtagttatggcaataggatacattatcctatctgttccaatccttgcgacatcgcaaaatacaacttggttattgactcttacttgtgttgccttgtttcttattgcatttggtaacggtttgttcaaaggtaacttacaggccatcgtgggtcaaatgtatgataattttgaagcagaggcagcaaaacaggggccagaggctctcaaaatcgcaaaagacaagagagattcaggtttccagattttctacgtattcatcaacgtgggcggtctaattgctccgttcattgctccggttttacgccaatggtggttgggtgtaaacggattatcttacaacgcacaacttccagccctttgtcacgagtacgttaataatgctgcaaacatggctcccgaagcacttgccaacttacagcaacttatgacggctgctggtggagctattaccgatatgactgcttcttgtctccaatatctgcaaattttcaatgaaggaattcactactcattcattgcctctgttgcagccatgcttatttctcttgtaattttctttgtttcacaaaaaacattcccgaatccagcaaagaaagctgctgcgcagagtgtaacctacacggcagaagaaaaagctgctatggctaaagaaattaaacaaagaatgtatgccttgtttgcagtattaggtatagtgattttcttctggttctcgttccaccagaatggaatgtctctttcattctttgcccgcgatttcgttgattcttccgcagttgcccctgaagtatggcaagctatcaacccattttttgtcatcgttcttaccccaatgatcatggctatctttggattccttgcaagacgtggtagagaaatctcaaccccaagaaagatcgcaatcggtatgttcattgcaggtttggctttcttgttccttgcagtgttctcaatgatgaaaggctatccttctgcagacactttcaaaggtcttcctatcgcagaacaaatggcagcaaaagctcattggtgggttcttatcgttacttacttcttcttaactgttgcagagctatttatctctcctctaggattgtcattcgtatcaaaagttgctccaaagagcatgcttggtttgtgtcaaggcctgtggcttgctgctaccgctcttggtaaccttctactttggattggcccgctcatgtacaacgcatggccgatttggcaatgctggtcagtattcttgatcgtatgtcttgtatctatgggagttatgcttggtatggtgaaatggcttgaaagagttacaaaataaccttatttatcaacaataaaaaagagttcagaaaattctgaactcttttttatatcaaaatcaattcttaaaaattgatctgaagtcctacccccaacacttccttaaactgcactctcggccctgccgttccgtcttcttgggcgatctttacatcattatcatataacaagtttgttgataaagtcgtcgaaaaccatttattaatggccatatttaattgaacctcccagcgaatatcaatgttctgaggatctttcaaataattagaatacaattccaaacgagaataaaccttcatattaggcaaaaactcataattcacttctgccttcaagtttgcaccaaactcagataacaaatgttttcccttatccacaccaaaagctccttcatccgacaaacggctatcagctacaatagttcccctccaagaagccggggtaaaagtggccgtaaatatcttattcggactccaagtaacaccggtaccaatcatcaagtatcccggagccatgaactttgaaataaaatcagaatcctcaatattataatcgtatcctttcgcaaactgcgtattaaagttcaataaagcactccagtaaagtgttttataaatctgatacccataagtggaagcaaaatatatcttatcgtttgttttccgggcgctcttaccatcatttttcgtcaaaccgtatcccagttccaaacgattttgccacaactgacgatctcgcttaaaatcggcactatatgttatctggctatcaaatgccaaagcagactcacctccggcagaccaactactcaaacttacttgtgttaattttaacccgaagtaaccgacttttgtccacgccgtatctcttaccggctgcgcatacaattgtcccaaacccaatacaaatagggcaataacaaagaatcttttcatcatactcttattaaattatttaggtttaaattatactatcttttgactgataaacgtgaaacaacaaagatttgttataaaaaaagcaggttattttctaacctgctttagaagaagtcttttttcacttatattttagcacatagttcggatattttcacaatcacatttacgattttttccatagaggacacgggtatatactcgtaacgtccatgcccgttatgtgccccattggacaaattcggtgtaggcaatcccataaatgacaatcttgccccattagtacctcctcgaataggagcaatcaaaggtttaatccccagttctgacatggcctgttttgctatttccacgatatatcttaccggttccaaacgttctttcatattcgcatactgatccttcatttccaaaagtactggtaaatcatacttctttgaatattcacgaactccattttcaatgacatcctttctccattcaaaacgttccttgtcaaaatcacgaatcaatatttctagcaaggtctcttctacagtccccttgatagaatagatatggaagaatccttcgtaaccggaagtgtattccggagcatcctttttaggaaggctagccatgaattcattagccaccttgattgaattgaccattttatttttggcatatcccggatggaaattacgccctttaaacgtcaaacgagctaaagccgcattaaaattttcatactctaactcaccgatttctcccccatccaaagtgtaggcaaatttagccccgaattttttcaaatcaaaatgatcaacaccttccccgatttcttcatccggcgtaaaacaaacagcaatacgtccatgcttgatttccggatgttgaaccagaaactccattgccgtcaggatttcagcaatccccgctttgtcatctgctcctaaaagcgtgttaccatccgtaacgatcaaatccgtaccgacataattcatcagttccggaaaatcatccggtgacaaagtgaatcccttttccttgttcaacaacacgtcatttcccctgtaattctcgataatctgaggtttcacgtgtttacccgtcatgtccggactggtatccatatgagcaataaaccctatcgaaggacactctctgtcagcattagaaggtacaaaacccatgacatatccgtaatcatccacggctacatcctgcattcccattttctgcatttcctcgcaaagaagataggcaaactgcaactgtcccggagtactcggaactaaacctgtct

SEQ ID NO: 5952 - DNA, 18067 bp, Unknown
  gut microbiota DNA sequence
aaaaataattagaggtattcattttgcaatgataaactttttagaggaattttggtgcggtcgccctggagcggctttgatgatgaagctgtttttctgtgaaagaatgagggcgttaacgttttcactttcccgaaattacacaaatcttcctttcgtgtttgaaatttaacaaaatgaattatttttgatattatgcgctacctttgttcgtacaaacgaaacacacactactgacaatttatatacaactgacccatgaaacccgccttcgggcgggcttctgatttaacctatatcttatgaaagcaaaagacgttttgacagaattgaaaaggcggtttcccaacgaaccggaataccaccaggcagtagaagaggtattgaataccatcgaagatacctataatcggaatatcgagtttgaaaaaagcaatttgatcgagcggctctgtattcccgatcggattttctcgtttcgggtgacctggacagatgatcagggaaatgtgcataccaacatgggctaccgcatccagcacaacaatgctataggtccttacaaaggaggaatccgtttccattcctccgtgaatttatctattttaaaattcctggctttcgagcagacctttaaaaattcactgactactttaccgatgggaggggctaaaggtggttcggattttaatccgaaaggaaaatcgaatgccgagattatgcgtttttgtcaggcctatattttggagttatggcgcaatatcggacccggtacggatattccggcaggggatatcggtgtcggtggccgggaggttaattatatgtacggaatgtataaaaaactggcgagggaaaatagcggaacttttacgggcaaaggcctggaatccggtggttctctgatccgtcccgaagctaccggttatgggaatgtatatttcctgttggagatgctgaagacccggaatatagagctgaagggcaagaccgtagccgtctcgggggcgggaaatgtggccctttacacggtacagaaactgaacgagctcggcgcaaaggtggtgactctgtcggatagcagcggttatatttacgatcccgaagggatcggtgctggaaagttggaatatatgatggagttaaaattgttctaccggggaagggtgaaggaatatgccgataagtacggttgtaaatacgtggccggaggtcggccgtggggggagaaatgtgatatcgctatgcccagtgccactcagaatgaactgaacggtgacgaagcccgtactttagttgccaacggttgtgtggcggtgtccgaaggggcgaacatgccctctacacccgaagcgattcaggtctttctcgaaaataaattgttgtatgttcccggtaaagccgccaacgccggcggagtggccacttcgggtctcgagatgtgtcagaatgcacagaaaatcagctggacacgcgaagaagtcgatcagaaactaaaggagatcatgcagtctatccatgcgcagtgtgtgaaatacggtacccagcccgatggttacgtcaactatgtcaaaggagctaacgtggccggttttatcaaagtagcccgcgcgataatggaccaaggcattttataaaaggtataaattcatcataagaacgtaagtataattttttctttctattccgatttcggtttttataccggaagaccggttcgcctggaccggtccgttaaggctttccttcactgaccggcggaactcctcgcaagctcgtcagacaccaccggtcgggcgttcggaaaccctaaccggatcctcgttcccgctccaatggtcttccggtataaaaccctccatctcacggcagagctaaccggcaaagaaaatacaaccagaaatttgcagcagcaggaagacggaccgtccggcttatttccagggagaataatctttcttaaatcaagactaatctgcaattcagtgataacgtaagtcggaggtgatcgggattggcgaccattggagctctggcgagtgtcgtcttgctttttctgaacgcccgaccggtggtgtctgacgagcgtagtgaggagttccgccggtcagtgatagaaaaagttagacgaccgacagaagcgaccgggtcaccaattccgatcaccggagacgaataagtaccgaataattctaccgttttttggttacgacggtttagacatagtttttgaaagcgttgtaactatgtaaacggtacgctttaattcggtttatgataccatgttccgctcctgaccggtggccttaaaaaaggattcgcagggtccggaagactttatggattttacaaattgctttcttgtttccccgccaactgtccgcaggcggcgtcgatgtctttccctttgctgcggcgtacgttgaccaccatgttacatccttccagaaaccggatgaaggcatcccggtttttgtccggactgtgttgaaaaccagaaccttccacattgttgtattcgatgatattgatcttgatcgggaattggcggcaatagagggccaaagcttttgcatcttcgaggctgtcgttgatatctttcagaagcaaatactcgaaagtcggacgggttcctgttttttcgacgaaatatttcaggcttcctgcaatctcactcaaaggataggctttattcaccggcataaggaaagtgcgggtggtttctttcgctgcatgtagcgaaagcgccagattaaaacgcactccatcgtctgccaattgcctgattttttccgggataccggctgtagataccgtaatccggtagggtgacatggctaatccgtcctgggccgtaatccgttctatcgctctgaggacctgctcgtaattcagtaaaggttcgcccattcccatgaaaacgatattgctcaatggttgcccctgggcttccgctgcctgctgtgcacggaccacctgttcgaaaatttcgccggccgttaaattacgtttaaaacccagggtaccggttgcacagaatttgcaccccagctgacaacccacttgtgaagatacacagaccgtgaatttttgatttccgggaatcagtacgctctcgacgatttcgccgtcggtcagccgccaggctgttttttcggtgccgtcgctggctgtctgcacctgctgcggaaagagggaatcgaagaaataatgccggcttaataattcccgggtagccttcgataagttgctcatctctgcgaaatccgtcacccctctttgccagatccattgccagatctgttttgcacggaaagccttctcgccttgtgcggttaaaaagtcgcttaaatcccgtaaagattcttctctgatattttttttgttacttgtatcggccataatctcgttattatataaaatcaaaatctctcacctcacaaaggtatcgtattttgctatattcttctccttcagccttccaaatcttttcttcctgttcttttttctgtcccggttttttcttttcctctctcctgttaaaataaagtgaaaatcagataaagaacggatttaattatatatttgcacttatcttagcttgaaagttataataacttaggaaaaaggttatttttcgttaagaaatttaagttgggatagtgtggtagttataatttaaaacaaatactatagaataaaacacatgaagaaactattgattattgctcttgctctgctttcggtgtctattgtcagggctgatgaaggaatgtggttgttgtcgaaattaaaaccactgaacattgagaaaatgcaacagatgggatttaaactgactgcagaagatatctacgatgtcaataaacccggtatcaaagatgctatcgtcggtttaggcaatgccggccgtcctttccgtcatttttgttcgggagagattatttctcccaatgggttgatgctgaccaatcatcactgtggtttcagtgctatccaatctcattcttctgtcgagcacgactatctggccgatggtttctgggcttacaaaatggaagatgagctcaccaatcccggcgtgaccgcttctattctggaacggatggaagacgtaactgaccgtatcgctcctttcttaaaagacgatatgagcgaaatggaccgcggcgctatcatcgacagtatatctgcagtgattgtgaaggaagctgtggctggaacgaaattaagcggacaggttcagccgatgttcgaaggaaaccaattcttcctgttcctttacaccatctacaaagacgtacgtttggtaggtgcccctcctcagagcatgggaaaattcggtggagataccgataactggatgtggccccgtcatactgccgacttttctatgttccgtatttacaccgctcctgacggtagccctgccgaatactccaaagataatgtacccttaaaacccaaacattacctgcccgtatctgcaaaaggcgtgaaagacggtgattttgccatgattatgggattccccggaactaccgaccgctataccaccagtttcggattacagaatacgatggatgtaaccaacgatatccgttacaaagtacgtacggtaaaattggaggttatgcgcgaagaaatggctaagagtccgaaaacccggattcaatatgcttctaaatatgccagttgtgccaactactggaaatattccttcgagcagaataaagcgctcaaaaacctgaacaccaaaggcaacaaagaagccatcgaaagagagtttaccgcttgggtaaatgccgatccggcccgcaaagccacttacggcgaagtgctgccgatgattcgccagggatacgaagatattaaagaatattccgtagctacggcttatgcgcaggaagccctggccggacccgaagctcatttgttcgcttaccgtagcggaagaatgatcgaagatctttgtgataaagaaatccccgccggagaaaaaacagagattaaagaagctttgaaagatatggctaaagcttttttcaaagactataatgccgatctcgatacaaaattattcgctgcattgtttaaaatatacaacgacaatgtcgatcccgatctttaccccgaagttatcgatctggtcaacaaaaaatacaaaggcaattacgataagttcgctgccggattgcagcagaaatccatcttcatggacgaagctgctttcaacgcatttctcgacaaacccgattgtaaacaattggccaaagacccggtatatattgccggtaaatctttctatgagatttggatcaaactgaccgcctacagtggtgaaatgcaggaaaaaatttccaaaggagaccgtcttttcgtgaggggattgatggaaatgcagcccgataaagcctgggctcccaatgccaattctacgattcgcctgacctatggtaaagtaggtagctacaaaccgcgggatgctgttttctatgattactacaccacccttaccggtgtgatcgaaaaagaagggcccaaaggtggggagttcgaagtacccgaccggctgaaagaactgtatgctcagcaggatttcgctccttacgggaccgataagttgagtgtcaacttcatcacagataacgacatcaccggaggtaacagcggttccggtgtcatcaacgccgaaggacatctgatcggtactgccttcgacggtaactccgaagccatgtccggagacatcgattttgaagaaaatctgcaacggtgtatcaatctcgacactcgttatttcctctggattgtagataaatatgccggagctaagaacctgatcaacgagatgactattataaaataatcaaaaactaactactatgaaaaatttagattggggtaaattgtcctttggatattccaagacggattacaacgtacgttgttattataaggacggcaaatggagtgctcctgaagtcagcgactctgaaatgctgaatattcatatggcttctacctgtttgcattacggacaggaagcattcgaaggtatgaaagccttccggggtaaagatggaaaaatccgtctcttccgttgtgaagaaaatgcaaaacgtatgcttagttctgccgaatacgtaatgatgcaggctccttcgatcgaactgttcgaagaagctgtcgtcaaagccatcgagttgaacaaagaatacgttccgccttacgaatcgggggccagcttatatatccgtcccttgttgatcggtgtcggaccgcagatgggagttgctccggctaaagaatatattttcgttgtatttgtagctcctgtaggaccttatttcaaagccggtttcaaaccgaccaaagtcatgctcgaacgccgttacgaccgtgctgctcccaatggcaccggacacatcaaagtaggaggtaattacgctgcaggaatgagatccggcgaagtagcccatcagaaaggctattcgaccgccatcttcctcgattccaaagagaagaaatacatcgacgaatgtggcccggccaatttcttcggtattaaaaacggttcatatatcactccgttctctcacaccatcctgccttctatcaccaacgccagcctgatggtattggccgaagacatgggattgaaagtagaacgccggcttattcccgtagaagaactcgagactttcgaagaagccggagcttgcggtacggctgctgtcatcagtcctatcggacagatcgatgatctcgaaaacaacaagagcatcgttttcggtaagcccgatgttcctggtgaatggtgtaccaaattgtacaaccgtttgagagctattcaatacggagacgaaccggacaaattcggttgggtaaaagtattgaatttctaaaaacagatttttagggataattgaatcaactcggagaaagtgcctgatcggttcaggcactttctttcttttgggaactccgggacggacctttcgtccccaatgggggaggacgggagttcataactactccttcggcgtttaaagtagtatatcgggttgctggagcctgcggatatatatttttttgaaactttctttatcaaacattggcaaatctacgaaaatttcgtagatttgcgaataaatcgtagtttgatgtgccttatggaaaaattgacttttcaggaagaagaaatcatgcttattatctggcaggtaaaagaaggagtgattaaagattttttgaattgcatggaagagcctcgtccgccttatacgacggtggcttctatcgtgaaaaatctggagaaaaaaggatatgtacaggccaaacgttatgggaacacctatgtttattcgccttcgatcgatgaaggggaatacaaaacgaaatttctttccggcgtcgtacagaattatttcgagaattcatataaagagatggtaactttttttgcccggaaacagaagatctcggccaaagagttagaagaaattatccgtttaattgaaaaagaataggagctatggaagattttcaaatttatatattacaggtaaatgcgggtttagtggtattctatcttttatatcggatgttgttttccagggatacttttttaagaatccggcgtttatttcttttttccatcgttatactggcttttgtatatcccctgatttcgttggcatcctggttggagcaaggtaatgccttgcccgggatggttgtcgggtatgccgaaatgctggcggtggttactcctgtggctccgcaacctgccgcagaacaatcgcttttcacctggcagcggttcctgatctggatttggagtgggggaagtcttgtgctgacactccgtatggcggtccagttggctggtatctgtcgattcgcttatcagggtaaaaaacagagctgtcatcatgttccggtcattgctttgccgaagattacagctcctttctctttcttcggttggatttttgtcaatccggcccattacgaagagcgggaacttcatgagattatcgtacacgagtctgctcatgtccgccaatggcattcattggatatgttactcggggagatactttgtatctttttctggttcaatccggttgtctggcttttacgtaaagaaatcaggcagaatctggaatttttagcagatgagcaagtggtaaattccggttacaaccgcaaaaattatcaatatcacttgcttcgcctgtcccatcaatcgactgcagtacctatagttaataatttcaatgtttctcaattaaaaaaacgaattattatgatgaataagaaaaaaacatccagaatcggcttgttgaaatatgcctttttacttccggtaaccggcttattgattctggctggaaatgcacgagccgtaaccgatctggcctcccatacactgatacaggccggcggggaaacttccttatacaaaggccgggtagtggacgaacaaggtaatcccctgcaaggggccacggtcattatcaaagggacctcactgggggcttccactgatcaggatggagaattctctatccaggccgggaagggagatacgctttatttttcatatgtaggcaaacggactgcagaggtgatttgtggggataaagctaatctgaaagaggtggttttacctaagcaaccggtagagctcgagggaatggtagttgtcggatatgcgaaagctggccagaatgcaacatctaaggagggagaaattttcacggctgtcgaggaaatgccggtattcaaagaaggaaatgtgctggcttatatggcacggatggtcaaatatcctgtccgggctcaggagaaaggaattcagggtaaagtgattgtttctttcgtaatcgataaagcgggtagagtgaccgatcctcaggttgtaagaagtgtagatcaggatctggaccgggaagccctgagagttgtcaaggcattacccgattggattcccggcaaacagagaggcgtggctgtagatgtgttctatacgcttccgatcgaattccgcttgcagagcgatgcagaaactcctgccgtttcgggaaaagcggatgaacaggtgtgaccggccttttaacagtaaaaacaacggccgataaatcggagttgtgcagtcttccccatcgctgattagtaaaaccttcggtcctgataaatgaatataaatcagaaccgaaggttcaccgatccttcccttaggggggattatttcgtattgataatcacttctgcattcgggtaataccccacctctttttcaatcgggctaatcggacggatttgcaggatctcactgggatcgatatcgaaacggtcggccaggcgtccgtcgataaccagaagaggttctttcattttttcgagattgtatttgtattcctggctattgtatttaaaagtgagtacgccattctgaaagctcacaaattctcctaaccgatctctcgacgtgatgaataaataggattttttgacatcttctttcgatgggatgatgttgacattcaaaatcttatccggcatttgtacgttgtctttaggggcttgttgcccatcgatgatgtaagtcatatccgaattctgggagtcgattttaatttttgtttttccgttttcttccgtgatttgtaccgagttactgctcatacctgtaccgttgccgaacgattggaaaaatttttcaaccttttgccggtgattgccgtttttgaaaaattcttcgaaatcttcatccgtcatgccctcccccggattaaaaaattcgtccggtaggaaatgaccgaatggaaaaccgccgggcatattgttcgtggtggtcgaatcaccgggcatgccgaaaaaatcgccgaataacgatccgcttcccatgtgattgtgcagattttccatcatctgccggatatgctgtgaaatagctccgggattcatatccgggaaatcgttaaagtgtttatacgactcataggtgtcggcattggaactcaaggcagccagggagttcaggcctttcagattcagcgctctcgacagcagggcgattttatccagttgaatgtctccccggagttcgatgatatccacctgttgtgggttttggttccagaccaccaggtcggtcacttgtccgtttttgttgtgcgtgtagatcagttgctttccgaactcgtcgttccggcttttgatcagtttgtatttttccggtttatccagtatttcccggaactggccgatcgctttttcgctcagggagggatcggtctgattcaaatccagattgagaatattcacctcttccagtttttgcaggagttcgtttgcctcgggcggaagattattccgttgataaagtccgtaaaggcttttgtccagctgggtgaccgtcacgccgtttttctcatggtatttggacatgagcttagataattgtgcatttgccgcgaaaggcaaaacagatacaatcgacaaaataataaatattcttctcatggctatcttgttttataattatactttttattctatcgctataatcaggttatgatcttcgtaaagcactctttgtaccggtgttttttcatcttccagggcatttcccaggacgcgcagtgcattttcgaagcgttctttcttcaggttatccgacagttgtatacccggacggggtgtcgttgtgaaggtctccctgaatgaaaggatcagcacggccatcgctgcaatactcccggccgtaatccagagctgtctgattttgcgttgccgtttttgccggatataccgctgtagtttttcattcaggccttccggtatttccatcggaccgcgaagccccaaaatcggttctcccgggagttctccccgttgccaggcagacctcaactcccgctcttctgccaaagttgtctcccctttgtaatatcgtttcagtacttcttccatatattctatctgtcatctttcatttcgcatcatttcttttaccttcgaccgtccgcgtgagagcaacacccggatgtggttggcggttagtcctgtgatctgttcgatttcttcaaattccagttcttctatttcccgcaggatgagcacctcccgttgattttccggcagagtgtcgatgatttgccggagaaggctcacggtgtccttggtttcgatttcctgcaagggattgcttgtataatcttcgttttgtgccagctcttccccgccgtacaccggtttttgtttttttatccagtcgaggcacaagttgcgggtcaccttcaatgcccaggcccggggattttgcactcctttcagctctctacgtgtattccagagtttaatcataacctcctgagtgatgtctgcagcatctgtcggattgctgagaatatgctgtgcataggcatagatattcttggtcagaggcaggatcatatggttaaattctttttctgtcatcattagtaaaacggatgcaggctgattttattacaaaggaacggttttttcttcgttaaagtatgttagagaacgtttttcttgccgtttctttatcgccttcgatgcgcaggttacgtcctttaataatcacatcttcgccgggagtgagtaaggtattcactttttgggttcacttcaaatacaataatgatacaaaattaaatatcttgtcgcccacgattgaataataatattcattttaccttcagcttcaggtaaaagcctgaggaaggtagttctttaccatatagtaaataggtagttatcatgtagttaatatgtatcaactccaattcaattccaattattctccaatttaataccaattttaatcggtgttaaattgaaaataaattggaaatttaaactttttttattatattacaaacctcgaaactaaatataaacatcatggcaagagtaatttcttcagggctcgggcatatttccggacgcataggcgaccatatcttttatgctgtgggagataaaagatacgtacgccgcgctcctgctaaagtcagtaatccccgttcgccggcccaatgtttacagcggtggcggcaggtgtgtgtgcaaacgctgttccggtcggtcaaggggactttatttcagcgtgctgccgacgaggctgctgtccggttgggaaaacgatcgggataccatctttttttgagccggaatatcaatgctttcggagagggtgaccgggtcgactatgccaaattgagttttggaggtgcttgtttacaattgcccgatgggtttacctgtgtacagaacgaagcggggcattgggagttggcctggcaggcggggatccccatggcgacggcagcgccggacgaccgtttgatagttgccgctatctgcccggacgaaccttatcggttaattgtgttggaaaatatctgcgcgctcagaaaagatggacgggcagaaggtgaatggccggcaagcgggaaggaattgcatttatattgtctgttttgctctgcatccggagaaactttttcgccggattgctatttcagattgaaccggtaaatacaatgaaattatggcagtttttgaatcgggtttattcagcaggctgagcgggtccttcggaaatgttacgatgtaccggcttggagattctaatgtggtaaaaggaaaaagatgggcacgggatgcccgtactccgttgcaattgatacaccgggctaaatggaaagtcttgggtctcctggctatgagaatgaaaaaagtgcttgaattgggttttcccggtagggaagccagaggaagggtaaacggttttatgagccggaatctaccttgtatgacttgtgacgaagggttgaacgtctccgtcgattatagtaaactgaaagtttcggccggcgagctacaggctccggaagtcactgcccaatgggcagattcgggcggaattttgatcttcaaacaaaaacggcaaccgctgaaacctctgatgtacgatgacgaccggctttatgtttttctctggaatccggaagtgctgcggacaaacctgctgcctttacaccaaagaaaagaaacggcggaagtatgctttacactttcggaagaatggaagaatacttcttttcatatatacgctttcgccgtaaatgcacgtgccacgaaggcgtcggaaacactttggctgggaaactttcacgagaataaagaatgatatttatatacatgtttacacttacaaacataggtatattttttctttctattccgattccgggttttataccgtcagaccggggcgcctggaacggtccggtaaggttttccttcactgaccgacagaagcgaccggctcgtcaattccgatcaccgaagacaaattagtagcgaaataaacctgcattagtaccaaaatctatacataaattattcgtatttttcgaaaaaacatcttagtgcgagttatattttcttatttcctcgttcaatcgtttgaggtaattcaccaagtcatcaaatggtatagacttaccataaatcatgtgcagctgcatattctcataatcggcttacccttgttcaataacagaagcaggtggaattatattgagcgtcgcaggataaagtgtgtcatggtcgaaaccacgcaaacctatgaatgtgcggcgatgttccactacttgacggtaaagctctgcatcattgatggcacgcccggcgattgaagttttcaacatctgcccgatgtcgtacatgtgtcgcgacatacgctcaactccgattaaattctttgacttagcgaacgcctcatgaagcaggaatatcttttcaagaaaagtgtgttcgggaagtacggcacgtaccatgaacttctgttcggtaaaaggggctttcggatatacctggtctatcattgaatcgaatgcaatcccacttacaggttcactcattagtctaccgcttacttctacttttacctttggcagaatattacacatgtttatatttgataaatgtgtatatttgcaccaactatattggtaaaatgtgattgatggacaaaaaaacggatatatggagataaaaagggatataacggctgcattgctcgaatgggaacagcggccggagcgcaagccgcttatcatccaaggcgcacgtcagataggtaaaacatggatcatgcggaagttcggagaagaatatttcgaccacgttgcctattttaatttcgatgcatcggaagaactgtgtcgggagttcgagaatacgaaaaatcccgaaagactgatcgatattctccgcctttatacggaatatcccatcgagccggggcggacgttgatcatcttcgatgagatccagcagagcaacaaggcactcaatagtttaaagtatttctgcgaggaggctcccgaatatcatattcttgcggcaggatcgctcttgggcgtatctctttcgcagggagattcgtttcctgtaggtaaagtggaattcctgaaaatgtatccggttacattccgggagtttctgcgtgccgatacgcctcggatgtacgaatatctggagaacctgacggagatcgcgccgttgccggagatcgtcatgggatgtgtcgcagaggcataccgtcgctatcaggtttgcggagggatgccggcggcagttgctgctatgctcgacaaacgcggcgtacaggagatcgaggagattcaaaaagcgattctgacggcatatgcgctggattttgccaaacacgctccgggtaaagacattccgcgtattgccgccatttggaattccataccgtcgcagttggcgaaagaaaaccgaaaattcgtctacaagttggtcaaaaccggggcgcgggcacgggaatatgaagacgggctgttgtggttggagcatgccgggatgatctatcgtatttactgctcttccaagcccggtttaccgttgagcgcatacgacgacctttcggcgttcaagatctacctgtgcgatgggggattgttgcgtgttatggctcagcttccggccgaggttctctggtcggagaattcgctttatacggagttcaaaggggcaatggctgaaaatatggtattgcagtccctcgcagcccatttcggcgtaatgccgcgatattggatgtcggaagctaccgccgaggtggacttcctgttgcaggacaacacctctctgtttccggtcgaggttaagtccggcactcgtttgggtgggaagagcctcggtatttacatcgaccgcttctcgccggaactggcactgcgttactccatgaacaacctgaaaagggatggtgcgattctcaatattcccgtattcctcgcggattggacgaaaaggtggataaaaatataatattagaatcgatacaacaagacttatgaaaacattggaaattgatatggaaaattgcttcggaatatcaaagttcgaacataaattcgatttcgccgatgatacctgcgtattgatttatgcacccaatggaatgatgaaaagttcatttgcccgtacatttgagtgtatttcaaaagatgataagaaatcggttccatgtgaccgaatatatccgcaaagaaaaaccaattgcactgttaaatgcgatgggaaatctattgatccaaagtcaattttcgttgcgaatgctgaatccgacattgctacagataatagaataacgacatttttggcaagtaaagaactgaaagaacgatatgatagtatttaccaagaacttgacaaagtaaaaaatgattttttagcaaaacttaaaagtatatcgaagagtaccgattgcgaaagcgaggttgtctcgacttttcgaacaggagaaacagatactctgttttcatgccttctctctattgaggaggatattcgtaaagcccggtacttttatgatttcagatataacgatgtcttcgataaaaaaggtaatgtcaagaagttcttagacaaacacaaagatttgattcaacaatatttcacggattatcaaaagttattaagtcgttccagattcttcaaaacgaatcgtgagggcgtatcgtttggtacatatcaggcgacggttctgcgggaatcggtagctgatgaagctttctttgctgccaaacatagaataaaattaagttccggagtggaaataacatccgcaggacaattacaggaaatcatcaatgcagagattacaaaagttatcagcgacgataaactaaaatctacattcgaaaaaatagataaggcgatcggtaataacagtgaattgagggcctttaaggctgtattggaaaaagataacacgatcatcccgctattgatggattataatgagttcaagaaacaggtatggtatggatttattcacagattgtgcgatgatgctattgccttaatcaatttctataaaaccaaaacagaaatattaaacgatttaattgccaaagctcaacaagagagccgtacatgggagacgattatagatatatacaacaaaagatttagtgttccttttaccgtagagattaaaaataaagcggatgttatactcaagcaagatacggcaaatctcatattcaaatacaaagatgaacgggctgaagagccgatcgagcaacccaaagaaactctgttgaaaattttgagtagaggagaatgccgggcgttttacacattgcaaatattatttgaaatagaagctcgtaaacattatgcagaagatagtttgctgattctcgacgacattgcagactcttttgattataaaaataagtatgccattatagagtatcttgccgatgtatgtaaggataatagattcaaaataatcctgctgacccacaatttcgatttttatagaacggtcgcatcccgactcggtctgaaaaaatccgtatttatggctatacacgatacaagcggagatataaaatgcaaaataggacaatataggaaagatgtttttcagcacttttcaaaacgagcgaataagaaaagagtattcattgggttattgccttttgtaagaaatatcattgaatattctaaaggtgaacaatcggatgaatacaagtgcttgacaaattgtttgcatattaaggcaggatcgggaactatttcctcagatacaatctgtcggctatataaaacctatattcataattgccagaatctcgttattgattttggtgcgactttaattacagacctgatactgcaagaagctgatgtaatcgttaatgaaaatcctttgattgacgaaatattattggaaaacaaattagttttatccatcgctatccgattacgggcggaacagttgatattgaagctgataaatgacattgacacagatgaaattttgtcgaatcagacacgggagttgatcgacaaatacaaacaatcggatgctccgaatcctgaaatattatcaattttcgataaagtaagcctgatgactccggaaaatatccatgtaaatgcgttcatgtatgagccgctgatcgatatgtctgtaatgcacctcattaaattatataatgacataaagtgtcacatggcagactgatatttatttgtcaaccatttttgtaaaatagtaaaccattacatttcaaatatgtgttctaaacaccggagtccagccgcaatattagccggaaaatatgaatgtcaataaattttttattttgatttatttattgataaataaaaaatattcagtattgtgacattgttatgaataaaatttgagggtagaacaattagagtacaaaatgttatcgcatggcattaaatcgaataaggatttaggtgaaatttgttaaaaattgaatataggacaaaaatgaggttaaaatccgttttaatcccacggacaggtcggatataatcgaaccggggcgcacttatatagggacattcattaaatattataaagggacattcagtaaatagtataaaattagccaactaattcatacacaaaatgttgcgaattagttggcttttt

SEQ ID NO: 5953 - DNA, 597 bp, Unknown
  gut microbiota DNA sequence
cataagggcgcttgactgggagacatacaagtcgatcaggtaggaaactagagcatagtgatccggtggttccgcatggaagggccatcgctcaaaggataaaaggtactccggggataacaggctgatcgctcccaagagctcatatcgacggagcggtttggcacctcgatgtcggctcgtcacatcctggggctggagaaggtcccaagggttcggctgttcgccgattaaagtggcacgcgagctgggttcagaacgtcgtgagacagttcggtccctatctgttgtgggcgcaggatatttgaggagctctgactctagtacgagaggaccgggttggacatacctctggtgaatcagttgtgtcgccagatgcactgctgagtagctatgtatggattggataagcgctgaaagcatctaagcgcgaagccagcttcaagatgagatatccttacagggtcgttcgagatgagaacgttgataggttgcaggtgtatagtcggtgacggcacagccgagcaatactaattacccgaatgtttactttaagcggagtatattcttctttatctttccggtgtaaatgtcaaa

SEQ ID NO: 5954 - DNA, 6600 bp, Unknown
  gut microbiota DNA sequence
ttatacttatttactccggtcttccgacagcctcccgcaaacgcagccctatatcgctcagaacaatctccggtcattacccgaccatcaaggctttctgggtaacggactcagctatcattccggacagctctgttctttaaaagacacactgacaatcgcatccgcctcaaatcttcccctaacgaaaggtcagatactaatcgtaacccataatctcagtccggaaaaaatattttctcctgaagaacaccgatatccggcacaaatagtccttgacggttccaatacagcatttaacattcgtttatgggacaaattttgccgtcagcatcatctcaccctcatcaacacggcagaaaccggaagcttccggtattccctccgataaagttttagtataaacactggcttaatctattattttcagtaaatttgcaatccaataaaatgaaatcaaaatatttcacaaacaatgaacatcgttatcgccggagctggagctgtcggtacacatttggctaagatgcttagccggcaagaacacaacattatgctgatcgatacaaatcaggataaactggaagatctggaaagtcagatcgatatcctctctatcgtcggttcgtgtacttcaatcggtgctctgaaagatgcagaagtcggaaaatgtgatttatatattgctgtaaatcctcaggaagatcagaatatcaattctgctatattggccaaaaaactaggagctaaacgaacgatcgcccgggtcaataacagtgaatatctggaaatcgaaaatgcagaatacctgcgttctatcggtatcgattcactgatctatccggaacggttggcagccgaagaaatcgttgcttcgctaaaacaaatcggttccaggcagatgcatgagttttcggacggacgtctgcaattgctagggataaaactttgggataatgcgcttatcctcaatcataccttgatcaaaatggcagaaatctatggagccgatcagttccggatcgttgccatcaaacgccacaaccataccatcatcccccggggaaacgacgaattgaaatatggagatctggtttttatcgtcacccgaccttcttttattccgaatgttttcgccttatgtggtaaagaacaatttgaaatcaaaaatatagtaattgtcggagcttccagaataggtataaaaacagcctctctgctggaaaaaaattaccatgtcaagattatcgagaaagaccgtgaaaaatgcatccaactggccgacaaactaaaatctacgctggtgattaacggggacggacgagatcttactttactgagggaagaaggtattaaaaatgtagacgcttttatcagtctgacaggttcttcagaaaccaatatattgtcttgcctcttagctaaaaaaatgggggtcaagaaaagtgtagccgaagtggaaaatatcgattacatcgacctggcagaaaatatcggaatcggtacgttaatcaataccaaactgattgcagcctcccatatttaccgttacaccatgaatgtcgatgtccgccatctgaaatttttgactttttcagaagcggaagtattcgaactggaagctcagcctgggtctaaaatcacaaagtattctttacaagatgttcacttcccggacgatgctactgtcgggggagtattccggggcgacgaaaccattatagctaaaggtgatgtgcagatacaggccggggatacggtagtgatctttgctctgcaaaatgctgtcaaaaaagtaattaaatatttccaataaattttttcagaagatgataaactttcgttttatcgccaatctgatgggaaggctgttactgatcgagagtgccttcttattgttatgtgtcctgattgctttaatttatggtgaacacgatgcatcggcttttttttatacctccctgatcaccatgagtgccggtttcctgttgtctaaactgataaaaatcaaagatcgggtactggctaaaaaagacggttatttcatggtaacgatggtatggatcatcttctcccttttcggtagtcttccttatatgatcggaaatacaatcccttcttttgcagatgccttttttgaaaccatgtcggggttcaccacgactggctcttctattctgaatcatgtcgaagcacttcctcatgccaccttattttggcgttctctgacccaatggctgggaggcttagggattattatgctatttatcgccatattaccgagtctcggaatagagggacgggatctttacgtggcagaagtcacagggcctacacacaataaaacttcgtttacctttacttcttctgcccggcaaatgtggattctctacaccatcctgacacttctacaaacccttttgctcctattcggaggaatgaatctcttcgatggtatctgtcatgcattcaccacgatggccaccggaggattctcgaccaaacaaaatagtatcgcttattgggattccgcttatatccaatatgtcatcatcatttttacttttatggcaggtaccaatttcggacttttacatacagctatccgtggtaattggaagaaactgatccaggataatgaatttcaactctatttcatgcttgtcgtgctagccagcgttgtgatcggtataggactttacgtcatcggctgggcagatttcgagaagagtatgcgtgatgccacctttcaggtagtcactttaattacgacaacgggattcgcaaccgccgattatctgctttggccccccttgttaggcttgattctgtttttacttcttttcgtcggagcctcagccggttcaacagccggaggaatgaaagtcgtacgggtttatctgctatttaaaaattcttttgtagagttaaagcgtattattcaccccaatggtattatcaatgtcaaatacaacaataaaagcgttcatcccaatataatgacggggattatggcttttgccattttattcatgattgtatttaccatcgggagtctgatcatgaccatctttacggaagatatcattaccgcctgcagtgccgtcgtcagctcgatgagtaatgtagggcccggattcggcagtgtcggtccgatgttttcctatgcgcacctgaatgattttgccaaattattcctggcttttttaatgctggtaggacgtctggagatctttaccgtcatggtgctgtttacaaaagctttctggagaaaataatcaggctatccgttctaaagtcagatcgggcaaactttgcataaactgaaataattcactctcatccagatagcgtttggtcttgatcaccatcgttacatggtataaatcggcatgttcgagaggctcgtgttgcatatcataactggcaatccgataatttctcaaatgtagttcattggtcacccgcttcaaattttctttatcggtagtggcaaataccagcaatgaactatgttctcccacatttttaaaaataatagtcagaaattcaagtcctattaaagtcaggatcatggcgaatactccgatccaatacatacctcctccgacagccagtccgatacccgaagtcgcccataaaccggcagccgtcgttaagcctcgtacaaactgtttttgaatcagaatagtccctgctccgataaaaccgataccactgaccacctgagcagccactcgactcggatccaaaccataacccggcttagccaagacatcggcaaatccatattgtgatacaatcataatcaaagcacttcccaaagcaaccaaaaagtgcgtcctcaatcccgcctccttagcccgatactcccgatcccagccgatcacccctcccaaaactccagctaacaataaccgaaaaatacagtcccaaagcataaaaacctcctttcaataacctttactatcccattacgttctatctgatcaaacgtttcttttctacgacaaaaagaatgccaaaaaaagctgtcccatatacccggaacagccttcatttcttttctcctctgcttcctgctttcacttcaattctccgattccttgccggatgacttctatccgatcatcggtacaatcgacaactgtcgaggcaacattctgtccaaaaccaccgtcgatcaccaaatccaccaatttctcatatttttcatgaatcaattcaggatcggtcatatattcaaccacctcgtcttcagctttaaccgaagtagtcagtaaaggattacccagttcttcaacaatagacatcacgatataattatccggaatccggataccgatagtcttccgcctattgatcatcacattaggcaatttattagttgccggcaatacaaaagtaaaaggcccgggtagattacgtttcatcaccttaaaaacctcgttatttactttcgcataagcagcgatattcgacagatcccggcaaatcatcgaaaaattggctttctcaggtttgatatttttcaactggcaaacacgctgcacagctttgacattattaatgtcacaaccgatcgcataaattgtatccgtcggatagataataatgccaccggctttcaacacctctacaactttaaggatatcccgggtattaggattatcctcaaataatttgatatacatgaagcgtcaaccgtttacctttttgtaatcttccaggaatttagccagtccactatctgtcaacggatgattcagtaatcctttgatagcagccaacggacaggttgcgacatcggcaccagcctctatacactgaatgatgtgttgcgtattccggatcgaagcagccagaacctgagtatggaaaccataataactgtacatatccacgatcttactaaccaactcgataccatcactacaaatatcgtccagacggcccacaaaaggagatacataggtagctccggcttttgcagccaataaagcctgtcccggagaaaacactaaagtacaattggtacggataccttttccggtaaaatattttatagctttaatcccttcggcaatacaaggaactttgactacaatattcggatgcaaagcggccaattcttctccttcttttatcattccctcataatcggtagcaatcacttcagcactcacatctccctggacgatattacaaatatcgacatagtgttttttacaattctccactcccttaatcccctctttagccatcaacgatggattggtcgtcactccgtccaacactcccaagtcatttgcttctctgatttgatccaaattagccgtgtcaagaaaaaatttcataggttttatttttaaaaagtttgcagtttttataaatcacgtaacaaaattagaatattccgctcaataaagctattatattctgatatttttcaatttataaaaacggggattcggcaaaacaaacctattttttacttcaggtgttataaaatacttcagaaaaaactctaatccgacaaacaaatattttatctatacacaaaccattcggtaaagtattaccgtatatactcttaacatgatgtcgaaaaaaatatcatatcaaagccaacgggattgtctccatgtatgcctgatcctgatcatcctgttcagtttcgcttattatgaagctgaacgaaaaaattcagtgtctcctccggaagaaaatcagataactacgactgattcgatcactccttccagatttgtcaacagttattgaatattattccctaacttttaaagcttcgaaaggattacgtatgatagttttccagctacttatacaaacaagcaaagcaatccagaccaatacccccgacacggtatatatattttatctcatacccaaaagggatttctttagaacgtctttccccttgtaccataaaaaggacgacaaaattactgacggaaataaataaaatcaataatccgatacaactcataaatagaatcccaaccatcccggctccggttttaaaatcaaaatcggctaaagtcgacaaatgaatagaagttaaaggttccagctcactccctgtttgtatatttcaaggtattataccccttttcgattgacccggttagatttttctactaccttctctaatggacacctttcctaaatttcagataaataaagaactccaagccatcataatcagctacatccggagtcatggattccagatattcaaaattaaaatgactgttctgtggaagatcctcaatcacagcaatcacctgacaagggactcgttcactatcattcaaaaattgtccggtaggatcgacatttttgacaaatggaattccatacgatagtgtttctaaaagggagcttaacatgaaggggcatacccgatgcatttacctttcctccttcttctttgccagtatccgtttggtatagccagtataatcagataaaaaaaagcagtcacaattcacatcatgactgctttcataattcggcgccaacctactctcccaccataaagcagtaccatcggcactcaggggcttaacttctctg

SEQ ID NO: 5955 - DNA, 186 bp, Unknown
  gut microbiota DNA sequence
gcagtaccatcggcactcaggggcttaacttctctgttcggaatggaaagaggtggatccccccggttatagacaccttttaatatcttcaggattttatcctgtttcattacaattccttcagttcccgttacatatcccaacaacccacagcctccgctgagaatttgacatttacaccggaaa

SEQ ID NO: 5956 - DNA, 11738 bp, Unknown
  gut microbiota DNA sequence
cgatcacggggacggggtaattgtgcgaaagtttcgcacaattgccccgtccccgtgattacaataaactatttaccaaggattgattttttcatccgggcaatatcggtcagatagtcctgaagatcctgttcatgctcttcctcctcggccagaatttttttcgccatatcacaggtcgtaaaatctttaccatttgtaaagtcggcaatttcctgatacctcaatatggcacaacgctcggaagccacattgtcattcagcagacaaacagaatcaaagtcttgtggagtatcgtatttgcatcttgccagttccgaccacttttggggatccaaaacaggaacgccttccagttcgatgatacgtttagcaatcatttcggcatgcttgcgttcttcattggcgtgttcttcaaactcactctgtacattcggacgcatagcaccttcgacaaccaaagcaccgatccaatactgatagtatgccaaccattcttcagccaatgctgcgtttaactgtgaaatcaagctttccacatccaattttccttgcaggatttttacactctctttagccataattttagtgtttagttcattttgttctttttatacgtactacggccaaagaagttgtttgtcgtccgatagaccgggagatctattcggaaaccttcatcaaaatattcaggatcgttataatgaggcaggtatagaaatcatatccccgcattacagctatgcaggagggcaacgaatctaccctccctaaatccggtcagttgtaataccctaattgttccaatactttttcagccttttccagcttctttttttgctgtaaatgatccggcaggcctgaggttacattcgacttcagatattttgcgggcaacgtttcctgataaaaccggatagtcatatccgacttattggtaaacattccatcggcccggttttgtgccggctgtccggctttcaatccggtatattcctccatctgctccaccgtatcgaaactatagggatgaatggccatacccgaacggtaaatcaattcaccgtttccgggagacaaaagttcatcataatgattaggtgcccctgcaatactaggccccataatcacagccccgttttctataccgaaattgattttggcagcatattgctcgggggtattttgttttaagtcagaaacgtcattccctaaccacaataaaaagcaggtaggaatccgtcgtgggaaagcttctttcagttttaccaggctctcgtccgagaaagtctgcaaaatcacccgggccgacgaatttgcaatagctactttgcccgcggttaccggaatttgtttcatttgtccggcatccggatgataccaacccagtctttgtaattctatcaccaaatctttttccatacccggaaacaaatgaggttctttggtttcgggataaataccgggacgattaccgttatcgtcaggatctttttcgtaacgggtgtgctttctcccctgcccgtcgatatcgtacactctttttcctgcccggtctctgactatgcgatagccctcggctatacgcacgacatcttccaaggtcagtatgtctaagccttcgaatgcttttctggcccgatccggattcgctttgttaaaccacgaaccggcatccagttgtctcagctcttccagggtaaactccgaaacaggcgagtcggcccgatccggaaatacggtttcaacattcgtcgtacgcctcagattgacatcgtgcagagcaatcaataccccatctttcgttcgttgtaaatccagttccaggtaatcggctccgatattacgggcccaacgcatggcggcttcggtttcctccggagcccaatacgtcgtaccccgatgggctataacaatattccggggtaaataatccaaaacttcacgggattcaggaggtaaagtctttacttttacctctccgggcaatatcgttttcccggtcgccagcatcaacaatacgggtaagagcattttcatcggtattattcttttattaataaggcaaaaataaagaataaagctgatatcccctcattaaaagcccacgggtttgttacaaaaccatgaagatttggcagacctccaaacagattttatgacaatttttcctttattctgccaatacaacataacacactcattacaagtaatttaatacacaaagcatctctttcttctttcttatttattatcaataaattacacataatctacaaaaaaaatacgtatttccccacgaattgcggcataccgattgcaatctcctaaaacgaacacggtttaaaataccggttctacccaatgaatatgttaaacttaaataataggaggattaaattatggtacctgtaagaagaacacagacttggttaccggatatcttcaatgatttcttcgataacacgtggatggaaaaaaccaatgctactgcaccggcaatcaatattcgggaaaccgaaacaaattacgaaatcgaagttgctgcaccgggtatgacccgtgaggattttaccatcaaaatcgaaaacaacaaccagttggtggtcagtatggaaaagaaacacgaacagaaagaagataaaaaagaagagggacgctatctgagacgtgaattttcatatacccgcttccagcaagcgatgatcttgcccgatgatgtggtaaaagagaagattcaggccaggatggaacacggtgtattgaccatcgatatcccgaaacaaacggtaattccggaagaaaaaaacggacgaacgattgaaatcaaataataaaaaatcccggattgtttccgggattttttattacaaatattctttgatatcctgcaactccaccaatttatttacaatcgcataaatagtcaggcctgccggactatgaatctgtaacttacgggctatattccgtcggtgggtaatcaccgtatgggccgacaaatacaaggcatctgcaatttctttattagtcatccctttgacgacacaagtaataatttctttttcccggctactcaacacttcctgtccggctaattcttcttctgtctcttccccgggaacattcaacaggcgattcaatttttccctgatcgtatccgcatcgtcatatatagtcagagactcatcgtaattccgcaacacaccctgatcggccaccgaacacatcaaagcaatacatttcacacccgcattctgaggcgtttctttaaatttacgcacatcgaaatatccggtaaatgacggatttacaatcagaatttcaggcttatgaaatcgtacacattcatccaacgattcttcggagactaactctatcggaagaattttcaatccctgaatccgcttcaagaccaatgccaatccactacggacgatcatcgatgtctcggctatagcaatctttaaaacttcatcttcctgcattttcctgtactttcttttccaattctgcaatcagaggaacaaacatataatcttctacccggcaatgtgaacacaaatctttttcacaagaataaatatcgaacaatacggtattcaacagattattattcgccctggaaggataatatttgacaataatattcttgagttcggtcagtttagtctcgatctggttatgacgtgcaacaaaaacaccgatattatatcgcccggtatcctcaccctgcaatagtgcattcacatatttaaaaaccacctcattctcatatcccatatgtgcccgcacctcgttgacatattcatcgtaaaatttcaaaatcagaaaagcaacgtcatcctgcgaacaatcgatggcatctattaacctccgccggatcaccggcagattataatccagaaaataagaatgagcctgcttcaaatattccatcagggcttcaaccgatatctggtcatgaaactcttcggacacacaacattccccatccataaaattcacaacagccagaaaagtacccgtatgcaccccctgacgttcacatacctgctgtacagtctggtcaccgaatcccaaggataacccgaaccgactcatcaccagtaacaggttataattctcacaaatcagatcactcatcttatctgtaccggaatattttaaacgcttattcattctaaataaatttaatcatgcaaaataaacattttatccgattccaaccaatccctatttttaggtatttttcaataatcagcccattagtttaaccacaattaaaattttttcgacataataagccaccccatttctcttccgctccgtaaacagaacagtgatctgcacagaatagataaacagttgacttataataactttaaatcactatttttatgaaaaaaacaggtattttttacggttccaccaacggtgataccgaatctgtagcgaataaaatcgctattcaattggggatcgggaaagaagatgtacacaatgtcgccgatacaacgccccatgccgtacaaccctacgaagtattgttattaggttgttcgacctggggagtcggggaaatgcaggacgactggaatgatttccttttcaaactcaaagatatggatctgaaaaacaaaaccgtcgccttgttcggatgcggagattcggtcagttttagttccagtttttgtgatgctttgggtgtcatctatcacgagcttcagcacaccggttgtacttttacgggagaagtagacctctctgaatatcgtttcgatggttccggtggagttatcgacggtaaatttgtcgggctcccgatcgacgataataatgaatcggaccgaaccgataccagaataaaaaaatggacagaccgcttaaaagtaacggttttatcctgaagtcagcctgctatgaggctacgatcggtcgctttccgaagtcaccgatcgtatatgttccaattccgtacaccaaaatctttttttacaggctgtgtgaaaacaatctttaaaacaacttaaagtgtcaagtatataaagtcttttttatacatttgcattcaataaaaaagattccgatgaaaatacaacgacttatatttctgattttcacaacgatcgcagtgttcgcctgtgtgaccgaccatccttcaccccaggtattgaaaatttccgaaaacaccctccggttttccggtaacggcggtgcatggaaactaacggtcaacagtaactgtgaatggaaaatcacaggaggggatacctggtgtaaaaccgataaactggaaggcagtaaaacggccgaaatattaattcaggtagataccaacgacaccaaagccgaaagagatacccgttttacttttacctgcgaccagaaagaggctgaagtacatgtatatcaggatacaagcggcaacaactattattatgaactgcccgttatttttcatttattctatgcggatgaaaccgacagtttgcaaaatgcttccggagaattcttcaccaaaatgatcgacgaatgtaaccgtttatacaatacaggtaccaatagtattcctatgaacctgaaattggtggcggctaccgaagatcctgccggtaatcccctggccgaacccggcatcgaacgcatcctgaaaaccccggcagcagtcatgagctgtgaggatttcatggctcaaagcaatacttcgttcaattcattcgtttgggacctgaataaatacatcaatgtatttgtatatacctttaaagaaaagaccacggcaggcatctcccacctcccatacaccccccgtgaaaacagtcttccgggcctgactgcgaataaccactatttctcgaacatgccttcctatacccattgtatttctatcaacaatacctatatcaccgaggataacatttatgtgactttagctcatgagctgggacactatctggggttattccacgtattctccgagcaagggtgcaacgaaacggattattgtgaggatacccccaattatgaccgtaatacctataccgaatggctgaatacactttcccaaccttacccacaggaagtattcacaagaaacggatgtgaaggagaaagttttatatctaccaatatcatggactatttctgttcataccaaaaccggtttaccgccaatcaatacagccgggtacgccatgtattggaaaatagtcccctgatccccggaccgaaaaacatcattacgacgaaagtggcgcgggaagatatcgttcctgcagccagagcaatagagtagccttctgttcttattttccttttttccacaactgccagctattgatcatattttgccacagcacatacgaagcaggagcgatggaggaaagagggttcagatatacctgtgccatccagatagccaggatggtatttttctgtccgagtccctgccctcccgaaacaggatcgccataccgccgtccgatacgcctgcccaggataaattgcaggacacagatcaccaatgctaatgcggccatccaccactcttccgtaatatcggcattctcctgatacacgataaaataaaccgttttcccggttacaatagtcaatcccaacgcccaaagataaaaagaaagaatttgcagttttttcaactgccggtggagagacggcaaagctttctccaaaaacagggccaatgcaaaaggtaatatcaggacaggcatgacttgccggcaaatgaaaagtacggaattccagaaggtcatatcgctatgttctcccaacagagtaaagatcaagggagatacgacagctaccaccaaactactcatcaaagtatatgccgccagacaggcgacacttcctccgagcattcccgtgatcactgcagcagccgttgcagtcggcgccaaaacacaaatcagacctccctgtgccacgaccggatcgaaccacaccaatccaccgtaaaccaccaaacccccgacaacctgaacagccagcaaccacagatgcaaaccactgaacttcaaatcgcgaaaagacaatttacaatatgtaataaacaacatactgaaaatcaggtagggcgttaaaaaagccaactgttgaaagaattcataaaaaaatgctcccgacaacatggccagcggaagcatccaggtctttatcttttgtaacacgacaaacggatttaggaattaaaccttttctcataccattccacaaaagccccgttcaccagacggtttccgcccggagtgggataatcacccgaaaaataccaatccccggaatgattcggacaagcctggtgtaaatgatctatcgtctgatataccacagctatttccgaagggcaattctcaggggtgatcatttcggcaatcttagcagaaatctcttcgtctgtaaaaggagcataaatttctttgacataattcacgaccttttctttgggtaatgctatctgagccttacttttggtatacacctcatcgatcacccgttctaatcccctctctttcagcaaagcgatagcagcatgaaaagcgataaactctcccatcttcgacatatcgatgccataacaatccggataacggatttgaggcgaagaggagacaatcacaatctttttgggtttctgccggcaaaggattttgattatactttgcctcaaggtagtaccccggacaatactatcgtcgataacgacgatcgaatccaccccttcccgtactgtcccataagtggtgtcgtacacgtgggcggctaaatcattccggctatttccttcagcgataaaagtcctcagtttgatatccttgatggccaacttctcggtccggatctgccgcgacaggatttcccggatctgcgcgctgctcagttgtccgttccgggcacagatctcttcactcttctgccggtccaaccaggcttccaagccctgcatcatcccataataagcgatttctgccgtattagggataaaagaaaagatagtgtgatccacatcatatccgacacttttcaaaatattttcggtcagcagacgccccagttccttccgttcgttataaatatcgcaatcacttccccgggagaaataaatccgttcaaaagaacagggagttacctcaacggccggatggatcgtacttactttcatattaccgttccgtttcacaacgatactctgtccgggcatcaattctttcacctctgttaccggcaaatcgaaaaccgtctgaataaccggacgctcggaagcaacgacgatcacctcatcgctggcataataaaaagcaggccggattccatgaggatcccggaaagcgaaaagatccccgcttcccaacaaaccggtaatgacatatcctccgtcccagcgtgccgaagcttcctgcaaaatatgttcgatatcgatattctcttcgatcgcatcgttcatcgcctgaccggccaggccctcggccttgaatctccggtagaggtgttccacctcataatccagtaaataccctaattgctccagtataataaaagtatccgcattatgccggggatgttgtccccgttccacgatatactgcaatatttcgtccacattggtcaggttgaaatttccggccaacgaaagattccggctccgccaattattacgacgcaaaaaaggatgcaggtatgaaatccccgaacgccccgttgtactgtaacgcaaatgccccatgtacatctcgccgataaaaggcaactcctcgtcgggcacctccggttctatcctccggcattcggtaatcgcccggtggacagcagaaaaaatatcctgaatagcccccgttccttccgccctctcccggaagatatattcttcgcccggacgggcattcaactttaccgaagccattccggctccttcctgtccacggttgtgctgtttttccatcagcaggtaaagcttattcatcccccaaaaaacatctccgtattttttccggtagtattccaaaggtttcaacaacctcaccatggcaatcccacattcatgtttaattgcgtcactcataacatttccattcctgttcgttatctcaaaaacaaaagttcccgatatttcggcaacgtccacatttcattatcgacaatcaattccaatttatcgatatgagcccggatctcatcgaaggtcggggctatccggtcgtgataagcaatcgctttttcccgtatatcccccatcttattgatcactttccgggtttccaccattgcctccacctgggtctgaatacaggtcatatgccgggctatcttctctatcaattctaagtcttgttcggccaaaaccctggctttctctttcgggaaaatcgccataaacttgcttaccttatccagcaacatactctggtaacgcgaagccaccggtaagatatgattcatagccaaatctcccaatatacgggcttcgatctgtacctttttggtatatgtctcccatttcacttcagcccgggcatgcagttccacttcgttcaatacaccggtttctccgaacatccggatgttctcctgggctaacagacgatcgaagatcaggggaacgctggtctcacaatccaacccacgccgggcagcttcagccttccattcatcactatatccattcccctcgaaccgaatcggtttgcatgccaccgtataccgttttaacaccgtaaagatagcattttctttcgtatgtccttcagcgatgagtttatcaatatcagctttaaactcttttaactgataagccactgccgtattcaaagtaatcatggcatcggcacaattatccgaggaaccgacggcacggaattcgaaccggttaccggtaaatgcaaacggtgatgtccggttacgatcggtcgtatccctgaatagttcagggatatgcgtaatcccgtccatcctgaacccggtctttttatccaactgaatcgcttcatccgattggctgaattcgattttatccagaatagccgacaactgagtccccaggaataccgacaaaatagcaggaggagcttcgttagctcctaaacgatgggcattgcctgcactcatcacagaggctttcaataagccattccgtcgatagaccgccatcaggatattcaccagaaaggtgataaattgcagattctctgtagcagaacgtcccggagataacagattcactcccgtatcggtacccaaagaccagttgttgtgcttgcccgaaccgttgatccccttgaaaggtttttcgtgcaaaagtacccggaaacaatgacgcctcgccaccactttcatggtagacatcaacaactgattgtggtcattagccagattggtctcttcgaaaaccggagcaagttcgaactggttcggagccacctcattgtggcgggtttttaccgggattcccaattgctgacattcgtattccagatccttcataaaagcaatcacccgagtcggtatagaaccgaaataatgatcatccagctgttgatttttagcactttcatgtcccatcatcgtccggccggtaagtaccagatcaggacgggccgcccacaggctttcgtctaccaaaaaatattcctgctcccatcccagataagagaacactttttccaccttcgggtcgaaataccggcaaatatccacagccgcacggtttactgcctcgagagccctcaaaagaggggccttgaaatccagggcctcccccgtataagcaataaagatagtcggtatacaaagggtcgtatcgacaataaaggccggagaactaggatcccaggcactatatccccgggcttcaaatgtattgcgaagaccaccgctcggaaaactggaagcatccggttcttgttgtatcagcaactttcctgtgaactcttccaacactcctccttcgtgatcggcctcgataaaagcatcgtgtttctccgcagttcctcccgtcaagggttgaaaccaatgcgtataatgagtagctcccatatcctgagcccactgtttcattccggcagccacacaatcggctgtttcccgatccaacgggctcccgttcttcatcgtattcatcaacgtttcgaaacaagctttcggcaaatatttccgcattttgtcccgatcaaaaacatattttccgaaatactctgccggacgttcggcaggtgcttttacttctacggcttttcttccgatcgcctcttcaaccattttaaatctaagtgttgtcataatatttattgtttaggtggttctttatctctgtatacatcatcggccaacggcatcttacacccttcccacagcagacaggaccatttcgccgggtaacgccggatctgcaccactatccgcagcctcgtcaatatagtctatgttcttacttttattcgagagaatatctccgaccataacgttcaactgtgatagtgtaatcttcataagcctgaaattttaaatcaaacgataagtgccggaagtcttttcccggcagaaggaaattgaaaagtgtctttagccgttcccacaatctgacattccgggaaaaaagagacgatttgccgatattgtttcaataaaaacatctgttttcaatattcaatctaaaaaaacaaggggatatatacgctacaaaaagtatttttccaaacccatttcttattttcattaaaacc

SEQ ID NO: 5957 - DNA, 1501 bp, Unknown
  gut microbiota DNA sequence
agaatagcgaatggtaatccgttgcacgtcgatggtgtcattacctactatgcgtttcttgatgtatgccttaaagtactggttttcttccagtcctaaggtgatgtaacgcacaattccgtcttgcagttcttctgtttttttgacgttaaccgttacataagccaatgcttcgcctttaggcataataaattcttcgggtagggtgaaatctttcccttcttcaacggttccccctatcgttttaacgacaaaaggacgatcctcttccgaaacgttcccgaacaatcgaacaggaattctcacctgtgcatattctcccaccacggaggccaaggagttatcgcgagtggtatcgctataattgtaaataaccgaagccccctcatgggtagtacttgtataataagcaaaataaattcccgaagtgctatccgactctccttcatagtagatcgcttcgttttccccacagccagcgagcagcaaggaataaccaatgataataaataatagttttttcatgatactctaatttctatatttgatttcactatccggcaaattcggaacatacttagcattactcattgtgatgttggtattggaggaacccgattgaatttttgcagtgtttgtacgcttatagtagaaccataactgtccttcacacagaaactctttggagtattctttggccaattcgccctctaatcctgtcgtcacctgcacctgattaccccttctcagacggtgtgcgttcaggtaatcgtattgtgtctgctcttccgtggcacattcagcagcaatcagatacatctcgctcacgcgaatcaacggcatcagcttaccgtataccaggtcggtgtctgcaattttacgcaaccgcacattcatcagcagattcgtttctcctatgccattggaagcttcccaccaattataccgatagtcactcaacacatcatcgccgaacaggttctgtactcgctgagccgccggtatcagtttattggaagaactcgcattagaggagttgaaataggtgttgtacaaatcttccttgttttcattcaacagagagaacaacacttccgatgaaaacgaacggtccggattggagtagtcggtagctgcagcccgtgttaccgccggatataaagtttccgcttccggattttctataatcattttagcatatttcaatgcctctgtcttgttgccggcccaaagataaaccctggctttcaaagccaccactgcataataattgagccttaatccgcgaaaacggtaagtgttcccatcattatcatggtcatcatcattgacagccatcagcatcccttcactcactgccggatcccaatttttcaagatactttccgcttctgccaaatccgtcagtactttttcgatcacctcgttgcctgtcagcataccgggagcggacacggaaatcgtttctttgtaagggatagcttttgaatcaagctgggtg

SEQ ID NO: 5958 - DNA, 154 bp, Unknown
  gut microbiota DNA sequence
gaatcgtctgtagagaagtaaagctgccacttgtctgtcctcccgtccatcggataccagatggctaaggaaacataccttttgagagcttttgcatataccctcaatccgtatagctttcctttgttcacctcgtattccttgcaccgggtca

SEQ ID NO: 5959 - DNA, 4008 bp, Unknown
  gut microbiota DNA sequence
ctacttttgtagtgtattagtatattaatacactatgaaaatttatcaatcttaatattgaaaagatgatttatattgaaaacttggattttggttatcaaaaaaaacgggaagttttttccggattgaatctttcattgaccggggggcatatttatggcctgcttggaaagaatggagccggtaagactactttattaaaattgatcggtggtttattgtttcctttgcgaggccggatagaggtgtgtgatgctattccccggttgaggaaaccttcttttttatccgatatttttttcattcctgaagaaatctgtttgccggatatgaagatgaaagattattttcctttgatctgtcggttttatccgaagtttgacgaagaattattgttccatgccatggaaatttttgaagtatccgaatcggataaaatgggacaaatgtcttatggacagcgtaagaaggctttgatcagtctggggatagcttgtaatacccggttgttgatgatggacgaaccaaccaatggattggatatcccttcaaaaagtcagttcaggcgattgattgcgtcggtggcttcagaggaacgttgtgttgtgatttctactcatcaggtccgggatctggaaaatttgatcgatgctttggtcattatcgagaagagccggatcttggtcaatacaacggtagaacagattacggatcattttgtgttcaggcagctgagagagggagaaacggctttatttgccgaagaatctttaagaggccgctggggaatggtacccaacttacagcaggaagatagcaaactggatatggaattgttttttaatgcggttttggaacatccggcggagattgaaaaagttttgaaataggaaaatgtataaaatgatagctatgaatgaagtatttgaataccggcgttttggagcattggcccggaagtattaccgggaaaataggaggttaggaattattttcctagggatcataggaataatcacttttttgtgtttgtgtaaatttaatccttttctgagggaatacacgcaagtagaaaatccggcggaggtatctgattttattcaatattacaaaggggtatatcgtcagctgttctggggactatatggattgtttgctttggttgtcgctctgcattctttgcgtgattttgttgtaaaagataaaatattgaatacgctgttgttaccggcttctgtctttgaaaaatatgtgctggctttcctgaattccacggtcgtattacttgtcgtttatttgttgatgttttatgctttggcttcggttacgagtagttataaatttacaggactcaatcgattggagtatgtaagcgggagtttcgggaatcaggtccctgccatgactcccggacaggaagtggttcataccgaaatcgggaatgtgttcgacttttcggagggtgggtacctgatgaatatttcgtatgatcagaaagaactgaactatggaaagctgaccaatggcattgtagtgaatatggttgtcatttggtttttatatgtaatgtcggtaggcatgtggggatcggtcactttccggaagcatccttttatattgacttttttggttcatgtgatatttttattggccttggtagccgtttccgtctggttggggaataagttgttcggggcagagccacaaatgaaacccgatgagttgagtttttacggaggagaagtcttgccagatttaccttctttccgctggttactggtgttctatattttcccactgacctatcaggcagtaatttggataaaattgaaaacgaaacaagttcaataattgaaaagacaatgaaaaaatatgatttaattttagcagtcctttatattttaccggtgattttgggatttatcattttttataacttaaaaaatccaagtgatcaggagatggaaaaagccggggcttatatcgaaaaattgtataaacagccggtaagtaacgttgtgatctataatacagatatggcagtcagggtgattgagtcgccggaaaaggtaaagcagggatttaaaataaccggtgtgataccgttccggcaggttactggttttcgggtggccggagacactttatatgtaagtggccccgaggaatattcgggtgtgatatgtcagttatgggtatctcccggtgtaaaagtggatacattgaatgcaccgaaggtgtgtatctcaaagtcaaaggttaaagacaatattactgattatggactttaaggagacgcaggcgatttatttgcagattgtggatttggtttgtgatcacattgtcacaggtaaatggaaagctcaggaacggattccgtctgttcgtgaattgggggtacaattggaggtaaatccgaatactgtgatgcgtgcctacgactatttgcaggcccgggagatcatttgtaacaagcggggagtcggcttttttgtgacagaaggagcttcgaagcagattactgaatccagacgtgaagagtttgtcgggacggaactgcccgatatcttccggcgaatgagtttattggctattccgatcgaattggtcgtggtcgagtatgaaaaatataaagcaggcaacaattcttagaaaaatgcgttaattttacggttcgataatcggaacgtaaaatggaaaaacggaaaatgtataatgcctatgcggatttggagggatacaattgtttcggttgttcgccgacaaatccgtatggactgaaatgtaagtttgtggatgaaggtgaatatatcacctgccattgggtgccctcggagaattatcagggcttttttcatgttttgcatggagggatacaggcgacactgatcgatgagattgccagttgggcaatcttttctcatgaaaaaacagctggtgtgacaacagaaatgcaggtgaaataccgacggtctgtccggacagatcagggagaaatttggttgagagccaaggtgaccgaagtggcaagacggttggtgaccgctcacgtggagcttttcaatgaaaaaaatgagttggcgaccgaggctgatgtggtgtatatgatttacccggaagaagtggcgcggaaaaaattggattggcctggagcggaagctttttataagcctgtagaagaagaggaataaataatagggattaaagataaatttatgaagtataaaaatgtcgtgtgggattggaacggtactttattgaatgatgtgaaagtcggtgtgaatacgttgaacgatatgctcgggagaagaggtttgccattgctttctgtagaagattataaagaaaaattcggttttccggtcatagacttttatgatcgggtcggattcgatatggagaaagaatcttttcatgaactgtctgtcgattttgtcgagacctatgataaatatgccggcgaagtgggattgaacgaaggagtaagagaggtgctggcaggcatacagcaaaccggtgtaaaacagtatgtcctgtctgctcttcgggaagatttgttgcaacagatgctccggcattttcagatcgattcccgttttgaccgcgcttgtggggcgaatgatatttatgcggccggcaagatcgaacggggacagcaaatgttacagacttgtccgattgtacccgaagacaccctgatggttggagatactattcacgatgccgaggtggccgacgctttggggttcgattgtatcttatttgcaggagggcataacaatgaagaacgcctgcagaaaaaagctcctgtcattcatcggatgagggaattgctgacctgtgtttgatgagttattagggggatagccgtatagcggtaattgccttgatgctgaatttcttgcaacttttgtgccccctgtaattattaaaatctggagtaattgcttcctaaagttttttgaactctgccggcgcgtttttacagcagcactcgtggctgtaaaa

SEQ ID NO: 5960 - DNA, 2819 bp, Unknown
  gut microbiota DNA sequence
agaacaacgacttatataaaatactactatcatgatacaatttcacatcgaggccccggacaaagggctggaggccgctttacaagacaagatcgataatctgacaaagccgaaaggctcattgggaacgctcgaggcgctcgccctgcaagtgggattgatccagcaaaccttatcgcctgtcttgcgtcatcccgtgaacgtaatctatgcatcggatcacggcatcgccgacgagggcgtaagcaaatctcccaaggaggtaactcgccaagtgatccataatttcttgaacggaggagcgggagtttgctaccttgcccgccagcatgggtttgagttgaagatcgtggatggcggcgtggatttcgatttccccgttatcccccaacttatcgaccgcaaggtgcgcaagggaggaacccgtaactttcttcacgaggcggccatgaccgtggaggaaatggagaaagcccttcaatacggagccgatatcgtgacggattgttacaacgaaggctgtaacgtgatcagtttcggagagatgggtatcgggaatacggcggcttccagcatgtggatgacttgcctcacacaaatcccattgatcgactgtgtgggggccggtagtggactggacagcgagggcgtacggcataaatacaacgtactgaaacgctcgttggagaattataagggggatggaagcgccttggatgtaatgcgctacttcggagggtatgagatggttatggctgtaggaggcatgttgcgtgccgccgaactgaagatgattatcctcgtggatggttttatcatgacgaattgcgtattggtggcttcccgcttatatccggagatgcaatcgtattgcgtattcgggcattgcggcgacgaggccgggcataaacggatactggatttcttgggggcaaaagcattgctcgatctagggctacggctgggagaaggttccggctcggtatgcgcttacccgatactcgactccgccgttcgcatgatcaacgagatgtatagtttcaagcaagcggcaatcaccaaatatttctgatatgttgcggatactcgctgcgtttatattctttactcggttaccgttctggcggttggcggaggttccggcggcctgtttcaagaatatcgtgagccattgggcgttggtcggttggctgacggctggtttgtcggtattggtattgtacgctacctccttgattcttccgccatccgtggcgatcttatgcgccatgattacccgattgctgataaccggctgcctgcatgaggacgggctggcggatttcttcgacggtttcggcggcggcacgagccgggaacgcatattggcgatcatgaaagactcgcatataggtagctatggggtaatcggactgattttctacttcggactattctacctactagtaagcagtctcccgatcgagctagcgggatgtgccatactggctggagatcctttttgcaaaggcgtctccagcatgatcatcaatcgcctgccttacgcgaggaaagaggaggaagccaagaacaagaccgtatatagccgaatgacctctcgagaatatgtatttagcatcatttgtgctttcttaccattattatggcttccccaacctgtttacttactagcgggtatattcccggttatcacttggtatttccttacctctttcatgaagagaaagatacaaggatatacgggagactgctgtggagcgacttttcttcttagtgagttaagcttctatatgggtttcgtgatcatctatcaaactatataattatggagatttatttaatcagacatacctctgtcgatgttcccgccggctacgcctacgggcaaaccgatgttccattgaaaccgaccttcgaggaagaggcggaagaggtaaaaaaaggcttgagcgatcatacgttcgataaggtttggacaagtccccttacccgctgcgtgcgcttagctaattattgcggctttccggaggcggagagagaagaccgtatcaaggaggtgaatttcggggagtgggaaatgaagtcatggaatgagctatcctccgatccccgctcagaggcttggtttaaggattgggttaataacccgactccaaacggtgaatccctacaagatcaatacgaccgggttagcgacttcttgaatgagcttcgcaaaagcgggctgcaaaaggtatgcctgttcgcgcatggcggggtattgacttgtgcccgggtctacgctggcgaatatcctttgcaagacgcttttaagaacgtaccctcttacggggctatcgtaaaattagtgctggattaaccaaaatccggcacatttcgaaaggattagatgcggccacgccacatctctacaacggctggtgtatataacagaaaaaggagccaatctttcgactgactcctttcacctaagacggcggctacctactcttccactgttacgcagtaccatcggcgtgacgaggcttaacttctctgttcggaatgggaagaggtggatccctcgtgctatagccaccttaatatcattatcaagattttgaccggacatcaatccgaagagactcgcttcgccttatcgtcttaaaatatatcaaccttcactgtgaggaaagtcccgggccattagtaccactcggctcggacgtcgccgcccttacacctgtggcctatcaaggtcatcgtctataaccacccttgagggagatctaatcttgaggccggcttcgtacttagatgctttcagcacttatccgatc

SEQ ID NO: 5961 - DNA, 32699 bp, Unknown
  gut microbiota DNA sequence
tttttttcggaaccgccgtagaagaaagcttctgcaggcttcatccgcaaaagatgaaaaacacatcagtcaaaatgtttcagaacgtccgcttcgtttcggaaagcggctgcaaaggtaaggactttttcattacttccaaacttttcaaaagaaatttttgaagttttttttcaaaccccgaccagggcaatattctgaagaactctgcgcaacccaaaactctggaaaccaacccttcaccaccactcacctgcgctattggtttaacccctcattccctgattgcggctgcaaatatagaacaatttataccccatctccaaattttttatcaactttttttcaaaaaaaatgaatatttcacataaaagcctaacaatcaacacttataaaataaggagcagaaattcaaactctacctcaagttttacttttaaacctcaaatacaccatcgaacgaaccgaaacagttcatactatccaaagtgaaacgtttttaagttcccccaaatgcagagtaaatctcaggaccacattaattcaacttacaatcaatgatttacatattctactctatcataaaatctcctatcagagcaatctttagaaccgatgaagaatttgaaaaccgaaatagcaaattttttcagaagtttaaaggagcgtttcgtaatattgaaacgaaaaaacaatccccttcgaaaaatacccccctaaacttcttttcagaactttaagatgcacttttcgaaggggacaaccttcgaattctaaaactatatttatacttagatcatcgtactgatcatgaaagttgcagcaacagcaacaatagcatacaactcagggaatacggccaaaatcagagttttaccgaacacatcgtatcctgaaccgataccgatgataccattagcacatacctggccctgacggatggcagaaaacagacataccaatccaagtcctaagccggcaccaaaaacagcagcagcctgtaaccaggtaataccggctaccaatacattcttcagcaagaaaaagcccaggaatccataaagtccctgtgtaccgggaagtgcacacaataccatataattaccaaaagcttcgtcattcttcttcagtgcaccgatcgtagcattaccaccgatagttacgccataagcactaccaattccggacagtcctaacatcaatccaaccccaatataagctaaaataatctcattcatgatttctattttttaattgtttgttaattataatttttcaattcttttttggatataaatctataatagcaggtttcaattacttcttttcttataaggccggtatttcttaccgcctccttcaaaacctgcattcttataaaactcaacaaaagtcagacgcatcgggtgtacaaaggaacccaatccagccataaacaagttcacactatgtccgaacaacaggatgatcaacatgaccaactgttttactcccggcacatccggactcatattcattgccagatcattgaacaccaatcccaataccgcgctcgaaatacccaaggcaaacaaacggatataagaaagtgtatctcctaaaaggccggtgaccatattataagaatcccataaaccggcaccgatattaatgaatacattccgacgaacgttattgaatacaaagatcagtaatcctgctacagcaccgacaacatacatcggaacatccattgcatatcccttggtcgacaaccaataacagattccttctcccagaatcaacacgagccatccgattgtcgagagagctgctgcaaaaccatgttgtttccactggttagccactttcaggaacataccgaagataatttgtacggctccgacgatcaaagccaggttgaacagctgttgtgaatccaacatataagctttcatcttctccatccagggtacctgtacatccagcaattggataccgaagaaagtacctccgacaattcccatgatcacagtagaaatacccagccattgtgctaacgacagaatcggtttaattgccggcttcgccttaaacttataaatggtgatacccaacaacagcagcaatccatatccggcatctcccagacaaaaaccgaaaaacagcacaaaaaacggtgcaaaaaacggtgtcaagtcgatttcccgataattaggcagcgaatacagttcgccgataaattcaaacaaacgggcaaacttgttattcttcagcagaataggaggattatcctgctctgtcggaatctcgagttcataagcaactcctttatctgccagccagtggtccgtatcggctgcaatagcttccggcacccaaccttccagagcaatcaccttatcttcaagtaaagtcattgcagcatccttcacttttaaagtatccgtatcttcacaaatccgtactttcaaatccttcaggtattccaccgaaaaagccgcgatcttcttcaagttttcggcaaccgtttctttttcggttttcaacccggcgacctgttgccggatttgttccgcactcatctgaggaaaagacacgacatcggcttcgggatattcttctacctcccggggcaggacagtaacaaaatacttttgtcccttatcctggtttataacaaacgcattgtatttgtcttcccattcaggtaaatatttccggtcgggaacggtgaaaaaccgcagatcccaacctgccctttggagtccgccgatctgttcgtcgggcaaatctccccaaggttcatagatcataccttctttttccagcgaagcaatctgttgatcgatatgttccattcgtttgaactggttttccaggaaagtcagcaaatccaattcggttacttctgactcttctttcaaccgatctcccgcataaaacacttgttgataaaaaaacaacttttctttcggttccatcgcctgtgaccaacgttccaataattccgtaaaagtctccttggtttcaggaatccgtttggacagctgtttgatcatttctccgatccgcttaatgacggcaaacttgtgtttcagttcttcgtcttcggccgatcgttttttattttcatggatatgaaccactcccttttcccgaagttccccgagaaatgcctgataatcccgatagaatatcagcagggataattttctcattggtactatcatgcttcgtcctccatcgctttacgggttttcacaatcttttgtgccgacttggaaaggttctcctcatcttccaggaatcgcttaatctttcggattgcttcctgaaatccggggatctgtactttctcatacagattcaccttttgtgtcgttttcttacgggcacgatccagtaattccatcttccgcatataaaactcccgttcgagagcgatatttactacttctttcacgtgctgaatcccgtcaaggaaccatcccggtgcattaaacagactgaagtcttttatttcatactccacctggtccaacaccggcgtacgtactcctgcaattttcttcaccgacatattgacatctttcacggtaagaatatccggagtatattcatcataaagttgaagcatatcactgatgccattgagtgtgtcgtctaattttccgtcaaactcatccgcaacttcttttgctttctttacttctgaacgcaaggcagattccttatttttgatggtaggcaaagctcttaccctcatcttgagttgtttgtcaagactctgaagggaagttttattatattgaaattttattgccataccgactgatttattttaattatcgtaaaccgcaaattaatccatatttccgaattcgtccacgatctctttcttgattcccagttccgaacgggtaaaatatttccggaacagtgcccaggctgtgtccaacatctgggtaataccgatattcacgtcgatagccaataattcattcgaataatcccgggcgaaatcgagcgtacgtttatcgtaatcggtcaaatcgaaaccattttccaattttgtccgtgcattggcagcatcggcatacagacggatagcggcgttcattacctgaggatggtccttccgggttttcttaccgatcactaactgtttcagacgggacaagcttcggaacggatcgacaatcaccttaccgatctccgtatctttccgcaagaacaactgaccttctgtgatatatccggtattatccgggatagcatgtgtaatatcaccgcccgacaaggtcgtcacggcaatgatggtaatcgatcccccctgcgggaactgtacggccttttcatagattttagccaaatccgaatacaatgaaccgggcatagaatctttcgaagggatctggtccatacggttggacacaatactcaacgcatcggcatataaggtcatatcggtcagcaataccaacactttttcgttcttgtccacggcaaaatattctgccgcggtcaaggccatatccggcaccagtaaccgttcgacaggaggagcttcggtcgtattgacaaaactgacgatacgatcgagtacaccggcattatcgaacaaatttttgaaatacagatagtcgtcgttggtcaatcccattcctcccaggataatccggtcggtttgtgcacgcaaagccacattcgccatcacctgattataaggttgatccggatcggcaaaaaacggaatcttctgtcccgacaccaacgtattattcaggtcgatacctgcaataccggtagcgatcaattccgaaggttgtttacggcgtaccggattcacagacggtcccccgatttcacgttcttcgccatctacagcaggcccgccatcgatcggatctccgaatgcattgaaaaaacgtccgcacagatcctctcctaccttcagtgtaggagcttttcccagaaaagtcacctcagcattggtcggaataccctcggtgccggaaaatacctgcaacgtgatgtcttccccccaaatcttcacaacctgagccaaacggccattcacaatcgccagttcgtcatttccgaccccctgagctttcagtgaacaggtagctttggtaatctgggtaattttggtatataccttttgaaaagcagtgttcataccttaatttattttggatttttgaattacgatttacgattgcaacgcatattcagctctattccctatagcgtcctatcgtaactcataaattacttatttttttctttcattaataatatctttcacttccgcttcgaatttcttgaaatggccggactgaaattcggaatagttcatctgtttaaaagcattgatgatccgtttgaagtaaggatttacttcttcgaaagaatcgaagtcaaaatccgaacgtacaacatccaaaaccatattcagcatatattgctgacgcgccatcgaggtcgatccgtcaatattatcgaaagcatcctgttgcaggatcacgaagtcgatcaattccgatttccagaatatcagatgataatccaatggaacaccatcatctcccaaaatatcgatttgctcagctgtttcccggcctctgaccagcatattacgggcttcattcacatcttctatccaccggtccgaaatatttttccgggcatattcgacaaattcggggtattccagatatttcgaataagattccagggtatcgatcgccggataacgtttggaatcggcacgagcctgtgacaatgcgtagaaacaacgggccactttcttggtcgattcggttaccggttctttcaggttaccaccggcaggcgataccgtaccgataaacgtgacagaacctgtactaccgttattcagatataccatcccggcccgggcatagaagttggagataatcgcagacaagtccatcgggaaagcatcctgcccgggaagttcctccatacggttcgacatctcacgcaaagcttgcgcccaacgagaagtagaatcggccaataacagcactttcattcccattgcccggtaatactccccgatcgtcatcgccgtgtacacagatgcttcacgagcagcaacgggcatattcgacgtattggcaataatggtagtacgttcataaagggagcgtcctgaccgcgggtcctgcaattccgggaattcggtaaatatttccaccacctcattggcacgttcaccgcaggcagccatgataatcacatctgcatccgcaaaacgggccaaagcatgctgcaacaccgtctttcccgtaccgaacggtcccggaataaatccggttcccccttccagcatcgggttcatggtatcgatgacccgaacacccgtttccatctgccggaaaggacgtggtttatccacataattccggatagctacttttaccggccatttctgcaccatcgtgacattgatttctttcccggtacgatctttcaatacggcaatcgtatccaaaatcgtgtattcccctgccgggactacggaaaccaccgtatattctccctccagcttaaaaggaaccataatcttatgatccagccagttttccttcacatttccgagccaatcggcagctttcaccttatccccggctttggccaacggcgtaaagctccattttttatcgtcctccaaaggatttgtatattctcctcttttcaaaaaaacacctgtcattttatccaggtcattctgtaagccatcgaagtttttcgacaacagaccaggtccgagactcacttccaacatgtgattctgaaattcaacaggcattccgggtttcaaaccacgggtgctctcaaatacctgcacataagcaagatctcccaccacctttatcacttcggccatcaaacgttccccgttttcctctatgaaacaaatctcattctgggaaacaggcccttcgactttaacgagtacaaggttagaaataatgctatggacttttccttgtgtttttgccataaaccttatttatttttgatttttgaattacaagaatcgacgatttctctatatcctttgtaattcattcatcgtaaattatttaaattgttcttcaaactgaaaacttttccggaaacggtcgaccatttccataaacaccttccgcccggactctgaactcatcttgctccaccgttcgacgatcatcagacgaagcatataactgatgactctttccaaagaaaaataatcaaaagtcaccgcttcatccaagaaatgccaaataatcaaatcgagtccccgttcgcgttctactaaattatcgttatccatcaaagcaatcactttttcgacataaggataatccagggtcaaaccgaaatctttcgcattggatgtccgcaaagctactgcaaactcattactgccgatcacctcttttgccacttccatcccatatttccgggcattcaaagcagtgaccagatttttcagattcatggaaaactctgcatatctcttcaccagttggttgtcggctttcatcatataatcataatacatccagctcaacacattctcgggcgaaacatcataacgcaaatgctcttccttaaaatcagcaatgaattccctcaggtaagccggaatcgttttatccggttcctgtgtttcatcttccagcaatttcaccggataaacagtagacaacgccccatcgggttcctgtttcctcaacaaacgcaacacctgagcattatcattaggtaaaaagaataaatcgatcaaccgttcatctctaccactgatataatctttcaattgttcccgaaattcggccactgtcaaagacaatttccgatcatcccagtcaatttccggcaagcctgctataaaagcaatataatccatgtaaattaaatcgtaaattatttatagagcaagctcttggtaaagcttctcatatactgattgaagaaagtctcgaacaacttctcggaaaaagcaacctgatatcctccgtccttcggttgtatgacgaaagcatccgtatgatctcctacttttatttcaaggcctttatccaacaattctttgtatttggtcgccacaaactgttggaatttttctttctcttcctcagacaaaatcaattccaggttcaggtttccggaagctacgtcccattttttcagaatagcgacaatcatttcctgcacgaatgcttcgtctttaaaacctgccttagcgatatttcctgccacttcaccggatatcagggaagtgatcgactgtttcaaagcagtaatcgcctgacgtgcgctcaaagtcatctctgattcagccttttttttcatattttcgacttcggttgctgctccggcttttattccctttgcctgttcctcagcctctgcaatcaattttgctgctttttcctttgcttgagcgattattttttcagcttcctgattcgccttatcgaccccctcttcatacagctttttagttaagacatctaatttgttttccatatatctcatttttagtttcggacattctttctaagtacaagtatttcaccgacttaacaatcattttatcaataacacaagccttatgccaattttcaaatttgatggctccaaattaatgtttttacatttaataacaaacaaatcattcgaattaaaacgatttaaattaacgattaccacttttctccctattttactctaaattttaaatcaatttttacgtcgttccggattcctttgttttaaagaattaatttctattattttgctttctattaatttttattcctatgctcgatcacaaatacaaagttttttatcatctggctcaaactcccaacaccacaaaagtagctgaagagttattactatcccagccagcaatttctaaaaatataaaagaattggaaaaagaactgggtattaccctcttcaaccggataaaaggtcggatgcaactcaccgaagccggacagtatctgtactcggaaattgaaattttagttcggaaggaacgggaaataaatttcagaatcgataaaatgaaacatacttttacaggtacacttcacattggagccagtaccactttatcccaatatgtccttccggagacgttggtccgattcaaaaatgcctcaccgcaaatggctatttctttgatgagcggaaatacggcacagatcgaacaggaaattgtaacaggtaatcttcatgtcgcttttatagaggggaccccgacacaaccggacctccattatatatcttttctccgggatgagattgtattggtcaccggagcagaaacaaaaatcccggaacacatttctccggaacaattcacccaactcccattcgttttgcgtgaacagggttccggtacctaccacgtcatccgtaatcagctcgcacaggccggaatagccataaacacactaaattgtcagctcgttttaggtagtacggaaggaatcaaacattatttacttcattcaaactgttttgccctgctttcgatttatagtatccgtgaagaagtggccgccgggaaattaaaaatcatcgatatcgacgaactgaatatcaaccggatgttttatatcattcaccggcaaggtgaacccgatccctatgccaaacaattcatcgaattctctctccggcaaaaattttagtaaacataccccaggaataaaacaaagcgtaccgatgtagatataattaattttgacggaaataattttatttgcatttttgaatagaaattctgatgtggtaaatctttaagatcggatcatgaaatacgatatttttatcagttacagacgtaaagggggatacgaaacagcgaaacacctctatgatttattttctaaagacggctatcgggtgagcttcgatttggatacccttcggaacggagatttcgatcaggcacttctgaaacgtatcgaccagtgttccgatttcattttaatactgagcaaaggggctttcgccagaacactcgatccggcctttaatccacgacaagactggttacgaatagagttagcttacgctttgaaaaaacagaaaaatatcatccccatcctgctcgaagggttcgagggttttccagaaaatcttccggcagatatcaaagatgtagcaaagaaaaacggacctcaatataatcaatattacttcgacgaattttacaaaaaactaaaaaccgattttttagagacccgtaaatcccgcttcttttctttaaaaacaattttgatcctatcagctcttattttatgtgccggagggatttggtggtacctgcaagaggtttccgggaaacagtgtatcctctcaaaaaataacacgataaataaatcggatacccttaaaaccgaatcaccggatagccccgcaactcctttgacttcgggaaaagagaaaaaagatccagccaccccggagcaaaacacaaaaaaatcgcaggatgtacagccggttacaagtgtaaaattaccggattggatgttcgccccgacacaaaaattcatcggaatcgctcctgcaagcctgcctgcccggggagcaaaagaatttgctgtagcaaccgccgcttatcaatgggtgatagcacaaggcaaacccatctcgggacgtgataccacaatagagtctgcggatgttaaaaaatcacattttcatctttttacccctcaaatcgcttttgaatataagatagagcatgaaacgcaattaagcagtggggaaagagtattcgaaattgttttttttaattcaaaaaggaacccgaatacattgcaagtgttttcaagtataattgatgagaaaaataattttgaacagacaataaaaataaattacaccggttttgaacagataaaaacttatgaattcaatatcgtcgacgaagatggcaataaacttgcccgttcttatctcaataataccgaattgaagtctccccagacaacggtctacacaaacgccggtaactttttagtcccctcccgttcttcacaacagggacatattgtaaacctaaagctcgaagattatcattcgttaagcaaagcctgggaatacggtatattttcatatctctttctttctcctacaggaataataccttgtcagataaaatctatcagccgcagcgatggaagtaatattacagtcgcagcttataacgatgattatagtttaccttccagtatgagttgtaaaggagtcaaaaataatgtactggccatttcatacgaacataatgaacaaaaggtagcagagtttataaaagaagactcgataaaaaaagcaattgctaatgatttgaaggaaatagaaaatttagatataaaataaatccggcactaacaggaaagaaaaaacagagactcttcaaagccggtagtccgactttgaagatcatctctgtcacagggttatttgagttttagtccatccccatcaagatcacaccgaagttaaagctgaaagtctggatttcaggtactcttccgtgagcagctttggtaccgtaattataccgggctcccacattgaaagcaaactggtcgttaatcgggatatacatccctacctccggagccaatgcaaactgccagcgggagatcgtagaagcaaactgtcctacttccagtcgtctctcggtccagctggtaccgatacccaagccgacaaaaggtctgacagccgtcgtattatctgtaaaataataacggccgatagctaacataggcaccgtattgatataacgatactgattcccggtaatcgtatatacattactatttccattgaatctgaaatttccgggagtgtgttttttatctttgtaaaagacatcccagccaatagctgcaccgatagagaattgatctcctaaaaactggtgatattcgatatcgaatccgcggaaactagctttatccgtaaaatcttttacctggttcatcggcagactaatctgatagttaagattaagcatctgagctttcaggaaagggctcaggccgaaaaggcatatggcaattattaatagttttttcataattcatgtatttttataaatcgatatatttctgttatagatagcggtccctccgttatcatttgttcggagtcgtggctttcttcaaataaggcgactggataaagcactgatcgatttgtgattctacacgattcagaacgaaagaattggatccctgaagcaaaccgtctgcgatacccgtccaaacaacatttactttatcgtcattccgtttagccgtagaaaccatttccaccaccacagaacctgttctgtaagagtaaacactaaccggataccaaggatagtaaggattgaaaggaccaccccaccagccaccccagtaccaattccagttgttgtaccagttgtcgacgaaataagcatagttgacattagaaaaagcagatacggtcacgataaagctgggtaaatcttcggcaggagtagttgctgtcggatcagctactttttcgtatcccatagctacgaaattatcggtcacagctttgatgacagcatcatcaaattcatgtgaaggtttgccggcactattgtcattcgcaaaataaacgaccgtgtcaggaatcgaaaaggtggtgaaagcactgaaatcagcacctttgtcgtagtttgtaatggcaacatcatagtcttcaatgttatctgcgccttccgggtaacatgaaactaccagctgcgcaaacaaaccggtgagcaataaaattaataaacgtttcatacttagtttgtttttagtttaacaaatgttctctatcaattaccgcgtggtattggtaacaataattttcattattgtaccgggttatacgttggctttttaaaatagttttaggatttaaaaattggaagagaaaagccccattttgttaaaaagggatacaaaaagagcttaaaacggctataatccggcagtttcaagctttatcatctatttaaaagtccgaatcggaacttactatttcaaaaggataagattttttaggaaatatttattccggttcggtagccagaatagacttgtagccataagttttagcaatattcatcactctgactacttgttcgataggaaccgatttttcggcttcaatagaaatacaaggatcgtcgctatttttcaatagctcgacaatcttcccttctagccgggaaaaaggagtgactttcgtattgagataaaaattcaggttcttatcgatagagaccaccacagtcggacgattggaggtttgatgtgtgcttttgggcagtaataattttaaagcattgggattaatcaaggtggaagtgaccataaaaaagatcagcaataaaaatacaatgtcggtcatggacgacatattgaaattaggatttgcttttctggatcttttaattgccatagatatcgctttatttattctccttctcgtttttcacctcataaatgacctccataaaatcagcactggccgtctccattttagtgacaatatgatcgattttggctgtaagggcattgtaggcaaaataagctataatgccgacgattaaaccggcgactgtagtaatcatcgccgtatagatacctctggacaacagggtaatattgatattgtttccagccatagccatatcgtaaaaggcttgtaccataccgacgacagtccccagaaacccgatcatcggtgccattccggcacaggttgccagagtggataatcctttttccattccggctacttcaagatttgcggcactttccacaatagctctcaattcagtaaccggcagacgataatgaagaagccccttaaccaacatacgcgacatcggcgtattttcctcattacataccgttaccgctccacgaatattgccggcaaaaatacaatccctgattttatccgggaaagtatcgctgattcgtgtatacttacggagtaacatatatctttcacaaaaaatataaaccgcaataatagacaggatgaaaatcggtatcatcaaccatcctcccttgacgatcatactccacaaactcaattcaggctcagcagcctgcgggacagccgtcgctgccagtattatcaaattattcatcgtttcagatttttcgacgcgaagataatggttttggactaaaaaatggaaaatagatgcaattttaatgaatcttattatctttgtcctatcatttaaacaatgagggatgtggtgtccctcgagcatgatttttaataaaataaaaagctatgaaaaaatttgtaacaagagcaatcattattgctttaatcggttctacaggaattctatcgggttgttatggacctttccgtctgaccacaaaattacatcagtggaacggtaatgtttctaacaagaaattcgtcaatgaattggtattcttgggattatgtatcttacctgcttatgaattgtgtactttgggggatgtattgattttcaactctattgaattctggggtggccagaacccgatcaccatgaaagacggtcagatcgacgagtctgaattcatgcacgaaggcaaaatgtacaaagtgatcaaatcaaaaaataatatgacagttgctttgaaagataccgatgtgaaagtggatttccgatatttcccggaagaaagtacctggtaccagatgaacggaaacgaaaaagttcaggtagtgaaattgaaaggtaaaaaagtatatacctatcttccgaacgacaaagtactggtattcgatgaaaattccgtgaatacagtcgaatcagaagtcatggcagctcgttaagaagctctgaaataatttataaaaatggcctccttgcaggccatttttttatgcccgccattttatcggtctaacaccacttcatttatcctgtgccggtattttataataaatagttataccttataactatttcgattctgtcagatccggaaataattcgttcttttgcagcaaataaaatcgataatttaatttagagtaatgaaattaagtgaaaagagaggcaatatgcttcatggaattttgttaatagccttgttttcctgtgcagccttttacatcagcgatttgtcttttgtaaaaagtctatctttcagtcctttgattgtaggtatcattttaggtatgctgtatgccaacagtctgcggaatcgtttaccggaaacctgggtacccggtatcctgttctgttcgaagcaaattctgcgattaggtatcatattgtatggtttcaaattgactttccaggacgtgatggcagtcggcttacccgccatcctgatcgatatcatcgtcgtaacggtgaccatttgtggcggtgtactgatcgggaaatggatgaaaatggaaaaagagattactttactcacttcggtcggtagtgctatctgcggagccgctgctatcttaggagccgaatcgaccattaaaagcaaaccttaccaaaccgctgtcgccatttcaaccgtggtgattttcggtacgatttccatgtttttgtatccggtactttaccggaatgggattgtcgacctgacaccggatcagatggggatctataccggttcgactctacacgaagtggcgcacgtcgtaggtgcaggaaatgccatgggtaaagagatttccgatgtcggcattatcgttaagatgatccgtgttattatgctggtacctgctttattagtgatcggctatttcgttgccagagccagtgtacaaaaaataaatcagcaccaaccggccgaaggcggaaaatcgaaaataacgattccctggtttgccttagtttttttagcagtcatcggtttcaattcattcgatctgctacctcaaccggcaatcagctttatcaacgatttcgacacatttctattgaccatggccatgactgccctcggtgccgaaaccagtatcgaaaaatttaaaaaagcaggtgtcaaaccattcctattagcctcttttttatacatttggttattggcaggcggctatttgctggttcgttatatcaccccctatttcgtgtaaaaggtgatcactcctcgcctgtgaaccggtactacataaaaatacccgattttacgaaatggtaaagtcgggtatttgttttatacatccttatttttacaattcatcggaaatactgaaatctttatttgcaaacagttcagccaagccggacacctgtttcaaacgcaatagttcatctttatccataccgatattcttcaatatccattgatccgacataccggctttagttaattcggcaacaatatggctcatcaactctacattatgagttcctcgggcccggttatgccggatcgtagataccatccggttcgagatatctttttcaatgacggcgacgggcaacaatcctttctcccgttcatatatccgggcagatttttttaaaaccaggtaacggtgataaccgtcgaccagttcatactggtctttatcgggaagataataacatacacagggcatagtatagccatcctcccaaatggataattccaatagtttcatttcaggaggtgcgacaacattgggattataattattggcgaccaccttttctacaggtactgcgatgatcttatataccgggctttgatactctttcattacaaaataacttataatatttcttcatgatttgctcacgcctttcctgctctactttcgaggcagaaaaacccatgtatttacaaatatggtcattctttaaaatacaaagacagaatcttttatacgtcggcaattctttaaattcggatagctcgatatcatccagatattccattcgtacaggccttttgttcgtcctgtaattgcttttttctcctactgtaatcggcaccccggcacgccgtaatttctcgatcgtagactcggccagacaccctcctttttctctccagaattttatactgaccttcaatttgctcaagtaattctgtcgtatattttcaggaagtgtacccaataaaaattgcatatagctggcccaggtatacccttccggcaaagtaattttttgtcggtatccgactgccgtagtggtactgtaaatcgcagtaaaattgattccattcacccgattgatcatacgtccccacatatcaggatcaatagcccggtatagattcaggctttcccgggcttccgatatgaatggactggctaccctttgcttttccaaaggcactcctgcctgataataaagatcgtaaagatggttataagcccaattaaattttccattggcaatccatatatccctcgtcaaccaatcgtatatcggataagcattgtaaacaccggtatccaaccttctcacccatttcaatcctttgaaacgataagcgtctctcccattcaggacacgccagcgattcagactttcctgggttcggattcccaccaggcaacaagtccgtttggcttttttgtaccgatgtaaccaacgggcaaaattacgctgaaaatcatagtcccacatccgtctggaaaaaaaaggaaaatccttacgtgtataagccccctcaggtatggatctcacccaacaatctttcttttcttcatcccagggacgccaaaacttttgaaacatggaagtacaggtcgataccttgaaaggtacacatacccgatatacttcgaaaatatcgctattcgacgccaaaacttcatctacataacgaatcgtttctccgtattgtatttcataatctaaatgaaaaacaccgattttacgccccggacaatgtttccggatataatcggtacataattgtaataatacaccactatccttaccacctgagaaagacacatatatattatcgaaatgtccgaatattttttctaatcgtatttgtgcctgttcatatacattcagagggtttcttgttgtcggtgttccatttttgcatataatttccatggcctgattatagaaaagccattcgctgcaaacacagataaatggcgagagtgagtaacagattgcaatttatattgtccggcataatgacgaatgacctcccgcaataaagctgccaataggtccggatcgtctttatcgatgtaataattattgattacagcatatttgtcttttatttctaccggcataaaaccaacaacacgctcttcctcgatagctataaaccaaatatgatgcatagaggttttaaatggataattattattttcccggagaatacaaggtttcataaccaaaggtgcaacaagacgatataaacgctccgtcgtacctcctaatttttctatttccataaattaaaatttatcgttacgataaataacaccactaaaactccagctctatcaccatgattacgctttacaagattcgatattaatttttcaggatcaataccgagtaaaatttatattaaaccagcaaaaccgatttttcacaaaattataaaatagcagtacaatttcaaaaaaaatgagaagtactattgataaaatttgaattgtagtgtatagaggaagtaatgatccgataggatttcaaggagtactcgtcctgtaggtgacaatctttttataccgatttgcttatatagccggaaaaataatcatttcaacaacatatactattcccaaaacaatgaaagaagcattccaaaccacaaaataatccttttttaattacagaaatcacagaggcagggttgaatttccttccttttgcaatctctgtaactacaaaaaatattttctatcctctctgacgtaccacttcaaaaagcaacactgctgctgcagcggaaacattcagggattcgatctgacctttttgtgggattttaatacaatcggtcgcaatattgatcaactcctcatcgatccccttatcttccgatcccataataattgctgtaggcaaagtcaggtctgcaccagtataaaacttttctgctttctcggtagcagcatatacccgaatgccccgttggaatttcaattcgcggaccactctctttaaattcaatacccggcacaccggcacatgatataaagcaccggcagaggtcttcaaagcatctgaagaaattttagccgaatttttattgggaatgatcaccacatccactccggcacattctgcactccggacaatcgctccgaaattacggacatcggttacccggtccaggatcaatacaaaaggtacccgtcccgccgcttcgacgccatccaacacttctgtcagatcctgatagggaacaggtgatatttcagccagtaccccctgatgattccgatcggcgaaaggcttaaaaacatcttccggcacatactggaaaggaatattccgttcccggatcaaactgaacaactgctgaaacaactcgcctcgtacgccctgtttcaacatcaccttatctatctccttttcctgctgaatcgcttcaatcacagcccggatcccgaatatacattcctgtttatattttgccatatcccgccttttattttatatctttaataaccttcttctctccctctatattcataacctttagcttttagcctccagctttttaccttttacttttcacctcttcctcttcctccgtcgctttctcccattctgtcatcgcttcttccagttctttttgtgtctctccgtattttttcaacaactcatcgttcaccactcccgcagccatctgtttttctaaagcagccacttcactttccagttccgtgacccgttgttcggccctctctacccgttgttcagccttacggatttccttattcaactgttttctttcttcaaaagacagtttattctcactcacttcccgctcggcttcatcattagaaattccattgcctttgggtttatgcaattgttcatattcccggaaacaagcaatcttcttggctgccagaaaatcggttatccctcctaaatattccttgatatgctggttagcgaactcatatactttatccgctaaaccggtcaggaaatcacggtcatgagatacgacaatcactgtaccttcgaactttctgagcgcttccttcaaaatatcctttgtccgcatatccaggtgattcgtcggctcatcgagaatcaaaagattatagggctccagtaataaacgtaccatcgccaaacgggtacgttctcctcccgacaatacttttacttttttgtcaacctcctctccggaaaacaaaaaggctcccaaaatatcccggattttcttacggatttccccttcggcaacccgatcgaccgtatccaggacagaaacttcaggatccaataaatcagcctgattctgagcaaaataaccgatattgacatgatgtccgatcttcaattctccctcgaaaggaatctcgttcatgatcatcttgaccagggtagatttaccttctccattcttaccgacaaaagctattttttctccccgcttgatatccaactgaatacctttcaataccacatgatcaccataagctttcgtcaactccttacccgtcaggacaatttctcccgaccggacagccggctggaaccgcactgtaatacgggccatatcttcttcctcgacctctatccgctccaatttttccaactgtttgatccgcgattgcacctgaacggattttgtcgccttataccggaaacgctctataaaatcttctgtatccttaatctgcttctgctggttttgataagcccgcatctgctgttcgatccgttctttatgcaattgctcgaactgagaataagccactttataatcatacactttccccagagaaatctcaagcgtccgggtggtcacattatccaaaaaagcacggtcatgcgacaccaggactacagccccggaataagtctgcaaaaaagattccagccaggaaatagattctatatccaaatgattggtcggctcatcgagtaaaaaaatatcaggacgtgccaataatattttagccaattcgatacgcatgcgccatcccccactaaattcctcacaattacggtcgaggtcttccggtttaaaacccaggcccttcaagacaacctctacctcacggtcgatattattctccccccgtatcgccaacaattccgttttctcatgaatcttatccaaaagtttcatgtaagcttccgactcataatcttccctcccagccaactccagattcaatcgctccacttcatccttcaaggcaaacaaatcggcaaaagccttttcagcctctttgcggacggtatttccatccgtatatactttggtctggggtaaatatccgatctttatatccgaagccatcgaaatattcccttcagacggtatttgtaaacctgctaacatcttcagtgtcgtcgatttccctgctccattccttcccgtcaaaccgatccggtctttcttattgatcagaaatgaaacagaatccaataaatagaatcctccgaatacaacacttacattattaactgaaatcataaaatcataaactaagtccaccgcaaagatagggtgaaaaaaatccccaaacctgttttttgtcatgttttttacacaaaaactttcttatttttgaccaacttaaaagatttttcttacaaccaataaaactaattcactatgcctaaaggagtttacaaattaccaaacattaccaatgaaccgataaaaagttatgctccgggatctcccgaacgcgcagcattaaaagaaaaattaaacgagatccataatcaggtagtcgacatcccgatgatcatcggtggcaaagaaatccggaccgataaactggccgacattcgtccgcctcatgatcaccagcatttattagggcattatcaccaaggagatgcctcccatgtacaattagctatcgacgctgcaatgaaagcaaaaccggcttgggaaaagatgaactgggaaagccgggctgctatttttctgaaagcggcagagctgattgccggtccttaccgtcagattttaaatgccgtgacgatgttgggacaatccaagaatgcttttcaggcagagatcgactgtgtttgtgaattggctgatttctatcgtttcaatgttaaaaatatgtacgatctttatcatatgcaacccaactcgtcggcaggcatctgggatcgtacggtatggcgcccgttagaaggtttcgtatttgccctgactccgttcaatttcacttctattgccggtaatttgccgggagctcctgctttaatgggaaatgtttgtgtatggaaaccttcgaaaactgcagtctattcagcttatatcgtcatgaaaatattacaggaagccggtctgcccgacggtgtgatcaacttggtatactgttcaggcccgacagcttcagacgtaatattcagcaataaggactttgccggtattcatttcaccggttctaccggagtattcaatgacatctgggctactatcgttaaaaacatcggtaaatatcgttcttatccacgtatcgtcggtgaaaccggaggtaaagattatgtttttgccgacccgacagctaaagcactaccggtagcgacagctttaatccggggagcctttgaatatcagggacaaaaatgttctgccgcttcacgcgcttacattccttccaacatctggccggaagtaaaagctttgatgcaggcagatttgaataaaatcaaaaccggaggagtcgaagatttcagtaacttcgtcaatgctgtgatagatgaagcttctttcgacaaactggccaaagcaatcgatgatgcgcaagcttcgcccgatgccgaagtgatcctgggaggcaaatacgataaatccaaaggctactttatttacccgactgttatccaggccaagaaaccggactatattacgatgcgcgaagaattgttcggtccggtattgacgatctacgtatacgaacccgatcaaatagaggaaacgctcgacctgctggatgccggttcagcttatgccttgaccggagctattttttccaacgacagagctaacatcgaaaaattgaccgagcgcctgacacatacagccggcaatttctacatcaacgacaaacctaccggagctgtcgtcgaccagcaacctttcggcggtggccgggcttccggaaccaacgataaagccggatccgtgttcaacctgctgagatgggtatctccacaatgtatcaaagaaaccttcatccctgcaaccaactacatgtatccgaattttttggaaagctaaaaaggctataagctaaaggctaggcccatcccctacctttagctttttttatcgcctaactttatcggtttacttcaaccccattattttttacctttatttcttagccttcctgtctcttagcttttctctttcctaccttaacctctcgctcttaacctcccccccttacctccttgcccttagcctttagcttcccacctttggctttttcagccttcccgcttttttttaccttttacctttcaccttttacctttttaaccctatctttgttcgtttatcttaaccaacttatcatggcaggaataaaaagtttagccaaggacacggccatttatggtatgagcagcatcatcgggaaatttttaaactggtgtctgactcctttgtatacctacttgcttgtcccggccgaatacgggattgtcgtttacttgtatgcctggatcggtaccatgctcgtacttctgacttacggtctggaaaccggttttttccggtatgccaacgactcttctaaaggagatccccaaaccgtatactccacttgtatgacttcgctcgggatcacgacctgtctgtttctgatcttggttttcagcttcttatcccccatatcgggagcattacaatacgggcagcaccaagattacatcgggatgatcgccataatcatcgccctggatgttttcagtgcccttccctttgcctatttgcgttaccgcttacgtcccctccgttttgctttcctgaaattattgaatatcgcactcactatcattttcaatttattttttctggtagtttgtccggtcatttataaaaatcatcccgacttgatctcctggttttaccggcctgattatggagcggggtatattttggtttccaatgtgatcgcttccttcgtattgttgttgttgctgactcctgaaatattcaggatacgctggcatttcgactggcggttgttaaaagaaatcctgcgttactctttcccgctattgattctgggattagcaggtatcatgaaccaaaatctggataaaatcctatatccttatctattgtccgacccccaggttgctgccgatcaattgggaatatacggagccaacgtcaaaatcgcagtagtcatgatcatgttcacccaagccttccgttatgcatacgaaccttttatttttgccaaaaccaaaggagaagataaacgcacaacttatgccatggcgatgaaatactttgtcatcgtagatttactcatttttctaggagttatgttctacctggacattatccggtatttcatcgatccccgttattttgtcggtttaagagtagtaccgattattatgttggcagaattgttttcaggtatatttttcaatctttcgctgtggtacaaactcacggaccgtacccagtggggggtatatttttctttgatcggtctggtcattatcgtggctctcaacgttctgttcgtaccgaaattcggttatatcgcatgtgcctgggctgcttttgtctgttattttgtgatgatgtttctctcctggctggtggggcaaaaatattatcccatccattacgatctgaaatccatcggaaaatatttgtttttggctttggtgctatatggcattgccgtcagtgtccctatcgaaaacatgttgctgcgtttggggttccggaccatcctgttatttatctatctgatttatctgatcaggcacgacctgccgttgaatcagattccctatctcaacaaactgatttttaaaaaacaaaagtaatcacttctatttttcatttataatggcttttattgatgtattggaacaattccggaattatctgaaaggcattctggactcttcgaacgaaagggaaaatgaggcggagaccatcgacaatatccgtaaaggaatcaatttcaaaggcagtaacctttgggtattgatttttgccatctttatcgcttccctgggactcaatgtaaattccacggcagtgatcatcggtgccatgttgatctcccctttaatgggaccgatcatgggtatcggcttaggggtcggaatcaacgactttgaattgatcaaaacctctttccggaatctggctatcgccactattttcggtatcctgacttccaccctttatttcctgatctctccactcaacgaagcccgttccgagctattagcccggaccactcctaccatctacgatgtgcttattgctttcttcggcggactggccggcatcgtcgcttcaagcacgcgtctgaaaggaaatgtgatccccggtgtagccatcgctaccgctttgatgcctcccctctgtactgcgggattcggtatcgccagtggtaacctgacttattttttcggagctttttacctctatatgatcaactctgtctttatcgccttcgccaccacgctgggagtcaaactcatgcatttttctaaaaagacttttgtagatcccgtacggggcaagaaagtacagcagatcgtttacaccatcatttttgtgactatggtacccagtatctacatcacttacaacatgatcaaaaccaatatcttcgaaacaaacgccaaccgttttatcaccaatgaaatcaatttcccgaatactttcgtagtcaataagcacatcctgcaagacagtatttccgtcactttgatcggtaaggaagtgcccgaagactacctggcgatattacgtcaaaaactatcccaatacaaactggagggtactcgtctatcggttctccagggactgacacaggaaaaagataaaggacaaaaagatgagttggataacatgatcctacaggatttttacaagcacaatcaaaataaagtattacggcaagagaacgaaatcatccgcctgcgggctcaattgaacagttattccaattacgattccctgggcctgaaaattacccccgagatcaaaattctatttcccaaggtggaaacgatcggcttatcgaaaatgatcaggaatcggattgcaacttcacaatccgacaccctgacagtagcgattctatcctacacacaaaggctgacgccagaagaaaagcagcaattacacgcctggcttactacccggctaaatgtcgggaagctggaaatcgttacggaaaatcagtaacagcttatttccgcggcacccatttcatctcttcacatcccgaatcgtatgctattttacgtgccaggataaataaatagtccgataatcggttcacatacttcatcaccgacccgtctacctcagtctctgcggccagatccagtatccgccgttctgcacgccggcagatcgtccgcgccatgtgacaaaacgaaacacactgattaccacccggcaacacgaagtatttcatcggaggaacttcggcatccatccggtcgatgccattttccagtaatgcaatatcttcttccgtcacaccaataggcaccttcagattggccgacgcctcaggatcagtggccaaattccctcccacatcgaacaagcgggactgaatctccaccaattcttctgcaatcacctgctccaaaggaaaagaacggatcatgcctaaaaaactattcaattcatcgatcgtaccataagattccaaacgtgcactattcttcggtactctctttcctccaatcagggaagtcattcctttatcaccggtttttgtataaattttcatgacaattttctttagttatctctctctggttacctgccaaattctcagttcttcaaaatttagtagtgcctcataatatctaactttaaatcaaaccattatccatccccctcttctttttacgtcttatccgccgtcactgttttatccgttatccctctatatcatcaaacaatacctcccctcctggatcttatcgtcaaaaaataaaatcccataccacatcatatctaccgatacagttgctttttcaagccattggtgccacagacgggcatgtattcccttcttgtgaatatcggcaataacgatacatttctgcgggtgattttgcaacattccggcaaaagtcgtttcatccagtggaaactgccgaccgatataaatgaaatcggcagattgcaatgtatccaattgattaacactaatctcgacatcacaaacttcctgcaaataccgacaaaggatatcggcattttttcccaggcaaatcatccgatgtacccgaagcgaacgtaccaaacgggataataagcggaaaatttttctctcccgatgattcaaacaattttctctctccaacctctcgggatattgaaattgtttctcccgatcccggataacatttaaaattaaattaaacataaaaggggaatgcactccatatccccgtttatgtctaaaccggacagcatgttttatccgctctttcagatagcccatttttctatgaattacagtcgtttcaaagatttgaataaaatctgatcagacaaaagtagtgcattttttccaatttcatttttaggctcatgaaaaacgttgtaactttgaaacggtaaagaaaacaccacaatttacatgtgccgtttccgaccgattaatttaaaactttgtaacacgattcatggaacttgcaggattgaatatcaaatttctacccggtgtcggtgaaaagaaagctgccgtgctctatgaggaacttcaggtgcagagttatgaggatatgctctaccatgtccctttcaaatacatcgaccggagtaaaatctattccatcgcagaattgaacggacgtctgccttatattcagatcaaggctaaaatccgtaatctgaaaaccatcggtgaaggcaaagccttgcgtatgactgcaacggcttatgacgagacaggaaccctggaattagtctggttcaaaggatttaaattcctgaccaaccaaatcgaacccgacaaagaatacctgattttcggacaaccttccgaattcaaccacaagctgaatattgtacatcctgaaatcgacagctttgaaaaagcttcccaactgttggtcggttttcaagccgtctatccgaccaccgaaaagatgaaaaaggctttcctaaactccaaagcgatcagcaaaattcaggattccatttttaaaaccatcaaagggaaaatctcagaaaccctgccagcctggtttattcagcaacacaaactcatgtatctgcatgaggctctctataatatccatttcccggaaaatccggacatgctgcgtaaagctttattccgactgaaatttgaggaactattttacatccagctgaatatcctgaaactcaaatacaaacgcaaaacttattttaaaggtcatgagttcaaaacgatcggtgaatatttcaacacattctatcatcgatacctacctttcgaactgaccgatgcacaaaaacgggtgattaaagaaatccgtcaggattgcggcagtgggaaacagatgaaccggctgttgcagggagatgtaggcagcggtaaaaccctggtggctgtgatgtgtatgctgatggcgctggacaattgttgccagacctgtctgatggctcccaccgagattctggccacccaacattatgaaacgatccagggcatgctgggagaaatggggatcaccgtagctttactcacaggatcgactaaaaaacgcgagcgggaagaaattcaccggggcttacaggacggtagcctgcaaattctgatcggtacccatgctttgctcgaagatgtggtgtcttttcagaatatcggcctggtaatcatcgacgagcaacaccgtttcggtgtagcccaacgtgccaaactctggcaaaaaaataccattcctccccacgtactggtgatgacagccacccctattccccgtacattagctatgactttatatggtgacctcgatgtgtcggtaatcgacgaacttcctccgggacgtaaacccattactacttttcatgctttcgataaaaaacgattggaagtatttcagtttattgaaaaagaactgctcaaaggacggcaggcttatgtggtatatcccttgatctatgagtcggaaaaaatggatttccggaatttggaagaaggctacgaacaaatcaacaattacttccttcccaaaggatataaagtaggcatggttcacggtaaactcaaaccggctgaaaaagattcggaaatgcgccgttttgtcaccgcagaaaccaaaatactggtatcgacgacagtcatcgaagtgggggtaaacgttcccaatgcttctattatggtcattgaaagtgccgaacgtttcggattgtcacagctccatcagttacggggacgggtaggccgcggcgctgaccaatcgtattgtattctaatgacttcctataagatttccaacgactcccggaaacgcatcgataccatgaccgctaccaacgacggttttgaaatcgccgaagccgacctgaaattgcgtggtcccggagatatcgaaggaacccaacaaagtggcctcacctgcagtctaaaggtggctaatctgggtaaagacaccttgatcctcaacgaagcaacccgaatcgccaacggcatcctgtccgaagatgccgatttgatcaaggaagaaaaccaactcttcgccatccaaatcaaacgcctgttcaaaacccgcattacctggaggtatatttcctagagtgaaaacctttcccacccgatatcgtaaataccgacaaataaccataaaaagaaatgcaatgaaaaaatttatcacacgggcggcagtagttattctgatcggaggaatgtcggtagctatcggcggatgttacggtcctttccgtttaacaagcaaattacaccattggaatggacaagtctctcaaaagaaatttgtcaatgagttggtatttttaggcatgtgtatcattcccgcttacgaaatctgtattttgggagacggtttgatcttcaactccatcgaatggtggggaggccggaatccgatcagcatgaaagacgggcaacaggaagaagtgaagttcgcctatgaaggccaggagtacaaggtgacaaaaaccaaggaccaaatgaccatagcccttgtaaacagcgaccagaaagtcgatttcaggtattttccggaagaaaaatcctggtatcagatgaatggagaaaacaaagtaaaagtggttgaaatgaaaggtaaacaagtatatacttaccttccgaatgccaaaaccctcgtcttcgacgaaagcaacatggaagaagtcgaaacacaggtgatgtcagccagataaattacacaagggggatgaaatccgatccaaaggttttcatcccaatattcctcatcagtcccataccttttgtaacttttactcccccaatatctcccctgtactttatcatatttacacttataaatatgtatatcattgccaagatttataaactgatccggcaaaatatggaaataaaaaaagagcacctctgtgaaagtgctctttttatctttattttacgccttatttctttttatagaatttatgcggtttgatcatactttcgggtttcagcaactgatccagttcatctttggttaacagtccttcttcgagtaccagatcgtaaacactacggttttctttcagagcacgtttagcgatacgggaagaattctcatatcccaaagtcggattcagggcagtgacgataccgatactgttcaataccatttcacggcaatgctgagtgttggcagtaatgccttcaacacaaaggatccgcaaacgatccatacccttctgcaacatcttgatcgaactgaagatggcatgaaccataaccggttccatcacgttcaactgcaactgtccggcttcggcagcaaaggttacggtcaggtcgttaccgataatccgatagcaaatctggtttaccacctcgggaattaccggattcactttacccggcatgatagaagaacccggctgcatcggcggcaggttgatttcattcaagccgcaacgagggccactggataataaacgcaggtcgttacaaattttagatagtttcacagccaaacgtttcagggctgatgaatacatgacagatgaaccggcatcgggagtagcctcgatcagattagaagccaatacaaattcttctccactgatgatccgtaagttcttaatacattttgaagaatattccggttcggaattgatacctgtaccgatagcagttgcccccatattcacttcgaggaacaatttagccatctggttcagccggtctacttcttcctccaggtttgcagcaaaagcttcgaattcctgtcccatagtcatcggcactgcatcctgcaactgggtacgtcccattttcagcacttctttaaactcttctcctttagcccggaatgcctggatcaacagtttcaggtcagcaaccagttcctcgttcataaagatgaaggccaacttgaaagaagtcggataagcatcgttagtcgactgagacatattgacatggttgttcgggtgacagtattggtattcacctttttggtgtcccatcaattccaacgcccggttagcaaccacttcattgatattcatattggtagaagtacctgctcctccctggatcagatcgaccgggaactgatcgtggagtttgcctccgataatttcttcacaagcccgggtaattgcattggcaatatcgtccggaaggatttccaattcctggtttgcctttgcagcagcccatttcaccatagccaatgctttcacataattcggatagtctccgatagtgatcccactgatattctggaaattctcgattccccgaagagtttgtataccatagtacgcatctgccggcacttctttttcgcctagcaagtcatgttcaatacgtgttttcattatatcaatcgtttatattacaataagactcgatcttttccctacgcaattcaccgaaaaatgtttcaatcgaatcgctaaagccttcggattataacagtttgcttcatattcacctataaaaacttacactccttctctaaagacaccccaaagttagaaaagaaaaaaggattaaaccagagattttcaaaaagaaataactcgctcattacctgagaaaagaatgagacacaaacgtttacgaaaatttaaggaatatttaat

SEQ ID NO: 5962 - DNA, 8510 bp, Unknown
  gut microbiota DNA sequence
tccaattaaaacgtccctttctttgaggtgaaattccgatcgcagctcgtccttttctgttggttatccatcgggaatcgtcttgattcgtattcatcaggtaggtgggaggggtgactttaccggcaggagtgaaaattatcgacggtaaaagtggtaggtttagttcgttactaattctgcatttagtgtaaatatgtatataaataactttatgaaatatcccggattttcacttgaatgttgtcttccaaatccagcattgcattgatcagaaagagataccggaatcgggggaggtctccgaggccgatatcctgttcttttatgatgcctctttcgagaagataacgacgtttcgtgccattgagtaaataagtagaaggggtaatgtattggtttccatcgtaaaaaacgacattactgtaactggtatcggtgatcctaccgttttgataaatcaggatttcgtcgcatgttcctttagattgctgcaattggatcagtttatcccgatctgcatatttaaaagtataatcgatgccgctgccgtcgacaagttttaaagtatgaacccggcggggagagtaggtttcgaaatcgatttttctgatttcctgatcgtaaatgatgcggcattttagggtaccgagacgcttgtctggcggtattgattcggaggataaaggaaggaaggtactgttcccgaaatgtacccgctgggtgtcggttatacgttgccagtgaagttcgggatgtatgaaacggccgtcgacaattttcagactttctataaaggcgttttttatcattattttatttctatttctggatgggtaagtaaattttttcgagtatttcctgatattcttcttttgcctgactattgaccgtaataccaccgccactgcggaagtaataccggttatctactttctctataaatcggatcagtacggcactatcgagcgtttggccgtcgaaataaccgaatactcctgaataatatcccctgggcaatccttcggcttgacggatcagcttttgggttgctgctttaggggcacccgaaatagaaccggcgggtaatagcttgaataaaagtgttcccaattcgttttgccatccgtcgggtaattgcccgctgatttccgagctggtttgtaatatctcaccctgggaagtgtgaatcttttctacgtaacgaaagcgtttcacttgtacacgagtggctacaatattcagatcgttccggatgagatcgacgatcgtataatgttcgcatgtttctttatgattttgaagcaagcggttttctgcgtcgggtaaagtggcatcgatggttcccttcatcgggtaagataggatctcattattttcgatccggacgaagctttcgggagaaaagcaaaccaatcggtcaggaagtaaaagtttatagcgggcctgactgtgataaaagatttgttctaaagtgagattggtttcgatgggggttctttcggtcaggttgagcaaaaaactatccccgcgtgacaggccttgatgtacgatcctgaatttttcctggtatgtttcaaagctactgtgaagaatttttatacgaggttccggaataggggaaaggggcgttttataatgaccgatggttccgatcgtaaaataaacggatggatcacttaagggcttttcgacgaaaaatccatggataccctcgaaatctactccaaataggaaaggaatgccggctctaccacaacggttcatctcttcccgtacaatttctgctttcatctttgtgttataaaatccgtggcaaagataattcggattgcagcatgttgcgaaataaatctattttatttgttatttttgtattcatgaaaaaagtgctcgttatcgataattacgattcgtttgtatacaatgtgattcagttgcttcgggaagctgttgttcctgttggttatgatatagtccgtaatgataagatcgatttttctggcttaggggattatggagggattcttttgtcgccaggaccgggtattccggccgaagccggggaactgttaaaactgatcgaattctgtaagtatactcatccgatattgggcatttgtttgggacatcaggcgattgcagagacattcggagcttcgttatataatttatctcgccctttgcatggacatcgcagtgttttgaagaaggtagatgaacacgatcccctgttcgaagatttggccgatccgattcaagtgggccgctatcattcctgggtgatcgatcccgaaacaatgcccggagaattgattaccagctcaatagatgaacaaggtcatatcatgtctttttatcatactgaattacctatccatggtatccagtttcatccggagtcttacatctcggattgtgggtctggaataatcaggaattggttgaaaatggtccggtaaaggtttcctgcagaagctgctgtttactttacctgataaggggataattatatcaagcccatttgttttaaaaggatactggcgttcatattactactgataccgggatgaagtttgtaatcgtacgtaatttgactaccggaatggacaatctcgaagcagacattgaaaaaatgttccgggaaatcgtcagccagttctcctaaagccaaatcgtgggttgcaacgaggccggagatagggtaagagagtatcctttttaagaaagccaatgaaccgtttaatttatccaccgaatttgttcctttcagcatttcgtccaaaatgatgaatactttgtcttcctgctgtgcgatgttaactagttgttgaagccggagaagctctgcgtggaagtaggaagtgtctttagacagactatcggtagtccgcatactggtgaaaagcgtcatgggctgaaaagcaaaatagcggctgcaaacgacattcccggattgagctaaaatcagatttaccccgattgtacgcaaaaaggtacttttaccggccatattggctccggtgacaatggcgatttggtgtaaggagcggatactgaaatcattggtgacgtttcgttcgctttttagtaaaggatgtcctatttcttcggtgtctaataatcgatcctgacagatgaccgggaggcaataagcaggatggttgaaacgataattggccatgctgatcaaggcatcggcttcactaaggacgtctgtccaggtttcgatgtcaggtccatatttctttctccagtgatccagacggagcagggtatggaaatctttgaggtatagtccgtttaaaatgaaagcgatgacaatgttaccccgttggtcgagactgttctgtatccggtgaagttgagtcaaagcttgcagggaattactctccggggtaaacaagctgtgtcttattttctgaagataaggggaacggaaagattgatcgtggattaaccggactaaaggaagataattgctgatggttttcagaaacaggttgagccgttgatgataggcattgatttttttgatatataaggccaatgccgaaagttgtaatagggatagcacaagggaaatggaaaaaggcaggggggtaaagctcgttaccgcccacgaaacgattacaatcgtgttggctatccataaaatcagacggactgtgctatgttttgaaaagaatggggattcggtcggtcctgattttaaaatgaccgcatcgagggcttgggtcggatggagtgctccggcagcacgaaagtgttgacaccattccggttcggcgcataattcttctgccgcttgctgacgggaatgaatgacttccgggtctttgctgagagataataaccaggataccaacttttgggtgccggaaaaagtcactgtccggtttaaatgctggaagagggaatcttccccgaataggtccaggtcatgggcataagggtgggcaggatcgttgaacctttcgccttggtcaagagcagagaaattaccggctaaataatccgattccaacgtgtttatacgaagtagttcttcgatgagatgttgccggtagatgatttgggaatcccatagagtcaaaaaaatgaatacgagaatagctcctatacccaaaagtaagagaggttgagtactatggttgatcaggaggtagatcaaaaagatcatatagccgaaagtgagcaatttggccaatgtaatcagattgcgccgtttttttatttgctttaaacgggcggtatagtggtctatctgtttctggtaatattcatcgggtttcattttcggaaattttgattgtacaaaaataaaaggataaatggaaaaatagtcagaaatttatacttttgcgctctcaaaatcggacagttattttttacaggtagttaattgaagaggaacgatgaattttctgacgcttattgattatatcggtacatttgcgtttgccattagtgggatccgtttggcttctgctaaacgcttcgattggttcggggcttatgtggttggattcgttacagctgtcggaggaggaacgattcgggatttgttgctggatgttaccccgttctggatgttgcagtcttcctatctgatcgtgactgccctggctttgggatttgttattctgttcgggcgatatgtcatcaggctgaataatactttttttattttcgatgccatcggtttagggttattcgccgttgtcggtatcgagaaaagcatcacttatggttaccccatgtgggtaggattgattatgggtactctcaccggagccgccggaggagttttgcgggataccctgatcaatgaagtccctttgattttccgaaaagagatctatgccctggcttgtgtgttcggtggcttggtttactatctctgtctgtattccggtttaaattcgacactgacacagatcatcggggctgtttctgtcatcctgatccggattctggctgtaaagtatcacatcagtctgcctaatctgaaaggggaaaactgagttggaaagtctttatgtaagattaatatcgaaaacgttgtcatttagaataacaagttttatctttgttctgttataattagtcagaaaaaagtctgaaatactattaatttgaaatcaattttctgatttttattcagaatgtatatgaaacctgaaaatatttttgctcagatagctgaggctggtgaagaggaacagttcgatttgctttttaaatctcctaattgccggatcgaccggatcgtttcttccggtcatagttcgcccaaaggattttggtacgatcaggagaacgatgaatttatattattgattcagggagaggctacgctggaatttgaggaccgcaaagtgacattgaaaaaaggagactacctgcatattcccaaaaattgcaaacatcggctcgatagtaccagtatcgagccggtatgtgtatggttgtgcgtgtttgatatcgaatagggaaaaggttattttatcgatgttattttgcaagatgattgctgtgcttttgaagctttagttcagaagtacggggagagtgtggagttatctccggtacttattttttcggtgccggaggtacggtcgttatttttttacttctagtttttcattaataatgtctgttatttgttctttcggacgtaacccggttaccgtaaaaggtttgccgtttttgggaataaagagcatcagtgggatgctggaggcattgaataattgagctaatgccggttctttatccacatccactttatagatctgaagcttatctccgtattctttttgaatctcttccaaaataggagatagttttttgcaaggtggacaccaggtggcatacatatcgatgatggccggtttatcaccgagatacttccagtctttattcttttcgaaatcccaaatctgtactttgaattctttcgtattcaaatttttcacactttgggcatcggcatatgacaaaattcctgctgaaaaaaatatcaataacaggatccatgtttttttcatagctaaaatattaagtaattatttgaacgactatcggaaatatatacagattccctgtggacgaagttacaaaaaaagggtatctttgcaaagtttaaaataaaagattactccatggttgtttttccacatgcgaaaataaatatcggtctctttgtgaccgggaagagaaatgacggttttcataatctggaaacgatttttttcccggtgggatggtctgatatactcgaaattgggcggggagaaggagaaagcgggagtttccgatttaagaataccggtctggaagtgggaggagatcccgggaaaaatctggtgattaaagcttatcacttgttggctgccgattttcatttgccggccatacaagtacacttacataagatcatccctttcggtgccggtttaggggggggatcggcggatgcagcttttatgctgaaagctttgaatgcttttttcgatcttcgtctctccgggcaaaagatggtaacttatgctgcccgcctggggagtgactgtgctttttttatcgatgatcgtccggcatttgcttccggtaagggggagttgctggagccgatagagcttacgttggccggttatcggatcatcatagtgaaaccctctttcggagtatctacgcctgaagcatatgcagggatcactccccggccggccggatatgatctgcgtcagctcggacaacttccggtaaatacatggaaagaatatatccggaatgattttgaagcgactgtttttcaaaaatatccctctctaactttattgaagcagcaattgtatgagcggggggctgaatttgtgagtatgagcgggagcggatcggctatttatggcttgtttaagaaagaccgggaaatcaacctggattttcccgattgttgtgtgtggcaaggagagactttaatttaaaatataacctgttcgaattgtaatgagagcttatctgacgattatattaattggtttggtatcggcatttatcggtatcattcctttattcaaaagaaaggcagataaatatactgttttatcggcttttgtgttgtttctgatcatgccctatgtggtttatcacctgagtttaccttggacacaatggtggtggaaaggtatgatcgtgtctgcagttttgaccctccctctggtgattacctcggggcggggaagttcaagatgtgcattcccgcttttattggcttctgtcgtagtcggtgcttttatttcctttttgggacattatttattgtaaataccgggggaaaaagggaggacaagcctttccggacagattaacggttttaagcctgaaggacgaatcttttccgaaagttgatcggtggaattagtctcccgatatcattgtattttatcgaagattgtagttccaccgattgacaggttgtctataccgtccaaaggaaagaggtaaattataagatttctcctgttggattttagtttttcaggctaaaagaatagaaaatggcggatatacctccgaaaataaaggccagacctgtccatacgataatattgaatataccgaaaagcggatggaaaataatcaaaaaggcaaaaattaaggtcaggattcctcctgtcaatacccatccccaattaggaatacggaaagattgcatttgactggattgaccgataaaaccgatacctacgaacattaagataaatcctacgacataaggtaacagatcggctgcccaggctagattacctaataatataaatccgatgaccaaatccagtattccgacggctaagccccagccccagttccggtagcgttgccctgcaaatgcatttacaatttcaccgatcccatacaggataaacatgatactgaaataaaccgccagcgcaaaataggattcaaccggatttctgaatacccatataccgcaaagaatagaaagaataccgataattagcattagccaccaatatcggttgttagaagagtaagtttctgtcgtttccataactataagttttaaattatagttatttaaacgaaaaaaggctggtaatgttttaagggggattttttactgtcggcaggatcatgatctagtcctgccgacagtaaaaagattatttttcgttatagaggtgtacatccatttgcgggaaaggaatattgaggttttcctctgcaaaggtcttgtatactttttcgttcatatcgaaaaagacaccccaataattttctgcttttacccaggcccgaacgacaatgtcgacagaactggagttaagagcggttaaagcgataaaataattgggatctttcaatactctgggatcattatctaaaagccgggcaatgacagcttttgcatgttcgtagctatcaccgtagccgattccgaatacccagtcgacccgccgttgcgattctttcgagtagtt

SEQ ID NO: 5963 - DNA, 12138 bp, Unknown
  gut microbiota DNA sequence
tccggtagataagcctccgttaggaatgatgatcaccttgttatcggtagtcgtaatgatggtattgaaaatctggatctctttcactgttcccgactgaccttgtgcttcgatataatctcccactttaaacggtttgaaaagcagtatcatcactccaccggcaaaattttgcagtgtaccgctcaatgccataccgacagcgacaccggcagaagcaaataaagcgatgaatgagcttgtctcgatacctaaaacactgataatgataatcactaaagtgaaattcagggtgatactcaccaaactcttggtaaaagtggccaatgaagcttcgacatgccgtttcgtaagtatgtttataactaaacgatttaatttttttacaatccaacgaccgatgaagaacaccagaagtgccaccagcaacttggaaccgaatgaaacactgagatcaataagtttattgaccaatgtgtccaaagacattgtagataaagaattttccataattaattgattttttatttatcacccactatagagattttttatttttcttcttttagagtttcatttattggtattttgaagtatactgaatccttgggacatatcaaattacgctccaaagttatcatatttatatttttttacaaaaattacgaccgtaaaaggctttattccactttcatttttaatgtttcgctaaataattgtatttttgtaacctgtgaaaaattaatcgtcagaatactatgagcatagaaagtttgttgaccaccaaggtgatagaagctgtgaagcagtgctatgacgctgatgtggataaggataaagtgcagttacaagctacccggaaagagtttgcgggagatttgactgtggttgtttttccatttacgcgtttttcgaagaaatctccggaagagacggggaaagaattggggggctacctgaaacaacacattgaagagattaaagactacaatgtggtgaaaggattcttgaatatcgaaatttcagcggcttattgggtaggtgtattgaacgaagtggctcaggacccgaagtatggatatgtgcatgaaaatagcgggcattcttacatgatcgagtattcttcgcctaatacgaacaaacctttacatctcggtcatatccgtaacaacctgttgggttggtcggtatccgagatacaaaaagccaatggacatgaagtgaggatggtaaatttggtgaatgaccggggaatacatatttgtaagagtatgattgcctggaaaaagttcgctaatggtgctactcccgagtctacaggtacgaagggcgaccattttgtcggcgactactatgttcgtttcgataaggaatataaagctgaaataaaagctttgatggaaaaggagggaatggaagaagaagaggccaagaaaaaagctccgatcttgctggaagcgcaggaaatgctgcgtaaatgggaagccggtgatgaagagaccgtgagtttgtggcgtactatgaacgattgggtgttgaaaggtttcgacgaaacctatcgcttgatgggggtgggtttcgataaagtatatttcgaatcacaaacgtataaaaaaggccgtgacattgtcctgaaaggtttagctgacggtgtactctaccggaaagaaaccggtagtgtctgggccgacttgaccggagacgggctggatcataaattactgttacgggacgacggtacttcggtttatatgactcaggatataggtacggcctacgaacgcttcaatgaattcgatatggatgaaatgatctatgtcgtcggaaatgaacagaattatcatttccaggtactttcattgatttgtggtaaattgggtttcccctgggcggataaaattaagcatttgtcttacggaatggttgaattacctgagggaaagatgaaatcccgtgaaggtacggttgtcgatgccgatgatctgatggctgaaatgatcgatacagccagagaaacttctcaggaattaggaaaattggacggctattccgaagctgaggccgaagaggtataccggaaagtggctttgggggcgttgaaatattttattctgaaagtagaccccaaaaagaccatgatgttcaacccgaaagaatcgatcgattttaacggaaataccggtccttttatacaatatacttatgcgcgtattcagtcggtattacgtaaggccgcagacgcaggggcatcacctttgtcggcggatacacatattcagctctcggaaaaagaacagaatctgattaaattggtggctaaattgcctgacgtggtgaaagaagcagggacaacctatagtccggcattattggctaattacgcttatgacctggctaaagaattcaatcagttttaccatgatttttctattctgaaagaagaaaatgaagctttgagaaatttccgtttgttgctggctaaacaatgtggtgaggcgattaaaaatgccatgggaatgttaggcattgagatgccggaaagaatgtgatcgggaaatggggtatgaatctgaccaattatcatagtcattgttctttttgtgacggaaaagctcctatggaagattttgtgaagtcggctatcgctgccggctttacttcttacggtatatcttcacatgctccgcttcctttcgagacgtgctggactttatcgcaagagcgggtgcccgattatttacaggaaattgggcggttgaaacagagatatgcaggagaaatcgagatctatgccggtttggaaatagactatctgaatgaaattcagaatccggctaattcctattttcaggctttaccgttggattaccggatcggatcggtccatttggtgtatactgacgaagaggaaattatcgatacagataccgatcctgaaaatttccggtatttattggaaaagcattttcgtgggaatttgcaggagatggtcacccgctattttgttgcagccatgcgtatggtggaagcgggaggttttgattttgtcggacatgccgataagatttcttataatgccgggatttgtcaaccggatctattccggcagggctggtttaccgatatgttgaaggaatactttacgctgattgctgaaagaggtatcatgatggaaatcaatactaaagcttttttacgtaaagggtgtttttttccggatatccggcattttgcctttattcgtgctttggggataccggtactggttaattctgatgcccaccgtccggatttgatcaatgccgggcgggcggaggctttacaggcgctgaaagaagctggattccataccgttagacaattgcagggaggaaagtggatcgatgtgccgattgcttgagagatcagtagggatgaacctggaaagttccggaaaaattcgaataaaagaattgatttttaactgacaaactttctatacaatggacagttgggtgatcgtacaaacctttataaatccgcaggaagcctatatggctaaggcttttttagaatctgccgggatcgaaacccggatgcaggatgaattgacggtccggacggggatccatgcacaggcaatcggtggagtaaagctgctcgtccggcatgaatgttggcaggaagctctgaaagtccttgaagaaggtttctcccttattccggccggcctggaagtgccgtagttgtggaaaagcttggaaatataaataatttaaacgatgaaaaaatcgattcattttataccatcgtcgctcgtttgttcggtagctattgatttgaccgtggaggatggggtgatccgggaagtttgtttcgaaggaggatgcagcggaaatctgcaaggaatttcgatgttggtaaggggaatgaaagtagaggaggtaatagaaagattggaaggtatacaatgtggaagtaaacgtacttcctgtccggatcaattggtgaaagcgctgaaagaaatagaacggtgttaaaggattttttgtttttaatgggaagtaattaaaatgagtattgatttaaatcaggcattggaatatgcggtagcctgggcgaaagaagttggaaagatacagctttcctatttcaggggaaatgatttgggtatacaaaccaaatcgaatgtgtacgatgtggtaacaagagccgataaagaaagtgaagcttttctgttggataagattcagaagcactatcccgggcatgcagtccttggggaagaaagcggtgctcatgccggtactgccgagtatcggtgggtgatcgatcctttggacggtacgaataattatagccagggattacctgtatttacagtatctatcgggttgcaataccgggaagaaaccattctgggggttgtttatgcgccgtatctcggcgagttgtatacggcaatcagggacagaggagcccggtacaatggaaaagtgatccgtgttgctgaaaaacaggatttggctcattctgttttgggaacaggatttccttacgataaagatgtaaatccggataataatgctgcaaatctggctgcaatcctgccttccatccgggggataagacgaatgggctcggctgcttatgatttatgctgcgtcgctgccggttggttggacggatattgggaattggcattacagccctgggatatgtgtgccggagccttgattgtacaggaagccggaggcatcgtccgcagattcagggaaaaccggggtatttctatactggcaggaaatgcggcgctcgttgagaaaatgggtgaaaaaatacaatgatttgatttgaaattaagttatggcaacttccagagagatgacagcagggcccgcgctgccacttattttcaattttacgatgcccttgcttttgggcaatttgcttcaacagacttattcgttggtagatgctgctattgtcggaaaattcttgggaataaatgcgttggctgctgtcggagccagtagttccgtgattttcctgattttgggtttctgtaatgggtgtagttgtggtttcggtattccggtggcccagaagttcggtgcccgtgattatgtcatgatgcggcgttatgtggctgtgagtttgcagctttcgttggtgatgtctgttatgattgctttgattaccagtatctattgtgcagatatcttgaggattatgcgtacaccggagaatatcttcgagggtgcgtatgcctacttgctggtgacttttatcggagtaccctgtacgtttctgtacaatcttctatccagcattatccgtgcattgggagatagtaagacaccgttttggtttctgctcttttcgactatactcaatattatcctggaccttttctgtattctggtattgaaatggggagttttgggagcggcgatcgctactgttttttctcagggaatttctgccttattgtgttatgtatacatgtacaggcattttcagatactgaaaggggaagccaaagagcataaatttcagttgcatctggcaaggactttattaaatatcggcgtaccgatgggattacagttttcgatcactgcgatcggtagtattatgcttcaaagtgcaaataatgccttgggaacggcttgtgtggctgcttttacctctgctatgcggatcaaaatgttttttatctgtccttttgaaagtttgggaatcgctatggcgacttattgcggacaaaattacggagcaggtaagccgaaacgtatctggcaagggatcaaagccagtggggtgatgatgctgatttacgccttactgacctttgtcgttttaatggtcggggcgaggacgttggctttactttttgtagatactaccgaactggaaatattgaaaaatacggagttgtttttgcacgtatctgcctatttctttcctttcctgggattgctttgtatcctgcgttacaccattcagggggcagggtatacgaatctggctatgctttccggagtttccgaaatgatagcccgtaccctggtcagcatatatgccgtaccggtatacggttatattgcagtttgtttcggcgatccgacagcctggctggcagccgatctctttctgattccagcctttatttatgtctaccggaaattgaaagagctcagatgtccgttgacggaaggctgaaaggataagctgaccggacgatcaggccaaaacctgatgccgggtctgtaagatcgaattttttagaatacgtttggctgtgagatatccctcttcatagatctctctgatgtgttccagatcgaacatgctgtatttggtcatattttggggggatatgaatacatcgcacatattccggtcgatatcggtattccggtccagacccagatgaaaagaacggatagccataccgatcatgttggtgattttttccgaagtatctatcgaattgatttcgacggctataattttctcgcaacgcttgcgtatgggacgtacgggaagattcataaagactcctccgtcgacataatcgacatgatcgatttcccggggagtaaagactaccgggatagagcaggaagcaataatgcaggggagaagttctcccttttcaaaatggacgggtacagctccgttaatgtcactggctgtaatgaccaggggaattttcagttcttcaaaagtcttgacatgcagaaattctgccagccgttcttccataccgttcataatcatgatccctttcttcgacatggtgggacgggcaaaatgcaaaatttttttccccaggaaaaaattcaaacattcttcgggggtatgaccggcggcaatcatggctccgacaatcgagccggcactggtgcccgagatgatatcgggacggaggcctgcttcatacatggcttgtacgactccgatgtgggcgaagccccgggctccaccgccgctgagcaccaatcctaaccgatatcgaggtgttgtatccataaataatagtttctaattaccgatttgtacgaaaatcccgaggtggggttttcattggccaaaaatataaaagaaattgtttatttgagagtattcttatcagtttaaataatagttctaaacctgaaatttatgaaaagatattttttaccttttacctttaatttttatctttgcacctcaaatcaaaacaaataagatgcaggaaaaaattttgatattggacttcggatcgcagtacacccagttgattgcgagaagagtccgggaattgaatgtatattgtgagatttatccttacaatcattatccggctctcgactcctctgtaaaaggagttattctttccggaagtcctttttccgtcagggatgataaagctcctcagccggatctgacggcgataaaaggtcagttgcctttattgggagtgtgttttggcgctcagtatttggctcatcatttcggaggagaggtaaaggcttctaacaaacgtgaatatggcagggcgaatttagctttcgtcgataaaacaagtaagctgtttaaaggtatcggcgataattcacaggtatggatgtcacatggagatacgatagaaaaattaccggcaggctgtcaggtgattgccagtaccaaagatgtgaaaaatgccgcttttaaggtagagaacgagattacttacggtattcagttccatcctgaagtatatcatagtaccgagggaacttgtctgcttcgcaactttgtggtgggtatctgcggatgttcacagaactggacccccgattcttttgtagagacgacagtggctgaattaaaacagaaattgggagacgaccgggtgattctgggattatccggtggggtagattctactgtagcagctatgttattgcatcgggctgttggtaaaaatctgacctgtatctttgttgataatggtttgctgagaaaagacgaatataaaacggttctggagaattataaagagttaggactgaatgtggtcggagcggaatccggagatttgtttttaggacgtctggcaggtgtcaccgaacctgaaaagaaacggaaaattatcggaagtacttttatcgatgttttcgatcaggaagcttctaaaatagaagatgccaaatggctgggacaaggtacgatctatcccgatgtgattgaatcgctttcggtaaacggaccttcacagactattaaatcccatcacaacgtaggaggtttgcccgattatatgaaattaaaactggtagaacctctccgtttgttatttaaagatgaagttcgccgggtaggaaaaagtcttggtttgccggataaattcctgcaacgtcatcctttcccaggtccgggcttggctatccggatcttaggcgagatcactcccgaaaaagtaagacttttgcaagaagccgatcacatttttatttctatgcttcaggaagaaggattgtataataaagtctggcaggccggagtgatgctgctaccggtacagagtgtcggtgtgatgggagatgagcggacttatgaaagtgtggttgcgcttcgggcagttgaatcgacagatggcatgaccgccgattggtgtcacttgccttatgaatttctggcccgggtttccaatcggattataaataatgtccgggggatcaaccgtgttgtttatgacatcagttcaaaaccacctgcaacaatcgagtgggaataatctataaaccagtcctaatgactgttttttataactcacggaggtaggagctatgcctcgtgagttattctattttaaaaatagatttagttttattacctttgaagccgtgagatcgtaaattatcacgtgggaataactggctggtaagttgtccttgggggcagcttatttttttagagataaaggtagattcctgtataataggaaaataaaaacaattggtttatgaaaaataatgcggatgaaataaggagattaaaagaacgattagggcaggggactttaaaaacggtgattattcctcatatttcggcagatggtgatgcggcaggctcttgttcggctttgtctgaagtgttgcagcaagtgggaatagaatggcatatcctgacctgtgattttattccggaatatctccgttttttgaaaaatatctcttcggctatttcttttcaggaaaaaccggaagaatgtaaacgcttacttgccgatgccgaccttatttttatgctcgatcacaatacagttgcccgggaaggtgaccttgaaaattgggtggtggcttctcctgccgggcgtgtaatcatcgaccatcatccggatcccgatccgcaacaatacgtaatctccgatactcaggtttcttcgacttgtgaactactctatatcgtcatgtcacagatttggggaaaggagatcgttactccggatatcgccggcgctttgtacaccggcattaataccgatacgggaggattgagtcataattcttctcatccgcagacctatcggattatcgcagacctgttggaagcaggattggacaaagcttatatccatgaacggatttatcaaatgaacaatttatcccgtctgcgtctgattggaaatgttttactcaataaactggaggtgaatgaacaatatccggtggctattatgccgattacccgggaagaattagaccgctataattacaaagacggagacttggaagggttggtcaatattccgctctctgttcacaatgtctgtgtatcggtacaaatcacggaacgcagggaaagggtaaaattatcttttcgttctaagggaaatgtgccggtcaatgaatgggctaaggcttttttcaatgggggaggtcatttgaatgctgccggaggacagatggatttgccgctggcagaagtggtgagaaaggtaaaagaaacgattccctggtttttcgaacaactaaaaaacagcggtatttaaatattcatattctactaaaaacttttattgttatgcctttttttaaatttcattttgtagaagcttcccggatggcaggtgtgagtcgtcggatggcagaccggctacaagagacgatcggatgcccgcgtgaacatatcgtgttcgagctgattcattccagcgtggtcgaagatgtaaccattaagagcggtaatgattggccttatgtagaagtagattattttgaacggcctccggaggtacaacacgaagttgcgaaagtcatttatgaatgtctgatggccgccggatatcagaattcggatgtatattttcgttacctgactcctgagaattattatgaaaatggagcctgtctgaaataaatatgttgataaaaaacgggccgatttggtgtgaaatataaaaagaatgcttatgtttgcgtatagtataaaacgcaacataaactatggatgatgtcagagaattagtctcttatctcagtaaagctgagcggggatataccaaaactttaaatcgtgagtttttgaaagccggattcgatttgagcagggaacaatatgaattattacaggtgctctgggcggaagatcacgtgaatcagcaaactatttccaagaggcttcagaaagataaatacaatgtgacgaaactattgaataccctgacgaaacgtgggtttgtgcagcggaaaatgtgtcaggaagataagcggaataattttgtggtcctgaccgaaaaaggcatagaggccaaaaaggttttgaccaatatcgaagagcaggtacatgctgacctgacttttaccattgctccgcaggaaattaaatcttgtgtttgggtgttgaagaaattaacggatatgatgggctaacgtcatatccgttgttgttaaataaaccatgaaaaacaaataaaatggaaatttttaaaggattacaacccgaattggtgtggagttatttcgaagagatctgtaaaattccccgcccatctaaaaaagaagaaaaaatagctgcctggttgatggaatttgctaagaaacatcagctggaagctcgtcaggatgaagcaggtaatgtattgattacgaagccggctactccgggaaaagaacaaaccccgggtgtggttttacaagcacatatggatatggtttgtgagaaaaatgcagataccgttcatgacttcgataaagatccgataaaaccttatatagacggtgaatgggtaaaagccaaaggtacgacactgggagcggacgatggtattggaatagctgctgcattggctgttttgacagatgaaaatattcagcacggacctttggaatgtctgtttaccgttgacgaagaaaccggattgaccggggcttttgctttacagcctggattttttcagggcaagatattattgaatctggattcggaagatgaaggggaaatttttatcggatgtgccggtggaatcgataccgttattcgcttgccttaccgaaaaatggttttacctgcccataaatttgctgttcaggttaaagtgaaaggattgcagggcggacattccggtgatgatattaataaagggagaggaaatgcgatcaagatattgaatcgctttctgtgggatttgaatgagcggtatggtctgttggttgcatctttggaaggaggaaacctgagaaatgccatagcccgggaagctaatgcggtgatcgttttcgatgaagtcctgaaagaaaatatccgggttgacttcaatatgtatgcagctgagatggaggaggtttggaaaataacagaaccgggactacagttggaactggaatctgtcgatttacctggagaggtattgactcaggaatttaccaataaattattgaatgccttgtatgcttgtcctcatggtgtattcgcgatgagttatcggatgcctggaatggtagaaacttctactaaccttgcagcagtgaaatttatcgaaaacgatacgatcttgattactacttcccagagaagtgatgtcgactcggagaagatgaatattgctcatatggtggctgcagtattccgtttgatcggtgctgaagtggagcatggagaaggatatccggggtgggcacctaatcc

SEQ ID NO: 5964 - DNA, 13228 bp, Unknown
  gut microbiota DNA sequence
gggaaacaaagggacgggggtaatgtttcatacataacaccagaaaattgctcaaaatgaataaatcacaatacaaggattgctatctttctgtatgccggaaaattcttctctcatccgttgtatctgtttgggatacttctcttcaaaattgacatattcatttcctcctttcaaatacgtacacatatccgaggcactgacagaggttattatataatccgaagtgatgtcaatcatacgcccaaaggaaataaaatactttccggtataagccgttagttcacaaacctgagactcccgattgttcttattatacaggcacaagcgattctgaccggctgccagcacccaataaatatagaaatccggagtttcctggaatttctctatggttgtaatataatccggattgcgtgtatattctttgtactcatcatatgaaagttgttccgctggcaaatgaaattttccaaaacgtaccgtatggtcaacacacatatccttcccctggcaacgataaatgttaaagtctgtaggtgctatataatacaacgaatcctggtatgtggaaagcgaatggatactggccattttactttcccagcgggagtctattttcatatactgactttcgatttcgtaccgggaattcattgcccacaaattgtatggttggtttttatcttgcgaatagttgcccatatatccgatgtagccgttttccaatgagaccattttaacaaatgctttcggaagacggatagtctttaccaagcggtattcgtccacatcaaacaccaatagcttttcgtctattcttgacaataaattcaaggtccggttccgggaatcgataaacatatcggataattgcaaatattcttctgccccgcgtcctttcctgcttattttatgcaacaatttaccctgtaagttaaaaatataaaccgcttgctcaggagaaaaggtggcgacatacagacgggtttcgtaaaagatgaccttatcaatctctcctatcagaaccgagtcgtttgtttccaaaggaacaatagtacaatcttttaacaaacccattgtatgaacatccttcatctcttgagtgaaatcgaaatgggtgcaacgagacactccagatggtttagtccgacaaccggataacaaaatgataatggcaatcattaccatacaacttaacttttccatgatgaaaacaacattatttctgtttcttatcctgtcttcccccctttttatggttaaacaaacccaataaatatagacatctatttatatcgtatatcccttttcattatttgatttatatacttaacaaatattattctatatttctgaaaagaagacagccaaaagtccgaaaagggttgttcgggaaatgatttttacaaataacgttatttttatataaaatcaacccattgatgaaattaataattatattcaaaatagatataccattgatagttaacgacttaaatataatcaaaaaacaattctcaatttgcatccaagcgaatacggcggtaaattgtttcgtgggaaatattcatatcattgaattctgtcaatacatctaccctattttcattaaccgaatcgcctctacgataccctcgtaatcgtcgggatgaaaccaacggatatcgtcatcgcgccggaaccaggacaattgtttgcgggcataccgccgggagttgcgcttgatcaggcggacggcttcggcataatcggtctttccctcgaaataatcgaacagttctttataacctacggtattcaaggcattcaaatgacgcaaaggccacaaccgccgggcttcatcttccagtccttcctccagcatcaggtctacccgccggtcgatccgggcatacaactcttctctttcgcggttcaagccgatacggacaatacggaatccccggtctttgggggtgtttttccgtagcgaagagtagggtacaccggccatgcaacacacttcgacagcatggagcacccgttttccgttgttcagatcgacctgtccgtaaaatacaggatccaattctttcagcatctgccggatactttccaaaccttcccgttcatatacctccatcagcccggttctcaattcaggagaaatagtcggaatatcgtctatacctttacatacggcatcgatatacagcatcgatccaccggtcatcaggaccacttccttctcctgaaataattcccggatccgctccaaagcctgcacttcgaattgccacgaattataataatcgtgcaccgagatcgtttggataaaatgatgccggacagcagccaattgaccggatgaaggcactgcggtccctatccgcatttctttgtagatctgccgggaatcacaagaaatgatttccgtaccgaacgctttggcgataccgatactgagatccgtctttcccactcccgtcggtcccaataaaacaagtagtgttttcatcctgactgattttcatgacaaaggttacaagtgtccgcattcatttttgtgacccttgtaacctttgcaaccaagtaactgaaaaaaaactatagtttatctatataatcgtccagactttcatagcggtcgtcatacccatcgtcgtcgccataactatcgtccctataatcgtcgtcttcatcaccgaagcgaaaatcttcgtcatcgtcgtctcctccccttctgcggcgtccgctaccaccgaattcctccataaaactatcgtcatattcgtcgtcgtctttatcgaaagcccaatcttcattggcatcgtattccgtctgatggggcaattctccttcgcaatagacacacaagggcaaaacatcggcagaatccccgatatattccccggcatattcgactttcagatactgattggcaaagaaatcatatacatattccaattcgatgcaactggcattcaccacttcacgaatggtcgtaacatccatcaccagcgtattattatcttcttcatcgtcggccgacatttccatcagagcaatttcttttccccggtttcccattttatccaaggtaaaaaaggaggccatctgcgaaccgtcgaagttcaatgtttccaccaatttatcgtgcaactgctgaaaagtctgctcaccgttaatagctatttcacacctaaaatcattactgtctggtttactgatctcaaatctgtagtccatattattaagtttttataatccaaaactagcaatacctatgccggcaacaattcccattaatactaaaagtaataccacgaccacaacccccgcaatgcagatggaaataatcccgcacacccggcctgcattcacattcttgaatgaagactcggtatattcatccggcgactgcaaatacagtttccgttgtcccccggccaagactacggcaatgatccccaatatcaaaccgaagaacccgtaacaccaacaaaatatcagggacagaattcccaaaaccaatacgaccgtcgcattgggcaggtcctttttcgctccattcattatttccataatacactgattattaaatttatattctgtttcctgtttttaccttccctcctcatttcttcttcggtttatcgcctggttcattaaagcaaatatgaaattaaaattattatcaaacaaacaaaaacgacattttttaacaacccggccaacatttttttcatatcggttcctcaggaataaattcgagcttaggatacgacgacaggccgataaggttacaggaacaagcatacaaatcaaatcacctgccccattcttataaaccggaatacataaacgaggagaatcgtagcgacacaacaaaatccggttcctttcaaaaaaccggcagagatctttctgatcccacaacaacgtccgatcagaaacaggccgaatgcgaaaaggggaactattcccggccagctaacgaccgctgcctgtatatttccttttaacaggagtaacagcgcagtctgaaatccgcaaccgggacattggatcccccaaatctccctgaaaaaacagggcaactgatgtgcctccagccattcgatcatgccgttatacgcttaatttccccggattaccccttcgagaatatccatcgcttctttcaccagattgaggttggcctgagtccccatatgtccgatacggaaaacttctcctgccagacatccgtagtttccgccgaccaccaggccttcggcccgcaaacgtgtatccagattcttccaggatattttctgcggaacgtagactgccgtcactgtaggagaaggtacagcatccattgccggatataatttcaatcccattttaacgatccgctccctgcaatatccggccactttctgatgacgtgcgatcactttgcccaatccttcttccagaatcagttcgcaagccttattcaactgtgcggttccttgccaataaggagtataagggaaataagcattttttaccgctgtacggaaaggtaagagggcatcgtaccccacatatcccacttcttcgattatttcccacgcccggtcgctcaccgacaaaaaagacatcgaagccggtgcagacaaacatttctgcgaagcccccagacagaggtcgatatgccattcatcggttttgactacgctgccccctaatccggaaaccgcatctacatataataaaggtacggcatatttttcttttaaggccccgatttcagccacgggattcatcgtcccgctcggcgtctcgttttgtaccatcgtaatcattttcggctggaattcccggatagccttttcaatcagatcaaaatcggtaaaggtctcgtcgaatccgaatccgaccgtccttacctcacaaccgatagcctccgccattccccccataccgtaaccgaaaagcccggtcgacaacaccaacactttatcccccggcaacaaacaactcttcaaagcactccaaagcgccaacatcccttcaccggtttgtataacgacactatttttcgtctgcataattttacgcagcgatttttcagtggccttatacagctcgatatactctttttccaggtcggcagaaccgaaattctcctgccctgcctccaaaacttcccgggatacagaaacaggtcccggcaccataggaattcgatatattttcatcgtttaaagtatttagtaactaaagtaaaaacatacaaaaatattcttttcacctgaaataacgctaaaataaaaagaatgattcaaaattatccatatttcatgattttttctaatttcgcatcatatgcagtaacccgaaaacgacatagtagaattgaaaaaaggaaacaaaggttttctggcacagtttttcgtttttagttgataaatagtatatatttgtagcttgaaaagttatagtcaaaaatgttaaaaacggaacaggtagtaaataaaattattgaagcgctggaagataataaagcgcaccggattgtaaaaatcgatttaagaaaaatagaaaactgtttttgtagttttttcgtaatatgtcatggaacttccggcacgcatattgcagggttaaccgatgctgttgaagaaaaagtgagagaagatctggatgaaaggccttttcatatcgaaggattgaatgcagcacaatgggtagtcgtcgattatggggatattgtcgtacacatttttgaaaaagaattgcgcgactattatcaattggaagatttctgggcagatgcacagatcaccgaaatagccggagagccggaaatgctcacttattccggttatcatacgacaaacggaacaaattgaaaacagtaaagaatacaaatattgcgaacataccaaatggcagacaacaacgaaaacaagaaagacggaggattcaattttcctccagtagggggaggtaaaaatatcaaagctccgaaattcaacggatattggatgtatatcatactggcagtcattattatcggatttcaatttttcaatatgaatcccgatccggtaaggacaacctggcaagaagtcaagactaaaatgctcgaaaaaggtgatatcgaaaagattacggtcatcacgaataaagggcaggcccaggtatatatgaagcccgataagatcgagaattactcccaattgaaatcgcaggggttcaaaaattccagtcccggtcctcagttttacttctcaccgggcccgttggaaactttttccaaagaattttccgagctccaggaaaagactccggcagcagcggatatcaagatcgactatgatcaggaatacgacggttggggaaacctcttctctatctttttcccgatcgcccttttggtatttatctggattttcttcttccgccggatgagtaaagggggcggaggtcccggaggagtcttcaatgtcggcaaatcacaggccaagttgttcgataaggacacccacatcaagattacttttaaagatgtagcgggattagctgaagccaaacaagaggtggaagagattgtttcttttctgaaatctccggataaatataccaaattggggggtaaaattccgaaaggagctctcttagtaggtcctccgggaaccggaaaaacgctgatggcgaaagctatggccggcgaagccaacgtacctttcttctcgatgtcgggttccgactttgtggagatgttcgtcggtgtcggtgcctcccgtgtccgggatttatttaaacaagccaaagaaaaagcgccttgtattatctttatcgacgaaatagacgccatcggccgggccagaggtaaaaaccccaacatgggctcgaacgatgaacgggaaaatacgctgaaccagttactgaccgagatggacggtttcgagaccaattcgggggtgattattctggctgcaaccaaccgggcggacattctggacagcgccttgcttcgtgccggacgtttcgaccgccaaatctatgtcgacctgccggaattgaaagaccgggaagaaattttcaaagtgcacctgaaaccgttgaaactggccggagatgtggatatccctttcctggccaagcaaacgccgggtttctcgggagccgatattgccaatgtcgctaacgaagcagctttgattgcagcccgtaaagacaaaaatgaagttgaaaaacaggattttctggatgcaatcgaccggattgtcggggggctggaaaaccgcagtaaagtaataaaagtaagtgaaaagaaagccatcgcttatcacgaagccggccatgctaccgtctcctggttgctcgaacacgcccatcccctgttgaaagtgactatcgtaccccggggtaaagctttaggagcagcctggtatcttccgcaggaacgtcagatcacgacaaaagaacaactgctggatcaaatgtgttctgtattgggaggacgtgcagccgaagaactcactttcggtcaaatctctaccggagcacaaaacgacctggaacgggctaccaaacaagcctatgcgatggttaccattttcggtatgagcgaaaagatcggtaatctgagttattacgattccagtggtcaaagcgatttcagtttcaccaaaccttattcggaaaagaccgcagaactgatcgacagtgaagtaaaagaactggttgaaaatgcttacaaccgagccaaagaattacttaaaactcatcaggaccaacatcggcaggttgcagagttattgctcgaacgggaagttattttcagtgacgatctggaacgcatcttagggaaacgcccctggaaagacgatgaagaagaagaaacgaaggaagagaaaacagtcgaaaatgaaataaaatcgctatgaacgattgggtagttattttcgaaaccggccagctctaccgggcagagctggttaaaagtttgcttaacgataacaacgtagaagcagtgattctgaatcagaaagactcctcttttaaaataggagcgatcgaagtcatggttaagaaagaagataaagggaaagcagcagcaatcataaaatcagtcaattgtgaataatttcggtaaacgggcaatcagcggattcctatttgtggtgatactaacagcatgtatttatatacatccattttgtttttttgcacttttttttattataaacattatcggattacttgaattcagccatatggcagaggtgattcatatccgggtcaaccgtaccatgtgtatcctcagcgggagcctgcttttcatttcagggttcattcataactatttcggttataaagaaggttatctgtttttcttcagtgccacattctttatggggatttgggaattgtaccggaagagtacccatgcttttcagaatatggctttcgggatttatgctctgttttatttcaccctgccctttactttgctgatttacctcccctacttgtgtacgggcaggtggcaaccggatattatcttctttcctttcttattggtatggttcaatgacacttttgcttatttattcggttcgaaattcggaaagcataaattatttccccgtatttcgcctaaaaaatcctgggaaggaaccatcggaggcggactcacgacactggtcggcggattgcttatcgctccccatatcgaaggtttgtcttatattgataccaccgttatctcggccattgtcattgtattcggtagtttcggtgatctcgtagaatcgatgttcaaaagatgcatcgagatcaaagattcgggacatatcatgccaggtcacggtggggtattggaccgattggattcgattttgtatgctttgcctgtaatcttcgtatatatcgcctttaaattcggttgctgacctatagtaaaccgaatttattcgttcgggatattagcttttaaatcgaaaattgatacctttgcgagctgataccgtataaatatttaaagttaaaaatatgaccatacataaagctggatatatcctgttattgaaaattttaatcgtgctgattatccttaatctggcatctttttatttcatcaataatacctctattgtctatacaattctggggattacggtggttatgtatcttcttgtcgtcaattttttccgttttccgaaccgggtgatcatacaagacgataacacgatcttagcccctgccgatggaaaaatcgtcgtgattgaagaaaccgaagaaccggaatattttaaagaccgccgtcttcaagtctctatttttatgaacattttcaatgtacatatcaactggtttcccgtaaacggtgtgatcaagtatttcaaataccacaaaggcaattttgcagcggcttatctacccaaatcctcgaccgagaacgaacggactaccatcgttatcgaatgtaataacggtaagaccgtcctgatgcgtcaaattgcaggggctatggctaaacgtattgtctcttatgctcctgtcggaggacaggcccgtcaggatcagcacgccggttttatcaaattcggttcgcgggtagatctttttcttcctctgggtacccaaatagaagtgaaattgggacaaaaaacgaccggttctcagacgataatcggaacctttaaataaatttcagatttacggacgacgattcggatgacttttcccatcggaaatcccagttctaaagtcacaaatcaaattaatcatgtcaacacaatcagcagtaaaagtggtaaccacccatgttttatcggagatgaaactcaagggtgagaaaatcagtatgcttacttcatatgactattctatggcccgtatcgtcgatcaggcaggcatagatgttatcctggtcggcgactcggcttccaatgtaatggcaggccatgagacaaccttaccgatcaccctcgaccaaatgatttatcatgccgcttcggtggtcagaggagtaaaacgggcattagttgttgtagacatgcctttcggtagttatcagggaaatagcaaagaggctttaaactcagccatccgtatcatgaaagaaacggctgccgacgccatcaaactcgaaggaggagaagaaattctcgaatctatccaacgtatcctgtcggccggaattccggttatgggccatcttggacttaccccccagagcatccataaattcgggacctatgccatccgcgccaaaaaagaagaggaagcggaaaaattggttcacgatgcccatctcctggaagaagcaggttgttttgccatcgtgctggagaagattccggcagctttggcagccagagtcgcccaagaagtcagtatccccatcatcggcatcggtgccggtggcggtgtagacggacaagtcctggtcatccacgatatgctcggtatcaatcaggaattctctccccgcttcttacggcgctatcataacctatatgcagaaatcagcggtgctgtcggcaattatatcgccgacgtaaaaagcggtgatttcccgaatgagagagaacaatactaataaagttataggctataagctaaaagctaaaatgtttatctatcttttatttacttttagcctatagcctttagcttatagcatctagcttatagcctatagcctttaacttatatcttttatttatgttagaagttttatacgaagataatcatatcattgccgtcaataagaaaatttcggacattgtacaggcagataaaaccggagatacccctttgagcgaagaagtaaaggcgtatatcaagaagaaatacaacaaaccgggagaggtttatctgggtgtcccccaccgggtggatcgtcctgtcagcggtgtagtgatttttgcacgtaccagtaaagccctcacccggctgaataaaatgttccaggaacacgaaaaggagatcagcaagatctattgggctatcgtaggcaatttgccggccgaggatcatgccgtactcacccactatctggtgcgcgacccggaaaaaaacaaatcgcacgcctacaaccagcccaaaaccggagccaaagaagccaccctggaatataaactactcggaagttcacaacgttattacctgctcgaagtgaagctttacacgggccggcatcaccaaatccggtgccaattggctaagatcggttgtccgatcaaaggagacctgaaatatggttttccccgttcgaacgaaggaggagggatcagtttgcacgcccgttcgatcactttcaaacatccggtgagccgggaaatgatcaccatcacggcaaaacctcctttgaacgatccgctttggaaagtattctatgaaggaatagttaactaacgtcatcaacctgatgaagcgggaattgaccatattactgacagaggctttcataaaagatatcgaacgctacgaattggataaaatcggtttcatccacgacacctgaagggaaaccgattttatccttcaatgtattccccaccccacaaccactttcaaagatgttgaaagtgaccggaaatggtactccggaattttactgttatattcacgttaaaacattcatatagcccatctattcggcagccagacagtgaatgacagaataaatggcttccgccacctgttcgtccgtagccatcgaactgtccagcatcaaatggtaatagtaccggtcgccccaatcgcaaccggcatagtgcaggcagtgttcacgccgctcctggtcggtacgtttcagtaaggcttctgcacggttgttctctatcccatattcagagattatgcgtttcagacgggcagcctcatcggcataaacaaaaacatggagacaccggggacggcctttcagaatgaaattggcaagccgtcccacgataacgcacgactccctgccggcaatatcaagtattacccggctctgtgcgcggaatacggcagtctgcacaggatcgtcatacaacagtcgtccgtttacggtctgttcattctcctgcacggtgcattcgcccaacccgctttgctgcgcagtgagcgtgataagctccctgtcatagaatttcacccccaaccgctgtgccagcagttccccgatatgatgcccgccactaccgtattcacgtgaaatggtaaccacaaacggcagggattttccggaggacagggtggtatcctctttttctccgagaccttgcattctccggcggttctccggattgaacgacgaggcatgacagcgtccgaacacataatagtagccccacgacagcaggcagggcacgatcatgcagaggaacatggcatcataccccagccatttcaccaacacgcctgccagaaagccgcccagcgcaataccgaaatcgaaggccacaaaaaatgtggaactcgcagctccccgccgttcgggagctacggcgtgcatcgccatggtctgcaaggaaggctggatagccccgaaactataccccaacaggactgccgacaacaggtagcaaggcacgttgtgcgcaaatatcaacagcaatatgcctgccacgatagctgcgttaccggtataaaccagccgcgcctccccataccggtcaacggcacgccccagcagaatacgtgtcccgaccgtggccagagcgatgaagatgaaatagatcccgcctccgggcaaatgacaggaggcagcataaatcgctacatagacttctatcacgccatacgccatcatgaagaagaactgcgtaacggcagcgggcactgacatcggttcgaacagttcacagatgcgcagcggagcgtcggataccgtgtagttgcgcgaccgtatgcccatacctgtcggcggaagaatgggtggttatctcatcacaatttgtgatgacatcaaagaataaacgtccaaaatccgctttaccactggcttttaccgagcatggcgttgttatgctttcaagcgtattacgtagtgatattgccgtacaaaccagcgtacttatcacacgtgcatttgtcgctatgcggcagatgatagctaattcccccgttatcatgagtgctcaacaccaaaaggaaatgaaagaactcaaagaatatatcgaagatgtttttgccgaccaaaacgatataaacgaagatacccggatgcaaattgagttgattaaccaggtattggcggaattacagg

SEQ ID NO: 5965 - DNA, 158 bp, Unknown
  gut microbiota DNA sequence
aatagctaattcccccgttatcatgagtgctcaactccaaaaggaaatgaaagaactcaaagaatatatcgaggatgtttttgccgacccaaacgatataaacgaagatacccggatgcaaattgagttgattaaccaggtattggcggaattacagg

SEQ ID NO: 5966 - DNA, 943 bp, Unknown
  gut microbiota DNA sequence
aattaattccttatttattaataaaaacaatttgaaaaattatgaatgcaaaattattgaagaacctgtttatgacattggtcatagcaatttttatctcttcctgttcatctgcaaatgattgtacaatggcttccgatgaaggtgtagctaaagtaaaggaacttgtaaaaaaacatgtggatataaacgaatgtaaaatttaccgcatagaatggaaagaagataggcaagaacgcaaattggaaaacgtattgagccaaatcagcgtagattacatcgacaagaaggacaatgactataatttgaccattaattatacggatggtgaatttgtacccgaagaaccgagaaaaggaaaattcgcatcaaattcttataaatatactacagccattgagattgacggaatgaatgccgaggaaatacggcacaatattgccagtggcggtgaattggtaatccttcaggaagaaggcgaacaatatgagttcaaatcggtagaaaaatatatgctgtatatgcgtcccgtccccaaagattacgaagaccattggaagaaatggggtgatgacaaaaaaaaggagtatcggcaattgcgccagatgttcgaactcaattttatcaaaaaggacgaacaaaaggaggtcaggggaagacacgtttggacgaactattacaccgtgccgtttgaaactaatgaagccggtgaagttgagatagaacaataatcctgcttgcccatgacactgtttaccaatacaccaaagataagcgacagcgaagcggaagagctgttctctgccggaatgtcacttctgtcttgcaaggctttccctgccgcttatttgtgtttcaaccgcattccgaacaaggatttcaggctgttgtacaacaaggcgctatgttgcttcatggtaaaatggcatgatgaatgttacag

SEQ ID NO: 5967 - DNA, 383 bp, Unknown
  gut microbiota DNA sequence
tgtccgcatttcaaaatcaccatcgtcaagcgcagccaagggcagtccgctgttgccggggccgcttatcagagcggcgaacggctgttcagcgagtacgaccagaaaacgaaattctacaacaagaagaaagaacttgtccacgccgagattatgctgccgtcccatgcgccgcccggatatgcagaccgggcaacgctctggaacgccgtagaagccgtagagaaccagtggaactcccagcttgcccggcgcatcgtgctggcgttcccggtggaggtgccgaaagaacagtatttgaaaatgattcgggaattttgtcaggagcagtttgtttccaaagggatgattgctgactttgccatccacgacaagggagatgg

SEQ ID NO: 5968 - DNA, 23180 bp, Unknown
  gut microbiota DNA sequence
gaaataacccgttccgtacccacagccaccttcaacatagcacgcaggtcggtttccaccgctccgaaatgttctgctccgtagtgcaggatatccgactctgcgggagttgcctttttagcccggatagcatcggtgaccacagccgtgctgatccccataggacaaggcacctgacacatcccatccgccgcacaggtctgttcgccgatatagtcatattctttttccagctccctgctaccggtccgttcaataattcgtcgggcctgcaatcgctggcgaggtgttagcgtaacataacgagaaggacaaacatgctcacaaaacccacattcgatacatgtatcggcctttttatagttcaactccccggcaaaaagtgtcatcttcttgatcgaatgtaaatgggcatccggatcttcattcaggatcactcctttattcagtatacccttcggatctgccagtcttttcagttcctgcatcatagcgtaaatttcagttccccactcccgctcgacaaaaggggcgacagcacgcccggtaccgtgttcaccttttagcgaaccgtcgagcgaaagtaccagtgtgaccattccttccataaagcgggaaaagttattgacctcggttacagtctccatccccgaagtcaccaagggatgtacatttccatcgcgggcatgtccgaaaatagaaccttcataaccatgttttcggaataactgctgtaatcctccaaccagatcagccagttttccaaccggagcagccacatcttcgagtaccacggcattacccggaatacgagcccctgcaacacaaggaaaaatgccgttacggacctcccacagcttttcccgctcgctcaccgtatgggtgaactcttccatatcgaccataccatccaatttcttcagccggggctgtagacgttttaccatatcctgcatttcttccggcgactgtgcaccataatcgatcagcatagctgtcgtcccccggggtaattccggacggtttcccaggctgctgagggcagcataatccatcatctctaccgataccgccccactttctccgaggagagctgcagaagccgccgcttgcgtagcatccttgaaataaagcatcgccgaactatacacaggcatcagcggcaaggtgttcaactccgccgaaacgataaatcccaaagtaccctccccaccgatcagcagatgagcgaaaatatccatcgggtgttcgaaatcgacgaaagcattcatgctgtacccggttacattcttgatcttatatttttcgataatccggttacggatttcatcgttcttcaggatttgttcccgtatccgcaacaacccctgacataaccattcttcctcctgctcaaagcgttgccgatcagcagcaacactactattgtagcgatggccgttagccaacataaactcgatagcacttaaagtatggtaggaattataacgcgttccggtctgcatcccactactgttgttcgaaagtattccccccatcatagccgctatagccgaagcaggatccggcccgattcttgtctggtattttttcaatatcgtattgatctgatgagcggtcaaccccggctcaaaccagattttccgtccatgatcacgtacctcgcttttcttccaggccgtacgcaattcacagataatcccttcattaacactctgtcccgacaacgaagtccctccggtacggaaagtgacgttcaccccggcctccgaagcgatagccagcaactgttgtacctgctgcggggtatcgggccgaacgatgatttccggtttgatatcgaagtaagaaccgtcccgggaataaatctcccggtaaagatcggaagcgagaatctggtgggtatcgaatattccacccaagcgatgtaaaagttgtctgttcatatcatccccgatttttacgcctataccacatttccccataagcagctacctgtaacgacccgccgatcagccccaacaccgaagccatcgaaagccaagaactaaccccatggaaatcaggcaaaattgcaaaaaacagaacaaaaaacagcaagaccgatgccagtactccgctcaaacgcgtcagaatattggtaaaaaaactcagtgctaccgcccaccaacagattccgatcaaaatcacccataccaccggacgtcctacgccctgaggtaccatagccgcatctgcagcagtatgtgcaaaatgcaaatacccataaacaacataggccaaacctaacataatccggccaaaacttaaaacaggtttcatcgatatcatatttactatttaccgattaaacccattctcctcccgatttgttacagcccatcgtaaaaaaatactccaaatccatctacttcgatttcaattttcggacagacaattttacctccgttaacgcagatacctctcaaagttacctgactatccttcacattcaagtgaaccagaactccatcagcggtgagtcggcaatcggccgaccaagaaataaccaaatcagctccagccgcctcttccggaaagaaagccatcttctcccactcacaactatcgcagatcgtcaataaatcggtttaacatgattattttccatccctttgccgattagaattcacatttacaaaaaacatattcacctatcgtgtgatgaaattatattcctaaaccgaagatgtctttcacttatttaaatcccccctgaggaccagatttaataatccaattccaccctaccaaactataaaataagtcgcaatatcaagaaaagaaggatctattttatcacttccgatttttttaattttaggttttgtataaaatcacagggactgcgtatatcattataatcccctaccccgacaaatcaaggttattggtacgttttaaaagcgtctaaaccaatccccttccctaatcacaaccaccccggcaaacttcagaaccccttgctttccctgtaactaaaaaccatacttctatccaccatccggagtataccaaacacttagatgcaactttattttttgatatagatcaaattcttctgtaaagaaacgtattatttttgcactccgaaaatttgattacaatgaaaaagagtcttatcgctttagctttcggcacattaggattagggattgccgaatttgtcatgatgggcattttgcccgatgttgccaaagctttaaatatcagtatcgctactgcagggcatctgatatcggcttatgcgatcggggtatgtgtaggcgctccgcttctgatcatcgcccgcaaatatccgttgaaaaatattctattggtattggtgagtatgattatgctgggaaatatcattgcagcttctgcgcccaactattggattttgatgttggggagatttatctcaggtttaccccacggtgcttatttcggtgtcggttctatcgttgctgaaaaactcgccgacaaaggaaaaggatcggaagccgtatcgatcatgatagccggtatgacggtggctaatttattcggtgtacccctgggcacttcgctgagtgcagcgatttcctggaggatgacttttttattggtaggcgtttggggagtgcttatcctctactatatctggcgctgggtgcctcaggtagaaaaactacccgataccggtttcaagggacagttccgttttttgaaatcaccggctccctggttaatcttaggagcgaccatgctcggtaacggaggtgtattttgctggtatagctacatcaaccccttactgactcacgtgtccggctttcgtcctgagagtatcacgctattgatggtattggccggcttcggaatggtcgtcggcaacctggtcagcggccggctttccgaccgtttcaccccgggacgggtagcagctttcacgcagggcagtctctccattttactgttactgatctatttcctcgcttctatctcctggttgtcggtcattttaatgtgcctctgtactgccggactattcgccctttcgagtcctcagcaagttttactcatccgtttctcccccggaggagaaatgttaggggcagccagcgtacaggtcgcttttaatcttggaaacgctatcggagcatattgcggaggattaccgttacaagccggtttaagttaccgctatccggcattgctcggaaccttctttgccctcgtcggttttatactactggtccttttctccagaaaatatgaaactgcccggcaacatgtataaaataatttcaacacaccatgaaaattacacacatcggaatctgaaccaaacaattagaagtattgaggagtttctataccacctattttcaagggaagtcccatgcaaagtatataaatccgaaaaaaggttttgaatcttacatgcttcatttcgaaggaggatgtacattggaaatcatgtcccggacagatgtagaccaggtacggaatagtgaagaccgggaattcatcggttttgcccatcttgccttttcaacggggagtaaagatcaggtcgatcgactgacagagcgtctccggcaggcagggtacaaggtcatcggtgaaccccgcacaaccggagacggtttttacgaaagtgtgattctggacccggacaacaaccggatcgaaatcagtgcttaactgatcaaatcccgataattcgtatgcctcaataaaaaggcttgagcaaaagcacagttcgggatcacactataatggtgatcccgggcataatccagtgcgtacttcatcaaagccgatccaactcccataccttccatcggtatcggaacaagggtatgaaatatatccatcactccatcctccaggtcgtactctacaaaagccatcaagccgtttcgggcgtattcgaaacgatggcgcttctcatcatgcttcacattatattccatagcttctctttttaaataagtcacactgatgatacgttttctaccctttactgttacacgatattccgtcaagaaacgccggcaacagaaatgaaagttttccgtataacaaagaaaaaaggataaaacgagactatgaatccaggaatcgatattggggagagaatacggcttgtgtttaaaaagacagggtggtctgtagcttatttcgctcagcaaattcaaaaagacagaaccatcgcatacaacatttttaaacgaaaaatcatagatacgtcattactttacgatatttccatggcattaaacacggatttctttcaatatttttccgattgcctggcagaaaataacaaacttatccgcatggaaaaagaaaaaaaatcttctcctcatccggtaaaaaagaaaaaaatcctcttagaactggaaatcacggaagaagaatacggacatttcatgaaccatatattgaaagcgggacaaaatcccggttctgcccaagaacctgattcttctaatcggtaaatttgatccgaccatccacccgggggattatttttcccttcgtctgaatatattcgatcagcacatccgatagagagcgggaggtattttccctccctgtaatattttccaatccagcctcatagccatctttcccggccgcaacataatcacaggtagccatataatacattttatcgtcttcaataggccggccggctatcgtcaatgttctcacccgcccggaatcgtaaaccacccgtacctcacgggacacctgagcaaaagctccgttgcccaaagggatagaggcgatataatcgaacaatcgccggacttcactaccggataaggctaccacctcgaggacgttatcaaaaggtaatacggccaaaacatctcctttggttattttaccggcaggcaggctttcccggataccaccggaattagtcaaagcaaaatcgaccttcagattcaacttcccagccttccattttaaagcatcggctaccagatctcccaaagccgtctcgccataacgggccagattctctccatcctgaaaaagggaaaattcttcggtagcctcccctacgacggttgccaaatccttctccgccgcttcgacataaggccgcaattgcaggctcaaaacagaatccggctgaaatccttttatcaataccggtttccaataaaatcctacaaaacgtccttttttcattcttataataccttcaccgacgtatcttccactctgattagccgtaacgatcgtcgtcttatggatatgctccggccgctcgataaaagaatgtgaatgtccgtcgaccaaaatatcgataccgtctacttcctgtgccaatcggtaagaagtgataaaaccgggtgccgactcggtaaatccgagatgaaccagaccgataatcaggtttacctgttgctttttcaataacttaaccactttccgcgccgccatcacctcattttcgaaagtcacttccccggcatggatactgacattttctgtattcttcgtagtcaatccaaagattcctattttcactcctcctatttctttgatcagatattctactcccaacggagttccattccgttggatattagacgtcacaaaaggaaattcggcccattgcatctgcttcaacaaaacgttcaggggtttatcgaattcatgattccctacagtaacagcatcatatcccatgtaattgtaagccaagatatcgggctttgcatccgccctattcgaaatagcttgcccggtattgatatccccggcatcgaccaggagcacataaggattcttctctctcaccatccggataaaagtagcccgctcagccattccccccacactatccacaggcaaaatgctaccgtgactatcattggtattcaagagtatgatttgatactcccggttattttgataaatatacagtcctaaaacggcaatgactaccaccatagtcatcccccatatcttcagcgctctcattatttttactttaatcggtcattcgtcacaccaaccttgttcggcagccaaagatagaataatctatcgaatatttctttgatattctattcacaatttaataactttacccacgtgaacacaaaaacaataaatgatgcaagaactagcaataaaagatctgactgaaaatttttttgaagcgatcggtaaagaatggatgttggtgacttccggttcaaaagaaaaattcaatacgatgacagccagttggggtggtatcggttttctctggaacaaagcagttgcttttatctttatccggcccgagcgttacacttacgaatttatagaaaagaacgacatgctgacactttctttcctgggtagtggtaaccgttctatatacaacatttgtggaagtaaatccgggcgtgatacagacaaaatcaaagagagcggactgcttcccctaacgaccccggatggtaacgtgaccttcgaacaagcccgtctgaccctcgaatgccgcaaactatacggccaattgttatctcccgagcattttatcgataaaagtctgccagacaaatggtatggagcacagggaaatttccataaagtgtatgtcgtggaaatcctgaaagtatgggagaaataagcggttcaatatagccacagcaggattcgtaaagtttataaagcttcggtttcgcccaatcgtcacataccgataagatccgatactttacaaactttacgaattttataaacttcggactgattcaagccggttttacgacactacgtcctaaccatactaaaacaattcccaatacaatactcaataccagataagccgaaaaatacccccaatgtttattctgcatcagtaaaaacatgtcgtcggcaaaggacgaaaacgtagtgaaaccaccacagaaaccggtgatcagaaatacattcatattggcagaaatcaggtgagctttttcagccataccgaagaatattccgatgacaaaactaccgataatattcactgcaaaagttccccatggaaaaggagaagaaaaaacataatgagctaatttacctaccaaataacgcaggcaagtaccgataaatcctcctgccccggcaatcaacatcgctttaaacatagtttcaaattttataatttaacaattaaactttctccggtaaatgcttcaataccaaaggtccgacaagcagggtaatcactcctcccaatacgagcacagcaatcgctacgattaaaaccagtttacctcccccgagttgcagtaacggagggataataaaagtagcgataatagcccccaatttacctaatgcagaggcaatcccctctccactcgcccgctcctgtaaagtataaatccggctcggtaattcgaaggtggaaagatgcggcccggcatttaaagccagttcaaataataagaatccgcctaaggtcactcccaacggtgcctgatagatataccctaaaagggtgacgaataatccgagagcacaaagaaagaaaccgaaggtctgggcatggagcaggttcagttttcggacgatagtcaatccgatgataaaccccaacataacgaagacgttgatataaaacgtaaaacgcaaagattcgaccaccctggggaaagctttgccgctttcgggaatcaatcctaaggtcagtaacaacacaggagtaaatataccgataccgtatactcccatgccttcacatccccacggaataccgctgagaacaatccgttttatatttccccgggcaaaaatatcccggcgggaagattggggccgggttgtcttatcttttttactggccaactcaccgatgtacacatcctgccccagaaaatgtttgacattcttttcagcttcctctactttcccatgaagagccagccattcagggctctccacaaaccagagacgagccagaaaagtgacgacagcaaaaaatgtcagaaataaaaacaaatgattccaaatctccggatcggaagattctttcaatacataccaagccaccaggatcatcccgatatttcctaaaccagaagtagccttggaaattcccaacatggtccgcttccattttttaggcataatctctgaaacatacgaaggatctaaagcatacgccccgcctatcgcaaaaccgatcagtagcaaacagaccgtcaataccaccagagaatgactgaaataaacacccagcgaagccccggcaatgaccagcggacaaagccggaaaaagaaaagatacccgtatttatcactgaaccgcccgaaaaacaaagaccccagcattataccgatcaatccgcaagcaaagataaacccctgcaaccagggagataatccaggatgatgggtcatggcgatcaagggagcgataacacccaccaaaatagccaatgccccaccaaaaaactgtccggcagaggcaatcattaaaataaggatatgccctctacgtaaaggcatcgtatccatgttatattccggtaatttttgactctctaccataaatctgaaatttctctatccttgttgtaatatctttttatccagattcagatgcggccacaggaacaaccaggttgccacacaaaacggaccggtcaatgtcggaatccccaacggagaaaagaaagtatccataccggcctgaataaatacggtagcgaagattcccagcaaagtccagatggcggtccgccaattgacctgataaaaagtcattcccaacgctatagcagtaagcaccggactaaagctgaacaaaccgttggcgatatccccaccgttacattgatacaaaatggcaacggccaatgccagggcagatccgatagcagcccaaatggcagcccaatagttgctgatcgccaatccgatcaaaaacaacaatccggtcacccaggatttgatcagaaaaacctgcccgattccagtcagccaatagatcaccaagtctttaaaaccggtatcgaatgccgaagaaaaattaccgggcaattcgggagcacctaatccggaatcgggcagtccgtgcataatccgcgcagccatcagtacgaaccaggtggtcaacacaaaaggaaaagtaaacgaactcactttataaggagccaataaatggttcaatccgaccatgacccaggttgtcatagaggaaaagataacaatggccaaccacattaagggtacattccctaaaaatgtcggtaaggcacatccgaccaaaaccccgttgaatccccaaagtccggcagttcctttctctgcgggatacctcaggagatatccggtaatcgtggacataaatacaccggccaaagccccccaagccactgccggattacccgttacataagagccgtagaaaatcccggctaaaaagaataatccggtccaggcattatcctggaacatcacctgtcctgttcctttacacaggattttccaaaaaccaaaagaaaatactcttggcaaagttgctgcttgtgtttccataatttttgtttttcatttttatctccaggcaaactcttcaggtaaaggtttacccttgacttgcattcgtacagttgaacaaaattgccggacaactttcttcaccggagaggtttctttccccaacactttgaatatcaacccacagtcattcggcagatgacttattccgactgcaatatcttcctgacggtcgatataagcttttgtctgctcataaatccgggaagcttcctgaggaggagtcaatacaacgacattggcaaaaacatcataatcatgcatcgttccgatagcccgtacaggattcaggaaaggctcggcaaccaatttctcacggaacagaagcgtaccgtcgggtcggtgggcccgtgtacaaaccgatagcaagtcgtattcgaacaattccccttctccgtaatatttccttcctcccatatagatctccgaatagaataaagtcgcagtcggatcgatttcgatatccgtatcagtaatataacgactgtgacggcaagggatagtcgcttcgggcatatattcaagataggcattctcttccaatacaaagcactgtttcagtcctgaaaaattatataccatctcggcaattttcgttgctgcaccggtagatatataggcataagcatccttacggacggtaaaacggttttcatagcggtccccatccacattcggccctcctgacgacagaatataaacacagggcatttcaggcatcccctcgtcaaagtacaattcttgctgtacaatgagcggagcccgcctgtcccaatgccgcataatcgacttcttgtctttatccaactcgaataccagatccagcgaaccgaattttcccggtgcacctaaacgcatcgccttcgtcggttcgagataaggcttcaattctctacatgtcgtataatcgttcatactttcatctcttcaacctctttttccgaaacacggtcgaacaaggccatatcccggatcagagtaaccaactctttaataccttcaccggtcatacaattggtgaacacaaaaggctttcccggacgcatcaattcagaatcacggcgcattacttccagatcggcatgtacataaggagccagatcggttttattaatgaccagtatatccgaataggaaattccgggaccgtctttacgcgggattttatcaccggcagccacatcgatcacataaataaaaaagtccaccagcgcaggactgaaagtcaaagtcaggttatctcctcccgattcgatcaatacgacgtcgctatcgggaaatttagtttccatttcctcgacagcggcaatattcatcgaagggtcttcccgtacggccgtatggggacaagcaccggtctcgacaccgataatccgttcttctgccagataacctttcaacattttacggacatgtttggcatcttcggtggtcacgatatcgttggtaataatcaaaacctgtaaacccaatttcaaaaaataaggagtaatggcttcgatcaaagctgttttcccggaaccaaccggtccgccgacgccaattctgcatgtattgctcataataatttcaattttttagattttaattcataaacatcctcatcttccctttttcatgcagcgaagcgatgacgtccatttcgggggcaaaagcctgcatatcttcaaagttcagttcacgcacgattttataattttctgccgcctccgtacaaagccggtaaaggatagcctgggtctcatagtgggaaactttgacacaccgtaaagccgcattgagaatcatattgatcgctccatactcgatagccacgaacagatctttctctgtagaaccattttgctgaaaataaatcgcttgtgctacaggataggttcccggtgttcgttctgcccgaatatcttccaaccaacggctcatccagggactatcggtaatctgagtacaaatttcggccatttttttccccatacggatcaacatcagccgggcttccgcattcattttacaaaggatgatttgccggtcagcctccagaatcgtcttatagtttccgccggcagcagcccgaaaagcgatcagggccgctatagcatcactgtaaatggtctgacggagagccgtacgggtatattgttcaagcgtttgagcatcgtatacgatcccttcgaatgcagccgtttccagcccattagaaaaagaaaacgttcccaccggaaaagcagaatccgaaaattcaagtaaacgcatcaatcgggtaatctcatcaatcatcatgttatattttcagggttaagatttcggtagtttgtatagtaatcatgaatgtacctccccgtattcatgccggtgggaatgttcgtgatcgtgtgtatgatcgtacccgtgtacggcatcgtgatgatgggtgatctcctgcgaacttcccccgaacagttgcctgatttcatgtggtgccagaaaagggatcacttccaacccggtctgaaattcataggtaatatcttcaaaatgatgggtatccattacactggtcatcaccttcttgtctacagtcaaagggatatataattttgtacccttcacgatagccggccaatgttggttaccaacggcatgcccaagttcgacacaacgacgaataatctcttcaggtgttttcgctgcaatctttttcaattcgacgaccaataccggtttcaatgcgatacgtatcacgatggccactttccgctccgggtcatattcgagtatatccccattttcgatctgactgtgacgcttcaaagcgacggcatattcctgtccgtccgaacctttagcaatgaagcgacttttctgagccgtccattgatccagctccaggtattcgatttttgtgtttttcaatttctccgcccattgcgggtcagttgtcatatttcctatgacttcagaaaatattttcataaaaagaattttatagaggaagtgcaatcgaaaggttacaaaggcacttcctcatcggtgaataaattgttcgataaaccttcggatcaactaaaccaatagagttgtgccaaagagaacttctgtgccggtttaacataagcctgccggccatcgataaacacttcaaaagtctcgggattgacatcgatcttaggcatatttccgttgagtaccatatgtggtttaccgatctgacggcaaccgtgtaccggataaacgatccgttgcaacccgtatttctctttaataccggcatcatgagaagcccgggatacaaaagaaatacagctcttcggcatagccgaaccgaagctgccgtacatcggccggtagtatacaggctgtggtgtcggcaaagaagcattcgggtcacccatattcgcccagttgatcattccccctttgatgactaatttaggtttagtaccgaaaaatgccggttcccacaatacgaggtcggccattttgcctttctcgacagaccctaacacttccgagaaaccataagtcaaagccgggttaatcgtcaattttgccaaatagcgtaataccctgaagttatcgttatcagcagaatcctctgccaactttcccctcacctgtttcatataacttgccatctggaaagcacgtaaaaagttttcacctacacgtcccatagcctgagagtcggaagaaatcatcgagataacccccagatcgtgcagtatattttcagcagcctgagtttcgggacgtacccggctttctgcaaaagcaacgtcggacggaattttcggattcaggttgtgacataccataatcatatcgaacaactcagcctgggaattgataccgaacggcagcgtaggattggtagaagacggaagtacattcgccagagaagccaccttcaacaagtcgggagcgtgtccgccaccggcaccttcagtatgataagtatgaatcgtacgtccatcgatagcagcgatcgtatcttccacatatccgccttcgttcaacgtatcggtgtgaatagccacctgaacgtcgaattcatccgctacagccatcgtagcccgaatagcagcaggagtacttccccagtcttcatgaattttaaaaccacaagcaccggctaacatttgttcaaccaacggacgacgaacagaacagttacctttgcccagaaaaccgtagtttacaggcaggccatcgatggattgtaacatccgtttcatattccaggtaccggaagtaatagtcgtaccgttggtaccgtcggtcggtccgacaccaccaccgacaagcgtagtgactccattactcaggcaatggtaggcttgctgcggtgcgatcatgtgtacgtgaccgtcgatagctgcagctgtcagaatcagatgttctcccgaaatggcatcggtagcagctcctgttaccaattcaggggtaactccccgcatgatattcggattgccggctttaccgattccggcaattttaccgtcttttactccgacatccgctttgatcacccccaatatcgggtcgataatcgttacattagtaatgactaaatccaacgtacccccttctgaagtcgtagtatttgccaagcccataccatcccgtaaggttttaccacctccatagactacctcatcgccatatacacaaaggtcttttgtaatttcaacatacagatcggtatctcctaaacggattttatcacctacggtagggccgtaaaggtcgttatattgttgtcttgatattgttgccataattacttcgttttttgattctttttctggaggtcagcttctgcaccggcttcatctatgattttaaaacccaaattttttgcattcccgatggcctgaatccgtttcggataataagtcggagcatcttcatctccggtaaatccttgtaccaacccattgaatcccataacatactgtttaccggaataagcgacgacttcaacctctttttcatcacccggttcaaaacgtatagctgttgttgccggaatattcaggtgacaaccgaaagcttttgcccggtcgaattcgagataccggttcacttcgaagaaatggaaatgcgaaccgacctgaatcggacgatcacccgtattgtggacaacaatctttgctgtataccgaccttcgttgtattcgatcggctctgcactcaaaatctctcctccgactcccacatgttgtttcggagtaaaacccggtacaatgggtgcttgtttcggagtacctgccttattcatatctgccataatcttactatttaatcggttgatgaatacttaccagacggctaccatcggtaaaaaccgcctctacctgaatcaaagagatcatgtcggccactccctccatcacatcatttttggtcaatacttttgtggaatcggtcatcacctgttccagggtttttccttcgcgagctccttccaaagctgccgaactgatgtaggctacagcttccggataattcagcttcaaccctttttccttacgccgtgcggcaattgcacctaatgacaataacatcagcttgtcaatttctttcggtgttaaatgcatagttttccgtttttaaatgttaaataatattttttaatacagaaggagtatcttttttccttccggccttaacacgagaactacgctggaattttaaagttgtttcaaaaagggaaatgttattccggtatttagactaccttaaccttagagagcatatgtcgcaaatacatatagcattcattttcatgtatatacattcacatctatccattcataatccgataaatattaaattactttaatttccgggtgaataaaaccaaacctttcccgggtgcgtatgagtttaagtaatctaaacaaaacacgatgaattcaaaaagatcaggggctgtccggttacccctaaaggaacccgtaatcctaaaatccgaacacgatcctttcctgtatggcaacattgccaagagagacgtgatagaaactatcagcaggaaagccatatcgtctctcagtaaagaaatttcagaaaattataaaccaggattaccaggtatcacctttaagctacaggccctcaatctgccagcgcccttattccctggaagaagttatcattacggggttccgaacgcaatccccctctcatacaaaacccgggaagtatcagcgtcatcttcccgccagtgaccgattacagaaccgacactcgtttttatactaaaaccggtcggttattcactcacgtttcaatttttctgaaatttcaatgtattttcttatgacaactctaaaactaattatactcttatgctgtagctcaacggtagcgataagttatggccagacttcaaaagcagatacgactttacgcctggaagaagtcgtcgttacgggctcgggaaccgaacgtccgatcagtcagagccccggcagtatccatgtcgtcacccctttgctcctgcgtaacagtccggcccaaagtgtcgacgacattctttcgatgctctcaggagtgaacacaacacgtagtgacgggatcagcaatatgcacaccaacgtcagtatccggggattggccggagatgaacaaggccgcacgctcgtcctcttcgacggcattcccatcaatacttcggacgaaggctcggtaaactggaatagtattcatatagacaatgtgcagcgtatcgaagtattcaaaggtccgggatcctccttatacggcaatagcgctatgggcggagtcatcaatatcatcagcaaaagaccggtttcgcccttctcgctcaacgcctcgggttcctacgggagcctgaatacctggaaaaccgatctgggcctatccagccggataaacgacaagttcgccatttttttatccggttattacaacaaaagcgacggcttcaacaacatcccggatagcctccgcacagaacccgactatagtgtcgcccgctttatgaaagaagggggattatatgctaaggtcctctacaatccgacagccctattcaatgtcgatttagcctatgacctgtacagagacaaacggggcgaaggagaaaaaatccaagctcccgacggcgagtaccgccatttcaatcacaaccgggtccaaagtcgtttttacggggaaaaaggaaaattttcttaccaggcagcactttattttcaacgccaggattatttcaaattggacgaacggacaaaaggcggagattatcagcgtttcgatgtaaaatctcaccgggacgactggggagcgatcatgcacctgcgactcgaaggacgtcacaatgcttttgcactcggcggagaatttaagaatggaagcatcgacggaggagaccattacgtcacttcgaccgatgaagtactcaacaaaggctccatccgtatcctctctgtattcgcccaggatgaactcagtcttttcaacaaaaaaatctggttacaggttgctttacgttacgacaatgcttattttcataaaggatggttcgaggctaacggagaaaatgtctccgatttcaacacttacaacggaaagctaaaaaataaccgttgggaacatctctccccccgggtagctctgcgctataaccccacccgagccatatctgcctatatttcttattctcaaggtttccgggcatctattctggacgacctttgccgttcaggatggatgtgggtaggacctaagatcgccaatccggaattgggaccggaacagatcgataattatgagatcggcggtacgttccggctcaccaaaaacttgtctttctccccttctctctactatgctaaaggaaaagactttctgtattatgtaactacaggagaaaaaatgtggggaaaaagagatatattccaacggcagaatgtttctaaagtcgatgtaaaaggcattgaagccgacctgaattatatcccgttcaatggtttgaaaatcaacctcaactattcgtataataacccgaaagtcaaagactttaaagaaaaaccggaactgaataataaaatactgacctatgctcctaaaaaccagataaagggatatgtgctgtggaccggcgggattgcagatgtcatgttccggggacgatataaatccaaacaatataccaccgaagataattcggcagccatcgatggctttacgatttgggatgcacaggtatccaaatggtttttcgaccaccggctttatgtcggtggggaaatcatcaatatgttcgacaacagacacatgaacaccaaagattatatgtccgccggtcgtttaatgaatatcaaagtggctgttaacatcaaccgataaaaatcacgatatatgaaatggttgcactatttatttattgtcagtcttctcctgttttcgtgtaaggggcagaacgttaaaaacaagcgtcctacccggcttttaaccgatgcattacaaagggaagtggcgctgcccgatacgatccgtcaactggtctgtatccggtcttccgcaatccggttggttacttatgcgggaggagccccgttgatttgcggagtggaagaacaggaaacacgtcccaatgaatttactcatattttcgcccatcccgatctggccaggctaccgatcatcggtccgggtatggggggagatccagaactcattatggcagccggaccggatgtgatatttatgacttcgaccactgccggagaggcggatgctctgcagaaacagacgggaattcccgtatttaccattgaatacggtgatctgggtagaaaccgtccgacattttacaattcacttcaactgatcggccaggtcctgcataccgaagacaaggtcgattcgctgatcggttttatcgatgagcagattgcagatcttcaagcccgaaccgccggtacagataaatctgccaaagtctatgtcggcggcatttcctataaaggacaaaagggtatcacttctacagatccttattatgctgccctggattatctggaagccgacaatgtggcttctgaactcgattcgacctacgtatccccgataacagggacctatatcgactgggaacaactgatcgactggaatcccgatgtgatctttatcgatgtcggcggttggccattggtacaggaagattttaaaacccgtcagggactcaaccgcctgcttaaagcctatgaaaacaaacagatttataccctttggccctataacaaccatcattccaatttcgacgtcatgctagtcaatgcctggtatgccggtaaagtacttttcccggaacacttcggggaaataacgatgcgcggcaaaaccgacgaaattatgacgatgttcgtcggagctccgattgcagattctttgctccaacattggggtccctaccaaaatattttcgacggaaaagaaaatcatgagtaacgaagttttaacacaatataaaaggtaccgggccagaaaccgccgctttatctctgcgatggttttattattggccgttaccggtatcgtctccctgatcatcggttcacaccgaatcggttggcaggagctatgggcgatcgtacaaaacgaaggcacggaaatgaaccggcagatcttgttaaatatccggttaccacgtatgctggcagccgtaattaccgggattatcctatcgctatcaggagcgatcatgcaaattttgttacgcaatcccctggcctccccctatacgctggggatatccaatgcagcagccttcggagcctcgttcgggattgtatttctgggagccggagccggcattacccggtcttcagacctctttatgatcaccaatccatatgtcattaccctttcagccttcttaggcagtctgttgggattggctatcattctgatcatcatcaggggcaaacaggcctcggtcgaaacgatcatcctttcgggagtgatcattaactccctgttcggtgccggcattgcggtcatgcaatacgtagcgaacaacgtacagttggcttcgatcgttttctggaacttcggcgatctgggacgtagtgactggtcgaaattactctttttaatcgtcgcactgattccggccctgatctacttctatctgaaacgctgggactataaggtgctttgttcaggcgacgattatgcacagagtatgggtgtctatccgcaacatacccggatgaccgggatggtcgtcacctcgctgatcactgccgtagctgtgtcttttttcggagtgatcgcctttgtcggactcgtcgttccccacatcgtcaggaaatgcatcggagataacgaagaatttttaattcccggttctgcaatcttcggaggaatgtttctgttactgtgtgacacggtcgcccgcacgatcctctccccgatcattctaccggtcggtatactgacctcatttttaggggtccctttgtttttattcctcctgacccggaaaaaaagataactcagtaaaatctaaagatatgatacaaattaaagtcaaagacctatcgttcagttacagtggcttccgggcattacaggatatctccttcgaggcaggagcaggtgatatgctggcgatcatcggacaaaacggctcggggaaaagtactctcctgaaatgtatcagccggatattgaaaatcaatacaggccatatcgaaatcgggaatatttccctctcagccctttctgcgtcgaaactctccaggatagtcgcctatattccccaatcaacagactcgatcagcgggatcaatgtgttcgatacggtactattgggacgtaagccgtatattcacagcagaccggctccggaagatatggaattggtcagccggctactcacccgtctcgaactggatgaagtcgctatgcgtaatctgaacaccctgagtggcggacaacaacaaagagtattcattgccagagctttagcccaacagccctccattctgctattggacgaacctatcgccaacctggatatcaatcatcagatgaaagtgatgaaactattgcggcaactgacccaagaaggtatcctggttattattaccatccacgatatcaatatggctgcccgcttttgcaataaggcacttatgctgaaacagggccggatcttcgcctccggtatgcaatccgtctatactccggaaaatatagaaaacctttacgacatccaggtcgatatcctccgtcataacgattgtatctgtataatacctcaataaaatcaaaaacaatgaattttttacattttaccacgaatcttttacctattgtgactatgattgttctagaacctatcggtttcgtacataatacatgtaccaccagccaagcacctgagtttataaaaaaagaaatttcagaaatcgagattcttcccgaatattcggaaggtttacaggatatagaacaagctgaatacctcgatcttgtattttcttttcatcatgaaaagcgtaccgaactggtcacccgcatccgttccggtgaaatgaaaggtgtatttgcttcccgttcccccaaacgcccgaaccacctgggaataactaccgtaaaactgattcggcgggaaggtggcaaattgtatgtcgaaggagccgatgctttagacggttctccggtgatcgatattaaatattgcgatacctctgtcttcgaccaaaaacatgttcaccaaaccattcaggcagattcgccccgcatcgacattgtccgaaatatcatgcagaatgaaaccgatgagttattattaaaagctgcacaattccatggacatatctgtcccggcttagctttaggaattttgggggcaactcaggtaatgcaacaattatacaatcagcaggaagatccccaagcgtatactttaacggcagaaatgcaaaattgtccgatcgacggagcgatgtttatcaccggttgcacaccgggtacacaccgttaccagcaaggcgatccggaaaacatgtgtttttacttaaaaaataaagccggaaaaggctggaaagtcagtttcgaccccaacaaccgggaatatatgaaccgccatctccccgccgacttgtcaacttccgcgaaaggtttcgccacccttaaactcgatcctcaccaactgttcaccatcgaaacactatagttcacgggggagggaagcgattgatcgctaaagacccgccctcctggatgtccgaaaaaaaagcgagtcaccttcgtaactcgctttcaaaattcggcgccaacctactctcccaccataaggcagtaccatcggcactcaggggcttaacttctctgttcggaatggaaagaggtggatccccccggttatagacaccttttaatattttcaattctatgattacgtaccatcgaacactcttgctctgtaatctttagtttggtagcgagaggcgggcttgaaccgccgacctcatgattatgaatcatgcgctctaaccagctgagctacctcgccgttttgacatttacaccggaaagataaagaagaatatactccgcttaaagtaaacattcgggtaattagt

SEQ ID NO: 5969 - DNA, 371 bp, Unknown
  gut microbiota DNA sequence
cgaacggctgttcagcgagtacgaccagaaaacgaaattctacaacaagaagaaagaacttgtccatgccgagatcatgctgccgtcccatgcgccgcccggatttgcagacaggcagatcctctggaacgccgtggaagccgtggagaaccagtggaactcccagcttgcccggcgcattgtgctggcgttcccggtggaggtgccgaaggaacagtatctttctatgataaaagaattttgtcaggagcagtttgtttccaaagggatgattgctgattttgccatccacgacaagggcgatggaaacccacacgcccacattctgctgacgctccgggcaatagatgaacacggcaagtggcttccaa

SEQ ID NO: 5970 - DNA, 3411 bp, Unknown
  gut microbiota DNA sequence
ataatgattatcagtattatatatcatattttgaataaattactttaattacctggggcaaacttcagttgttaaagcgataaataaggcaatttgaaggtatttatatttatatatttgtttaatatccagttatttatgttgtatcatttcatatttcacttcatataaaaaacagaaatataaccttaggaatatatattcaaattgttaatttacagaaacttagtatcgaataaccttttaactgctcactaaattactgattttaaggatttaaccataccgataaatcatggattgattgtattattacatttgtaatgtatatcatattacaaatgtaattttgatagttgcagaatatatattacatttgtaatgcaatattttacaagatgcaagagagatttaagcagcttttggaagaaaaaaatctgacagcaactcgttttgctgcaatgatcaaggtcaatgcttcggcgatgtcacatattctgaacgggcgaagtaaacccggattcgatgtattggacaaaattgcacaagcttttccggacgtaaacttaaattggttgatttccggtaaaggctctctatacaataaccgtatttccactccggctaaagaggttgaaaaaatacctgttcagaaaaatttatttgaagaagaagaaaaacgctttcctatcgaagaaaaaaatacaaaagcagaagagattttacgaccggccgtttccgtcgcttcgatacctacagccaaaggaaagaaggtcaaacggattatcttattttttgaagacggcagcttcgaagattatgagaaatgaggttatcttcatatagcattcagacagcctcatttctgatttgaagtatttatatcagtccgataatttctttgacagacttacaaccattttcatccagataatcgtttataccttcgattatttttacggtgatcgccggatcgataaaattagcggttccgatttgaacagcagaagcgcctgccaataaaaattcgatagcatcggtcgcacacatgattcctccaaggccgacaaccggaatctttactgctttagcgacttgccaaaccatacgtagagcgatcggttttacacaagctccgctcaatcccccggtaatcgtacttaaaacgggtttgcgttttttggcgtcgatagccattcccagcagagtattgatcagagaaaccgaatcggctccttcactttctacagccaaagctatttcctgtatattagtcacattgggggataattttaccatcaaatgctttttgtatacccgtctgactgcttttacgacttcggcagcagaagcacaactggtaccgaaagccattccaccttcctttacattgggacaggaaatattcaattcgatggcagggatgtgatccaaggcgttgattttttctgcagtctccgcataatcagtgatggtagacccggaaacatttaccagaatattcgtttcgatatcctttatttccggataaatacgttcgatgaaataatcgacccctttattttgcaagccgactgcattcaacataccggacggggtttcagccatacggggataggaattcccttcgcggtgttttagggtagtaccttttactataaatccacccaacttatcgagttgaatgaaatcttggaattctaaaccataaccaaatgttcctgatgctgtcaatacaggattttttagctctaagccattgaggtttatatttaaatctgccattttaaatcatttatattaaataccggaccgtctgtacatacacatttatgaccttctttggtgtcgtttacacagcaaaggcaagctccgattccacaagccatcgtattctccagagaaacttcacaatcgatatgtttagaataagcatacctggcaactgctttcatcatcggttcggggccacaacaaaagatatggtcgaattgttcagttagaatggtatgctgagtgggatatcccttttctccataagaaccgtcttcggttgtatagtataccgttgcatacttttcatactcttcttttaagataatatctttcactgtccgggttccgatcagaaccaccgggtgtagccctttatcggagagttctttggataaatgcaaaaggggagcgataccgacaccgccaccaaccagtaaacatcgtccttgttcgggttgagagaagcaatttcccaatggaagtataatattcaactgttcaccgggcttaagcgtggacaatttttcggtccctttacctgcaatttttactaaaagataaagcaggccttgtttcttatccacatcatgcacggatatcggccggcgtaaaaaagtagaaggggaatggtctactctgacattgacgaattgtcctgcctggatctccggtaactctatggaatgcaataccaataaaaaattgtctgcattgagccggcggttttctttaacagtaaaatctagtattttcttcatgctgtttaatgagatctggtgatcactgatttattatttattgcaatttttctttcagatagtgccctgtataggattccggacattttaccacttgttccggtgtaccggtacaaacgatacgtccaccttcttttcctccctcaggtccgaggtcgataacatagtcggcacatttgataacatccatattgtgttcgatgatcaatacggaatgtccccgttcgatcaaagcattcaacgaactcatcaatttatgaatgtcgtggaaatgcagacctgtcgtcggttcatcgaaaacaaaaagggtaggatcggcattttcccggcttaaatgataagccagtttgacccgttggctttcaccaccgctgagagtactggaagactggcccagcttcacataacctaatccaacgtctaccaatttttgtaacttatctacaatactacgttcgctatgaccattccccgcagaaaaaaattccagggcctgatttacggtcatttccagaatatcataaatatttttacccttataactgatctccagtacctcgtctttaaagcgtctgcctttgcagtgttcacactccagaaatacatccgccataaattgcatttccactttaataattccttctccctgacattcttcacaacgcccaccgggtacgttgaaagaaaaatgtgccggtttaaagccttgtaccttagcagcttgtgtatctgagaaaattttacggatatcgtcccaagcctttaaataggtaaccggattggagcgtgtagattttcctatcggattttggtcgataaattcgactccggtaatggctttcaaatctccggtgagtttatcgaaactacctgtgcg

SEQ ID NO: 5971 - DNA, 3407 bp, Unknown
  gut microbiota DNA sequence
gataagcagcgagctggaggaaattatgatgataaaggctaaaaacgcagtggcttagttattcaccccctaaaaacagaaagttatggcaaagattgatataagggaaaacagggcagaaatgccggaaaggagaaatgtattgaggaaggtgatcagcccggcagtggccgaggtggccgtggagatcaggacggagacaccggaggtacatgacctaaaggtcaaagtttacttgaggaaggaagaaaggaagttccttttttacagttgaaagggaaatggatgagggaagccgggattgtggaggattcgtatgtgagcgtgacggtgatggaaggggtgctgctgatccggagggtacggagcaaggtgggatgataaacggatgatgttggaacgaacaggtatgaatgttatcaaacggaaggctgtccgaaagagcggccttcgttgtgtgaaccttttatgaaccctttgtttttagtgtacaattgtaccttttcctgtggttccttttttctccagccatttttccaattgccataaagtacggggcgccggtgtttatccccagaggcagacaaattaaaacttatacgccgacaggactcaacggagctaccttccaaacgaaatacggtgtggccggactgaccaggccatcatacaaaaaaggattcatagccgaaggactcaatgaagcagggctttctgcgggccttttctatttcccccggaacggaacctactccgcctacgacctgacagaaaacaaccgcactgtcaacaatctgcaactggtaagctgtgcttgcactattttcttctgtcgacgaagttaaaacagcccttccttccatccggattatcggtctggacaagcccggttccacttccaccgtccactggcacataagcgactccagcgacagacaggcagtactggaaattgtagacggcatcccccatttttacgataaccccgtaggaatattgaccaattcccccggattcggatggcagctcaccaaccgaaacaattacataaaccttttttcgggaggagtagcccccacgccctaggcaacctcacgctgactgcttttggggcaggatcgggatttttaggtctgcccggagacgtcactccgccttcccgttttgtccggatcgttttttacaaagcaacagcctacaggctttgaaaccgtcctccaatgcttccacatcctcaataattccgatattcccatcggcatagaacatcccgttggtaaatcccccgacattccaagtgccacccggtggacctcggccatcgacctcacaaaccgcaaaatatattacaaaacaacctacaactcaaccatccgctgcatcgacctgaaaaatatcgatttcaacacagtccgataccaatcgtttcccctggataaaacccggcaatagcccattgaatacctgcaatagaatagcctcaagcctcccgccaatccccggtcacacccacccggcttataatcccggtacgtgtacctgggatattgcctggtgttatacagaaaaatcatgcagtttgacgcaagaaagcaaggcaacccaatagccttgacaaacatcaccgacgaaaggaaaaaattggatctttgccaaaatcgaaaccgacagtttgcagtggcaggatattatggtaaacgacaacggtgaatggcaggttaattttgacttatatacccggcgcataagttaagaagagaatacctgccataatgttataccccttccccggacgtgttcctgcaaatttattctatcggaatataaatctccgttttcagcttttccggagccgtgcggcggggatcgctcacatatttttcaaaacagtagttgccccgggtctcgaaacctccttctgccagtaactccccgtaaattttatcataggccgcccctattttacagtactcaccaatatacgtaaacgcgacgaaacgtccgccgccgatggtttttacgccgatatccccgttgggtccggcaggtttgcaaatgcggatacatacatcgcatttcaggttttcttcggccgtgatttcgggattatcgtggtataaagccaaatgttcaatacctgccgagaaaagtccctgccgcttgatctcctcccacatccgcatatacatcgcactgtaatccacctttttataatctcccgtggcactgatgtatagaaccgtcttaggttcctgttccacgactttggcacggctgagcttcacttcagccttcggttcccgtgttgtcatcatctgataatttttggttaaacgatacattttaggagagataccgaaaagtttacagaaagatttggtcagcgatgacggggtgtcgtaccccacccggtaggcaatatccgcgacgggaagatcagtataacgcaacagcttcgccgccgtttccacccttgtgcgtataatgaacgctccgatcggttctttcagataagcgcgcataatgcggtgaaaatgaaacggcgagaatgccgacaagacggcaagacgacgcatatcaatctccttgtcgaggtgctcccggatatacatacacacccggtccacccgctgcctgtaatcttcttctgttgtcaatttctttttcatctctgcggacaaaattataccaaaccgagcacaatcacttttccaaaattgctaatctccggatagcccgcagtgatgtgtatttcgggcaatccggagggaaccctatcacaaacggacgcttacccggtactctcccccctgcgattccctgtattcctccggcacaggaataccggaatgtccgcacagcaagcacacatcgtggacgtcatttttgtcccgcttatatccgcaatgaaaaagtacctgttatacccggggcataccctgttctactccggcgctaactccgtcacgtccgctaaacaaataaaagcggttcccgtctctgtcaacacttgcacgattccctcttctatttttctcatggcaccaacttagtacttcctcccccctttaagttaattccattccgcatgccaaaaaggaaatagcccgcaagacacgtcctcgggggctaatagccttttacccccatcgaagtacccccgatcataatcaatgcctgcggaatcaacagccagaaactcgacaaaggcaatagaatataccctacgaccgacaccaacaacaagctataccccaggaacaagggcacaggcttctgctccttacggatataatactgcaatgtaccccccaaaaggagcagtatcccgcccacaaaaaaaacaaaagcgtatgccctttccgcatcattcccgatggaagcggcaaatccgtccatgatgatgt

SEQ ID NO: 5972 - DNA, 2584 bp, Unknown
  gut microbiota DNA sequence
gatttacgatataccgtaaattgcaattttaattttcaaaaaacagaatgatgaaaacaaaactttttaccctggtatttgcagtccttgttttaggggcttgtaaaaaagagattaagctggatgttaaacaaatccatctgaccgacacgaccggacaatgggacatcaaaatcgaccgtcctgccttctcgactacagatgctgaaactgaaaaaagctgtgtcaaattcaacgacgaggtcaacgggctgatcaacggtattcatgcagcctttatcgaacaagctaaagagaacattgcctgtttaaattctgcaggtttcaagcaagcagctccctacgaactgatcattgaagattcggtgttcctggcagaccaaaattacatcagtgtccgggtattatcgtacgaaatgctgggaggagcccatgggatgaccgatttttatgctataaattacgatgtgaagacacagaaattcttaaccaataaagatatcctcaacctggacaaagcagcagatatcaatgcccttttaaaggctaatctgaaagatccggacaaatgcttcactttcgaagctccgacagtggataatgtcacctgcatcaaccttaccctccacacggtcgattttacttatgcccaatatatcctcggtccttactcttgtggccacaccatcatttccattcccaaagaaaagatgaaggatatgctggtgatcaaataatggtccgaccggttgaaacggataaaacggtaataacaataataaccgttttatccgttattatctaaagtcgattatcttcttccagcaccttaatgtcagtttttcgccgataacaattttttcaacaataattctgttctgggatcggacggacgccagcagttgtgtgccatcatcttaccgtcagggccgatcaacatgaaacgggggattccggttacgccatatttccggatgaacgaactcttaaatccctccggagcaatcaaagttactccctgaatccgatgttctgccaggtatagtttccacttctctttctccgtccaccgatccatggagagagaaacaaaaacgatcttttcacccctgtattgttgctccaatttctgcatatagggcatctcttgtttacagggtccacaccaggtcgcccagatatccagatatatatactttccccggaaagtttccgaactcacttttaccccgtcctggtcctcgaaaataaaggcacatccttcaccattcaaggtgtcgttctttatttgttcgccggctttgctgcaaatttcctgaaagaggatttttcctttcctgctttttatccagggagcacaacactccaatgtctccgacagacagagcaattcccggttatctacccgcctgctcaactccctcaatagatactcctcaccaatagaacggttgggaatacatttcgcttttttcagtaaatagtccgaaagagtaaaccgaaaacgtccttcttcctcctgtgccaacagataattataaatccacacccgcccttcagaagttttaaaaaaagccgtatcccggaagggcatccttccgatagcccgcaataacgtacggggacgctgccaatgctcataacgcattacattataagtcgccacaatggcttcccaatacattcggcgaagccgacttttccattcccggataaaatcaggttcctctcctccccattgttccacatcccggataccttgccggaaaatttccttcaacttaccgatattagccggcaatccgaattttccactattatccgacatgttgaaaatagaatacacttttccatcgttgaggaaataactacacatcatcgtctcgaacatcatctgaggtcgagggtgttcggggacttcatagaatatattttcgtaggtccggtttatcccggccctggaaatatctattcccagtaaatcccgatcggtcagggcaaataaagttttttgtgcggtatacttattctgttcttcatcaaacacctgatgactggcgataaaagacaacttctgtgctttccctttcagattttgcccattcacagcaaaaagaatattactcagttttccctgttcgctatacaaatcgatatcggtctgttgtccatcgtccttcaagacataccacccccgggaataaggagtacctacgatcaattcagcctcctggtaaacagtatatccgctattcatattcgtaactgccaataccagcgtataattctgattgggttcccaatttacgagagtatccaataccttatccagagtgagtgtatcccctaaccttccctgagcagaaatcgtccacagatactcgaaacgggcgtccggatcggtagaacagacttcagggcgaacaaccagccgatcgttcataaaataacgcaagtactccttttctactccggaaaccgtaatctgttctccgactgtataactataattgcccttatcttcaaaacaagacatcaacagcaaccccacgattgccaataaaatatattttttcatagtgtt

SEQ ID NO: 5973 - DNA, 820 bp, Unknown
  gut microbiota DNA sequence
aaatatggtataattaattgttataatagggtcattataggatagcgttgaaattgaacggaggagtggatttgagaatacttggtatcgacccgggctatgccattgtgggattcggagtgcttgaatacaacagcggaaaattcactgttgttgactacggtgcaataaccacttcttcggatatggatttcaacagacggctgaaagtcatctatgatgatatgaccgagataataactacctataagcctgatgaaatgggaatagaaaagctgtttttcaataccaatgaaaagaccgccattgacgttgcacaggcaaggggagtgaccctgcttcctgccataataagaaatattccaatctatgaatatacgcctttgcaggtgaaatgctccatagtcggctatggacgtgccgagaaaaagcaggtgcaggaaatgacaaagaccatgcttcatcttaaagctatcccaaagcctgacgatacagcggacgcagtggctatcgctataactcacggactttcggtgaacacaaggcgtgttatgaaaaattttgaggagaaataatatgatatattcacttagcggaaagctcgttcataccgagagcgaccttgctgtaatagaatgtgcaggcgtaggctatgcctgcaaaacgactttttccaccttgcagcagatagcaggaaaaagcgaagtaaagctttatacacatcttgccgtaaaggaggacgcggtggagcttttcggctttgcaactaaggaggagcttaaaagcttccgtatgctcatatctgtcagcggagtaggtc

SEQ ID NO: 5974 - DNA, 54068 bp, Unknown
  gut microbiota DNA sequence
aaagtgattatactctatcaactttatatgccatcttactttttagggacatttactgaatatccctatttaacgattacgagaaaataattctttttgccactttgggcgaggatatattttccgtcgatgaggtgagattcaccgatgatggtttcttcaccctgtactttttctttattgataccgatagcattggatttcaaagctctgcgggcttctcctttggaagacatgatggctgttttatcggctaagaagtcgacaatggagatacctgcttttaaatcggccgccgcaatttcgtattggggaaccccttcgaatacggacaggaaagtattttcatcgattttcctcaaggtctcggaggttgcattcccaaagaggatttgggaggcttccagggccaggttgtaagcttcttccccatggatcaggcaagtaatttcttttgccagggttttctgtaatttcctgaggtgcggagcttcccggtgttcagcgatcaaagcatcgatccgagcgggaggcaggatggtgaagattttgacataacgtgcggcatcttcatcggtggtattcaaccagaactgataaaatttataaggggaagtacgttcgggatctaaccagatattccccgattcggttttcccgaatttttttccatcactcttggtcatcagcggccaggtcaagccataagcgtcgagcccttctttacgacggatcaattcgcctccggtagtaatatttccccattggtcggaacctcccatctgcaacatacaaccgtagtttttacgcagatgaaggaaatcgtatccctgcaccagctgataggtgaattctgtaaacgacataccctgggccgactcgctactgaggcgtttttttacggaatctttagccatcatatagttgacggtaatatgcttaccgatttcacggatgaaatccagaaatgagaattgtttcatccaatcgtagttattcagcataatagcagcattggaagcagtggagttgaaatcgataaaccgggataactgagctttgatcccggccatatttttacggatagtctcttcgtccaataagtttctttcctgtgatttgccactaggatcgccgatcataccggtagctccaccgataataaaaatcggtttgtgcccggccatctgaaagtgtttcatcatcatcacagagaccagatgtccgacatgcagagaatcggcagtcgggtcgatacctacgtatgccgtagtttgtcctttagccaatagttcttctgttcccggcatgatatcatgaatcatgcctctccattttaattcatcaacaaaattcatcgtattctattttatatcgtttcaaaagcggatcgtgttgtacatctgttgtgcaaagttaagaaaaggatcgaataacaaactgttctccctggtttcttcgctgataaaatggaatttatcgttcaaagcatcgacaatcattaaaagtacacaaaccataatgaaatattttgcgataccgaggagggtgccaagcagtttattgaccaaccccaacgaaataatatcgaccagtctggtcaacatcttccccagcaaatagactgcaatcacaaccaacaggaaggtaacggccaaagcgatataagacaagtaacgggacgtgatattcaggaagtctttcaatatcccttcggtaaaagggctgtagcgtatggcaatgaaaacccccaatatcagcccggctaaagtggcgacctcgataatcaatcctttcgagaatccacggaaagcgccgtatagtaaaaacaagagaataacaatgtcaatatagttcatggcaaatccgatttaaacgggtttcaaagatacgaatttatcgggagcatttttccctttcattttctattatttgataaattcttagtattttcgccaattggtaaatagggttcttatacccccttgttaatatatcactttataaaaacaaaatataatgtacagaacacacacatgcggagcacttcggattgaaaatgtaaacgagaatgtctgtttgagtggctgggttcagaaaatcagaaacctgggagccatgacatttatcgatctccgcgacagatacggaattacccaattggtggcagaagaatctgcttctgaagagataaaaaaacaagtggcacagttaggacgggaatttgtgattcaaattcaaggtaaggtggtggagagagccagtaaaaacaataaaatacctacaggagagatcgaaattatcttagatacggtaaagattctgagccgttcggagatacctccttttactatcgaagacaatacggacgggggtgacgagatccggatgaaataccgttatctcgatttacgccggcaaatggtgcgcaggaacctggaattgcgtcaccggatggcgcatttggtacgtaattttctggatggcaagcaatttatggaggtagagacgccggtattgatcaagagtactcccgaaggagcccgtgattttgtggtgccttcgcggatgaatcagggacagttttatgcattaccgcaaagcccgcagactttcaaacaactgttgatggtcgccggtttcgaccgatactatcagattgtgaaatgtttccgggacgaggaccttcgggcagaccgtcaacctgaattcactcagatcgactgtgaaatgtcgtttgtagaacgggaagatgtgctcggtattttcgaagatatgatccgccatctttttaaagaaatcagaggcatcgatatcccggcatttccgcggatgacgtggcatgaagcgatggagcaatatggttgtgacaaaccggatatccgtttcggtatgaaattcgcagacctgacccgtctggcccgaaccaaggactttgcagtattcaacagtgcagaatatatcggagggatttgtgtcccgggttgtgcttcgtatacccgtaagcagctggacgagctgaccgatttcgtgaagcgtccgcaggtaggagcgaaaggattggtgtatgtcaaatacaatgaagacggcagcataaaatcgtcggtagataaattctatacggccgaagagctgaaagtatggctagacacctgccaagctcaaccgggcgatctgctcctaatcttatgcggagcgaaaaacaaaactttaccccagttgtgtgagcttcgtctggaaatgggaaaccggctgggattgagagataaaaatgtattcaaaccgttatggatcgtcgactttccgttgttggaatgggatgaagagacacaacgtttttatgcgatgcaccatccgttcacctctccgaatccagaggatatcgatttgatggaaacacggccgggagatgtgagagcgaatgcctatgacatggtgatcaacggcgtggaagtagggggaggttctatccggatccatgatacagcattgcagcaacggatgttcaaatgcctgggatttaccccggagcaagctgaaaaacaattcggtttcctgttgaatgctttcaaatacggcgctcctcctcacggtggtatcgccttcggtttcgaccgtttggtttctatgtttgcaggcctggacagcattcgagacaccatcgctttcccgaaaaacaattcgggccgggatgtgatgatcgattctccgtcggagatttcggccgagcaattcaaggaattaggcattaaactgaatcaatgatttacccctaaattcatacaagtgtttaaggatgtaatcggacatgaagatatcaagcaaagactgatcacctctctccggacagggcggatcagtcatgcccaactatttgccggagaaacgggatacggttctctggctttggctttggcattcgcccaatatgtcttttgcacaggtgataaaaaagaagatgcctgcggagaatgcccttcgtgtaagaaaatacagaaatacatccatccggatctgcactttgtatttccggttgtccggaaaacaaaaagcccggtcagtgatgaatatatcaacgaatggcgtcgtctgctgatgcggacgaattatttcggtctggaagaatggtatacggaaatgggagtagaggataatgcacaagccgcgatatataccgaagaaagtgccaatattctccgtaagctgaacctgaaatcattcgaatcggattataagattctggtgatgtggttgccggaaaagatgaatccggaatgctcgaacaaactgttaaagatcatcgaggagccgttcgacaagacattgtttctgatggtttcggagcatccggaacagatcatcaatacgatacaatcgcgtttgcagcgtattcacattcctcccctgcatcaggagcaaatacaacgacagctgatagctgaaaaaggaatcgctgcacaaaaagcggaagaatatgcccatgtagcttcgggaaactggtataaagccctgcggttgctggacgaaacagaagagcaaatttacaaccaggaaaaatttatcagcctcatgcggctgtgctgggaaagaaaaatgcttccggtgaatgaatgggtcaatgaaatatgcagccttggaagagaaaggcaaaagaatttcttagcgcatgcctcacggatgatccgggaaaattttgtccggaatttcggtttggagcaactgaattatatgacggaacgggagaaaaatttctcacaacgctttgccccttatgtacatgaaggaaatgtcattccattgagcaacgagttcgagcgtgcttatagcgacatcagccggaacggaaatgcaaaaatcatttttacggatctctgcataaaagtcatgcaaaatatcagacccaattgaaactgttttcacgtacaataatatataatgaaaaaatcaatttatgaacgatatacacaataacgaaaatataagccaggaagaagaattcgtttcgcccgggcaagaaaaagtaaacggcaaagcgacgcctgagcaatcggggccttcgaccggggagccccgtgaacaaccgggagaaccgacggaggaagccgtagagatcgaagagacggaagagatagaaattatcgaagccggggaatttacagtcccgaaaaaagaagaggaagaagaggaaattcaggaacttcatacgaagcatccgcggcgggatgtaccggtaatcgaccatcgtttgctagcggggaaattgacggtatacgactggctggaagatctgcctgcgacggattgtgccccggagatcgtagaagtaaggtttaaaaatacacggaaagggttttacagcaatccgtcgaaactagctttaaaagcaggagatatcgtggcggtcgaagcagctttgggacacgacatcggggtggtatctttatcgggtgaactggtaaaggaacaaatccggatcaaacgggtggatctcgagcggaatccgctgaagaaggtataccggaaggccaaaccccacgacatcgagaaatggcaacaagccattgctttagagcacgatacgatgatccgttcgcggaaaatcgcagccgacctgaaactgaatatgaagatcggtgatgtggagtatcagggagataaaacaaaagctatattttattatatcgcagacgaccgggtggatttccggacgctgatcaaggtgttggcggagactttccatatccgtatcgaaatgaaacagatcgggacacgtcaggaagcaggcagaatcgggggtatcggtccctgcggacgcaaattatgctgttcgacttttatcaccaattttatttcggtgtcgacctcagccgcccgctatcaggatatttcgctgaatcctcagaagctggccggacagtgcgggaaactgaaatgttgtctgaactatgaagtggatgcgtacgtcgatgcgcagaaagacttcccttcgaccaatattactttaaatacgggagagggtttgctttaccatcaaaaaacggatatcttcggtcagatgacgtcttatagtacggataaagaagggaagggtatttttatccagattccggtaaaacgggtaaaggaaatcatcgcgatgaaccggaaaggaattattcctccaaaagcggtagaagaaagcggaaataccccgacagatataaaatatacggacggcgtgggagaagaaagcctgaaccgtttcgacgaaaagaagcagaagaagcgtcattccaggcaacgaaataataataatcgtgaaaatggaaactctaacactccccgtaacgaaaaaaatgaaagaaacggagaacggggaggacaacggcctttccgtaacggcccgagacaggatcagcgcagagattcgagacctatacaaaggcccaagccacgaaccgatcagcattcacaatccaaaactgaacaatgatgcaaaactatcgtccttttaccggtattacccctgctgtcaaaattttattgattctgaacatcgtgatgtactttctgagtatgtttatcgatagccggatgcatgtggatacagcccatctattaggacttcatttgccgcaatctgtcttttggcgcccatggcaatatgttacacatatgtttatgcacgggtctttcgggcatttgtttttcaatatgttcgctctttttatgttcggccggatactggaatcggtatggggaacgcagcgttttctgattttctattttgtctgcggtatcggagcgggcttgctgaatagtgcggtcggctggttggaaatccaccggctgatggagcaatattatgccttccagaatgcgccttctcctgcgcttttagcgcagcttgtggagcgtcagctaggccatccggcccagtgggtgtgggaggtggtggataattggaccaacaatccggattcgcaacaatacattgtagcagggaaacaactcttccgtcagatcgtagaactgaaagtaaatgtcccgatgatcggggcttcgggagcgatattcggtatcttgctggcattcggaatgctgtttccgaatacggaattgtatctgatgtttatacctattccgatcaaagcaaagtattttgtattgggatacggtctgctggagcttttcctgggcatgcagaatagcgcaacggacaatgtagcccatttcgctcatctgggagggatgttgttcggtttctttatggtcaaatactggagtaaaaacaggcgaaggttctattaagagatgatgtattacaacaattacggcggaaatttttcagaaggaatccgggaagggatcaaaaattctttccggaagggttcttctctcacccgtctgatttatatcaattgcgggatttttcttgctttgaagttgatatatatcatgatgttgttgttggggaaaggagaagaattttatccgacattgctggaatggatcggcgtgccggcagatccggagtatttattgagccgtccgtggacgatcttcacctatatgtttactcagttcgattttttacatctgttgttcaatatgttatggctttattggttcgggagttttttcctgaattactttacggaacgtaaattaacaggtgtctatcttttgggtggcctattcggaggtttgctgtatattgcggcctataatattttcccttatttcagtgagcctcaaatcagtcctttcccccgcccggcgctacggctgacctcgtgggctatcggttcgtcggcttctgtgatggcaatcgtctttgcggtatgtacttatctgccgcaacataaggtctatattttcctgctcggaccggtgaaactggtttatctggcgttgtttaccgccctgatcgatattatgagtatatcttcgggaaatgcggggggacatatcgcccatttaggcggagccctgttcgggtggttctttatcgtgggagtgagaagaaaccgggactttgcttcaggaatcgtgaattttttcgaagggatcggacggctcttccagcggaagaagaagatgagggtgaagtataagaagcatgtctcggaaatgaacgaccgggaatacaatgcccataagaagaacgagcaagaacggatcaacgagattctggataaaatctcgcgttcgggttacgaaagcctgacccgggaagaaaaagcaatcctcttcaaggctaaaaactgattttatggaggtaagtaaaccagatagcagttctttatcaaaccagaagtgttttccctactatgctgaaaatattggataagattgtatatatcgtcagtttgatcgctgcgttcgggttaataggagcatatctttcccctataatcaaccccaatacctttgtctttttttcgttactgggtttggcttatccttatcttctgatcggcaattttatccttttactgtactggattttccgttggaagcggaggacctggcagattgtagtcgtgattgcgatcgggtatccgactttcaggacttactacgggacagcgaaaaccgaaacaggggatgcttcgtacgatttgtcgctcttgtcgtacaatatccgttatttcgatgtgtatggctggagtaatcagaaaaacacgagggaaaaattattcaattatctgaataaattcgacggggatgtgatctgcttgcaggaatttctaatgaacgggaatccggaccgacggaaaacggtaatcgaacaattgcatacctacccctattattatatcgagaaggatatggctattttttccaggctcccgattctgcacaaaggacacctgactttcgcccctggttacagcagttcttgtatttacggagatttcaagctaggaaaagatacggtgcggttgtacagtgttcacctggaatcctacaagctgggcaagaaggagcggcaatttatgaaagaaatcagctcagggctgaaaggtaacgatatccccgaaggggtgaagaatctcacgacacgcttaatgatagcgaacaaaaaccgggcacatcaggcggaggaaattcaacggcatatcgacggaagcccttatcctgtgatattgtgcggcgacttcaacgatactcctctctcctatacttacaggcaattaagcaggaagttaacggatagttttattgaaaaaggccggggcatcggcaatacttacatcggagagtttccctctttccgcatcgattacgtcttacattccccgacactatatacggtgggttatatccgggaggatatcacgctttcggatcattatccgatcaaggtgaagataaggaagggaagttgatttatcagaaaattccgaagattatttggtggatttggggaattattctatttttgcagcgttaaagaaaattatggggggttagctcagttggctagagcgcttgcatggcatgcaagaggtcgtcggttcgaccccgatactctccactccagagttcttaaagtttgtaaagttcataaagtttatgaccgaaggtattccttatcaggaaactttccattaactttatggactttattgttttatcgaattcttattattcgttttatggaagaatcagataaaaaactaacccgtaagatcagtccctataagatcatttacccggtcattatcggtctgggtgttgtgtcgtatatgctataccgggaattcgatctcactgctttcgagcaaatttctttcggctggagctcggtgttctggctttccgtagcagtgatgtgtatgtttatccgtgatctggggtacgttatccgtatccgggttctttcgggggatcgtttgagctggatcaagtcgatccggattatttttctttgggaatttacctcggcggtaactccctcagcgatcggcggtaccagtctcgctattctttttgtcaataaagaggggatcaaagtaggacgcagctcggctattgtcatggctacttcttttctggacgagctttattttattctgatgtttccgattattctgctttgcgtggattcgagcgggttgtgggagatgtcgggagtgagttcaggagtaagcaaaagcctgatctggtttgcagtgggcggctattcgatcaagctggtatatcttttaattctgagttacggacttttcaagaatccccgggggctgaaatatctattgatgaaatgtttcaaattaaagcttttacgtaaatggcggcacagtgccaacgaagcaggttcggatatcatccgcaactcttacgaattgcgtcatatgccgttttctttctggctgaagactttcggagccactttcttttcatggacggcacggtattgggtagtgaatgcgatcttaatggccttttttgtattgaaggatacggattgggcgactcaatttctgatttttgcccggcaactgattatgtggatcatgatgctgatcagtccgactccgggaggaagcggttttgccgaattcgtatttaaagaatatctgggttcctttattataggaggaggagccggtgtagcgatcgctatggccatcgtatggcgtctgatcacttattatccttatctgttcgtaggtgtttttatcgtaccgaaatggatagggcaacatttcggcggacgtccgaaaccatcgacagcttctaccccatcggacgatttaaatcataaccttgaaaatcagtagtaattatgtttttgatatttaaaaaaccggaatacagaagattcaatctgaaaccccgctactgggatcctgccaaagaagaacgggaagaacgggagcgcagggtaaaagcagaactcggcttaaaggacgacgataaaacttatatcccgaatataaaaggacaattcagacaggagtatgaaaaacggaaggcgaaccgtaacgggctgaatagcaattatgcgctgcgtttgtttatgatcctgacgttgttgttcatcatggccttttatgtgtttgtaaagaatccggacggtatcctgcgatttctgggactttgacaaatatccattatctttgtcctatcatataacggcacattagcttaactacatcaatcaatatggatatcgttcatcttttacccgattcagtagccaatcagatagcagcaggagaagtcgtacaacgtcctgcctctgttgtcaaggaattaatggagaatgcgatcgatgcaggagctaagcatattcaggtagtgttgaagaatgtcgggaaagcgatcatacaggtgatcgacgatgggaaaggcatgtcgaacatggatgcccggatggctttcgaacggcatgcaacctcaaaaatcgcttcggcacaggatttattcagtatcaacaccttaggattccggggagaagcccttccctctatcgcttcggtatcggaagtggaattaaaaacccggcaggaagaagatgaattgggcacctctatctttatcgcggcttcggaactaaaaaatcaggagtctgtcagctgtccgaaaggtacgaacatctcggtcaggaacctcttttataatattcctgcccgccggaagtttctgaaatccgatacgacggaattgcgcaatattaccaatgaatttctgcgggtagctttgacgaatccggagatcagcttctgtttgtcgaacaacggaaatgtgatctacaacttatccccttcgggactacgtcagcggatcgtaaatattttcggcaagtcgatcaattcgagactgatcaatatcgattgtgccacgggtctggtagatatcaaaggtttcatttgcagtccggaacaagcccgaaagacttatggcgaacaatattttttcgtcaataaccgttttatgaagcatccgttttttcataaagcagtgacggaggcctattcgggactgatcggtgtggattgtatcccctcctatttcatctattttacggtggatccgtctttaatcgatatcaatatacatccgacgaaaacggagatcaaattccagaatgagacggattttttccaaatcctgttggcaggtatcaaggaagccctgggaaaattcaatatcactcctcccctggacttcgatacggctggaagtatcgaactcattcctacggagaagccagcagccccctatgttccgcgaatcaactataatccgaactataatcctttcaattacagcagcagtaagcttaatccacaggattcggatttcgaacatcccagtcgcacagcaagcagttttcaccaggaaaaagcaccggccaactgggatatcttattcgacggcttaaaggaaaaggaggaatcgattcagacttcgataccggaaatgaccgaaaatatcaatccggtggtaccgcatacgaattgctatttccaactgaaaggccggtatatcgttacgccggtacaaagcggtttgatgctgatcgaccagaaaagagcccacgaacgcatcttattcgaaaaatatatgacgaccctgaatacgcaaaaggtaacggggcagaagagtctgttcccggaaatactggagttgtcggcaggcgattttatgctggtaggagaaattcttgcagacctggaatatttagggttcgaattaaatgttttcggtaaaaacggttatgccatacatgccaccccaccggacttatcttatacccgggcgaaggaagtgctgatcgaactgatcgaacattataaaaacacggagggcagtatccgggagaagatgaaagaacgggtggtactggctttggcaaaggcctcggcaatcagttacaatacggcactcagctgtgaggaaatgaatgaaatgaccggtaatctttttgcctgtaaacatcataatttcactgcagacggcaaaacgatcatccacattctgaattatgaggatgtgaacagttggtttaaataaaaacagagtcgcgtttaatcgaaaagaatatgtcggtaatattagagcatgtcagtaaagcatatggccggcaaaaggcgctggacgatatcggtttcaggctggaagaaggtgaaatatgcggttttctaggacctaatggagccggtaaatctactaccatgaaaatcattaccggctgtctgaacgactatcagggagaagtaaggatcaaggagatgaatctgcgtgaaaatccgctgaaaatcaaagcgattatcggctatttacccgaacaaaacccactctacccggatctgtatatccgggaatatctgcttcacgtgacccggctttatcgtgtcggccggcctgtagccaaggtgaatgcgatcatagagcgaaccggactcgagccggaaattcaaaaaaaaataggacaattatcgaagggatacaggcagagagtgggattagcgcaagctttggtgcacgatcccgagattctgatcctggacgaaccgatgacgggactcgatccgaaccaactggaagagatcaggcatttgatcaaagaaaccgggaaaaagaagacggtgttgttatcgacccatattatgcaggaggtagaagcgatttgtgaccgggtaataatcattaaccagggaaaaatcgttgcggaccgaccgatcggagagatctgtacacatgcagacgaagggatggtacttcgcgttgaattcagcccgggaagcgatacacactggctaagtaaaagcgaactgttcactcacacctcacaacaggctccgaactgctggcgtttaacttcccctcaagggaaagatccacgggaagccttgtttttcgaggctgccgttcgccgctgtccgattatcgcattgcatacagaagtttatcagctggaagatattttccaccgatatacacagaattttccggcaaagccgggaaaagattaacgtagccggagatgaccgatcagcgccgtgcagatcggcacatcttcggtaccggttgacgaaactacattccggatcgagattaccaaccacaatccaaggcttgccaacctaaaaggagatacggatccggaacgaagtgacactaatccatggtaatgtaggtttttaaataattacagaggtttgaacagttacaaaaatgtagaagataagtcaacggtagtaacttaaaagataaatagaatgagtttataaaatacaccaactcatttatttcgacatataaataccccctaaaagcttgtaataaaactttcagggggtattcattcgaggacaaccgatttgaaaaacggctgattagattccttccagagcgtcgaaagttttagctgtttcaggatttgaaggacgggtcatctttgcattgatgatttttccttctttatccaaaaggataaaacgaggaattccggtaatcatataagcatccataaaagtattgtcgccaccgttgtgcaactggatacctcctaatttatcttcttttaccatcttttcccaggctgctttgtcgcggtcacaagaaatacttacgaaataaatattcttttttccgtatttttcttctaaagttttcaagtgaggcaattcaccccggcaaggtccacaccaggtagcccaggtgtcgatatagacatattttccggccaaatcggctaaactaacctctttgccattgatgtcgagatatttgaaagacggtgaaggctgtccaacagcaactctagcccattttgcacacaattcgtcgaatttagctttttttgcaggatcggtaactttagcactatataccggagcaacttcagccaaatgatcgacaccggaatctttcacataagcggtaacgatttgatcgaccaaatattcaacaactgcaggatttttgaagttttgttcaacgtaatccaattgttttttcgtgaaagtcagattatcgcgatcttccagatctttagcagccatcgcctgaacccgaccgatcaacgcctcctgataccaattcataccaatcaaagcttcatcttcggtaattgcagaaaccaatttattgtagaaagcatcggtaggcttgaaatcaggagcctgtgcatagtagggatgataaaggggataaataggaagcggtccataaaccatataagccaatctttttttctctaactgattgaactgcgggtcgaatcccagggtatccaaattttcattcaatttctttatttgttcgtctaaagaggccaaaaattcagcttcttccaacttataatcggggctaaaccgtaaagccggactattcaggtactcattctttttagcgccttcaccggtgaatgcagaaatcatacgacgaccttcgaattttacagaaacatcgaaacttttgcccggttcaacataaaccggcacctgcattctacccaatacaacggtagcgtaacccggcttaaggttttcagccatcacaaaaagggcagtattcgtcgaatccaaagccatcacgtaagtagaatccttggttatcaactgaggtttgatttcaccttggggtttgtcgagatgaacccgtacagtagttttagatgcattattacatgacatgagagccattataagaatagcaaggaaagagaatttcatcatattactataattttagtttaagatgagcgaatttaataaactgcgattgtgatcggatcaaaatagggagctttaacctttatttaaccactctcttccgtaatcaccagtgctttacttccattcaccggaaggattaaaaccattctttttagccctgtcaccattttacaaatgccgaatattcaaaatcgaatcctaaaaaattaaataaaatcgccaccttcaatttttataaaaaacaaacaaaacatatctattcaaatatcaaactctcatatacagaaaaaaaattgattcttccgatagacagccgctagttgtttatttcaaacagaatataaatccttattttaggggaattttctcgattcttctctggtgtcttccgccttcaaattcggtagacagaaaacgctcgacgatatcctgagcatcgtcgaaggagataaaacgggcagggatacaacatacgttggcattgttatggaggcgtgccaaccaggcgatttcggtcgtccaacagagtgcaccccggataccctgatgtttattgacagtcatacaaatcccattcccactcccacagagcgcgattcctctctcgaactcgccggattcaacagcagcagccatcggatgggcagtatcgggataatccatactttcagcagaatgtgtaccgaaatcttttacttcataacctttctggcgaaggaatgccactaatttttctttgtattcgtaaccggcatggtcacaggcaatagctattttcatttctatcgatttgttattagagtcgcaacgtgcaaactgttacaacgatgtgattattctgaaatacaaagttaaagttttatccttaaggaaagcaaataaaaaacgggtattcttccgaatacccgcaaagaaaatatttcttttttagagaataagcttatatcctttaccgtgaacgttgatgatttcaacagaaggatcctttttaaggtgtttacgtaatttggtgatgtaaacatccatacttctggcattgaaataattgtcgtcggcccagatgtttttgagtgcataatttctttcgagcactttgttgacattctggcataataatttcaagagctcagactcttttgtcgtcagtttttgttcttcttctccatcgaacagggtctgttttttagagttgaaggtcaatttaccgattttgaagatttcctgttcatcttcaggtttgagtccggtagaacgacgcagtacggcttcgattctgagtaataactcctccatactgaaaggtttgctcatatagtcgtcagcccctaatttgaagccttccaggacatcttccttcatatttttagccgtcaggaaaatgattggaatttcgctgttgatctggcgaatttccttagccagggtaaagccatcttttttaggcatcatcacatccaggatacatatatcgaaaggctggttcagaaaggcttcataagctacctccccatcttcgcataaaacagtctcgaatccttttgccctcagatattctttcaggagcatacccagattcgtatcatcttctgctaataaaatttttattttctcctccataactatttagtttttaaataaattctctgaaaaatatacgcttttagaaaaataaagttctctttactttttgtttttttgaggttaatggtaaaataatatcaaatcggcttccttttccttcagcgctttccacttcgatacgccctccgtgtgcttccacgatagtttttacataggataatccgaggccgaatccttttacgtcatgtaaattaccggtcgaaacccgataaaaacgttcgaaaatcagcttttgctctttcgcagcaattcctatgccattgtctatcacactaataattatttcctgacctttattccgggtgtaaacactgatctccggaactttagtacaatattttatcgcattatccaataaattggatactacgttcgtgatgtgtacctcatcagcataaacttcatcctggtcagcctctaaataactatagagttgtcctcctttatcttctacacgcaggctaaattttgtcacaagattttcaacaacctcgttgagattgacattttttagtttcagtttcatccgggtttcggtaaacaaagcggtctggagcactttttctacctggaaagtgagccgtttactttcatcgcggataatcccggcaatatggtcgatggtagagggggaattgttcacagccccgtctttaagcatttgtgcagccaaagaaatggtcgctatcggggttttaaattcgtgtgtcatattattgatgaagtcgttcttgatcgcagataattttttctgtttaacgatgactacgatacagaatccgaaacacaacaccaacaaaatggtgatgatcaaactgggcaataacaagacgacagaagacaacagatcatgtgactgatcgggaaaaatcagaaagagggtggccggttcctgctgttgtccaaaactcattttccggttgtaggtgtaatcggaatgctgattgaagaagttttgtgacatgaggataaattcccctttctcttttaccgcatactcgaaaggaattttgacaccgttattccttaaacgttcaccgataatctctttgagatcgctgccatccaatcgttcttcgatcgatttttcgggcatttcgggaatctttttaaccacgagatcatattcttttcccagactgtttttgatttcctggcgggatttctggatagaattctggagattccgattgcctttctgtccgaacagttcccatacattctctatcctttcgtcgtaaccgatggggaagcggctgtaatcgatgacaatattcatatcattctttacattgagcccaggacgtaaatccagagcccggggcatttcatggacgactccatttttccccagatggtggatttcgtttttcttttcttcggccatctgctgcttatccttctcttctaaataagtcgttacctggtcgatagatttattgacgagataatcaaaatgtgcttttttcaactgaaaagccgtttgaaaatacctcgcctgtgtaaagatcaatcccaacaatgacagacctaaaaccacacctagtatgataatctgtttttttctcatacccacaaatttaacacttcaaatttaacactttgcacacttaacacactttaacctataacgttacttcataacactagccgattttaacactttactagagggaaggtcgatttgttaaattcgctctgtggcaggtctctaaaacaaatgttaaaatattagttttctccctttgttttttcccttatgcccttaaaaaagcgtcatttgttccccaccgtcatttctacgggttttccccaaatgtttataagccaagtcggtcacttccctaccgcgcggagtacgcttgataaacccttctttgatcaggaagggctcatacacttcttccagggtaccggcatcttcgccgacagcagtagcaatcgtcgtcaggcccaccggtcctcccttaaatttttcaataatggtgagcaggattttattgtccatttcatccagcccgtatttatcgatattcaatgcttcgagtgcataacgggtgatgtcacgatcgatgcttccattacctttgaccattgcaaaatcgcgcactctgcgcagcaatgcattggcgatacggggtgtaccccggctccgggaagcgatttccatagcagcctgaccggtaatccccacattcaggatagcggcagaacgggaaatgattccggaaaggatgtcggtatcgtaatattccagatggcaattaataccgaaccgagcccgcaagggagcggtcagtaacccactacgggtagtagcgccgatcaaggtaaacggattgatttgtatctgtaccgaacgggctgcaggtcctttatcgatcataatatcgatgcggtagtcttccatagcagaatacaggtattcttcgaccacaggactcaaacgatgtatttcatcgatgaagagcacgtcgttctcttccaggttggtcaatagtccggctaaatctccgggtttatcgagtaccggtccggaagtaattttgatgcctacccccaattcgttggcaataatggcggataaagtcgttttccccagtccgggaggcccgtgaaggatgacatggtccagcgattcgcccctcatctttgcagcccgcacgaagatttcgagattctcgacaatctttttctgaccttggaaatcgccgaaattcaacggccttaaagccctctcgaactctttttcggtttcttttaaatcggtgtttcttatatcgaattcactcatggttcgtatttacagattttcatccaaaaataggaaaactaatagtgctatcaaagcaccggtcaattttctcccaaaaactcccgaatatcctgctctagtttacggatcgggaaataagctccgtattttatgttctgtcgcaattcgtagtcgagattgttacgtctgcgatacaactcactgaccatatcgtgggtgacaactttgtttttctttgctgtgcgcagcatagccttacaaacttctttacatacgatcgaaatcaaatcgtacaggttgtgaccgcgaataaagaaatacacgttatcgggttttaatcccaattcgcggtatttttcacgaacaatagccagatcggcatggggatatttacgtccgaggtaattgatttttctttcgactctcatccgtagttcatccaacgcccgggccccgttgtcgtataccaaaggaaaagctttggaattggacaagctgatgtaagcatcgaattcgaactggctgaaaagcacgggatcggcattctgaaagtaaagatgccatatgaaaagatcgtacaggatggctgaaaagtcactcagaaaccgacggaaatcgaataccgtattttttaagtgggtgactctgctgcacacatcgtcgaggccatcggcaaagcagtggtggttttcaaaagagtaggtgtaagtttgaagcacgaaatgtttgacatcaatctttctttccctcaacaaataacgatagtcgctgtcgatacaaatgaagaaatcgggactcaggaaatcaaaatatttcaaacattgggtaactccacaagtctcccgtccatattcgttccgtgaaccggaaatgaagtgaaacttatcgtccggccggaaatgtttcagtacagctccccagaaagcaatatcgtctttgttttcaacatgtacagccgccctacagcgaaacattttcgcatccagagcaaaacgccgtgccgcattagcaaaatgcgaagcacgagagggattctcagcacgagcaccaaacataaaatataaagtaaaaagttaaaaaataagcaaaaagctataggctaaaagctaaaagcaaagagctataggctgagtactattaactattttttgactttagtctgttattcaaagtttttacacacgaagctaaaagtgctattaattctttaacaatttcagctaatttttcatataaatcaatatgaatataatcggtatcccgtaataaattcaaccaatacaacgtttcattcgcttcttttaagctcactgccaacttatttaaataatccgaatcactttgagcaaaaacggcttcatgaatcaatgccccgatagacgtaccacttttcaaaatttgtttacttagcacatactccttcttttcctgctgtaagtactgaaccaggcgtacaatttcaacagcaaaagaataacttttatcttttaataacggtatcatatcttctctactttaactttccaccctttagcttatcgcttatagcctctggcttttagctttttacctttatcaagtcttccacaaataccagcttatctccccaaccatcgccgaacaggctgggagaatgggtggaagtgatgatctgacaattgggattcagatggcggatttcttcgaataatttatattgccattcaatgtgtaaagatatttcaggttcgtccatcaagaggatgtaaggctgttcttccatcaggaatacacgcatcagaatcagcaacaactgcttttccccggatgatagtttgtaaagcggtatcacttctccatcgtcgataaagatcagatgattggtatgcggatcgatttgaatggtcttctgtgttttggcaaaaagccggtcgaccgtctcaaaaagtgttttgatgcgttgattaatccggccggcttcttcagggaaattagtcgctttcaaccgataatccgagaaagaaggattggacccgccgatatcgtatacaatagtatgcagctcgttatataactggctatactctttaccggctttcggccggtcccggaacggaacgtcgaaagtactgattttttgatattttacgtttctcaatgcagttttcaactctcctgcagtcattttctgttggaaatcgacggtataatcgtcgatggtaatctttaccccgacaccgtaaattctcaatcgttttacatcagccatcatgatggaatcgatgatattgaataaggtcgtcttaccgcttccattgattccaatcaatatattcacatcgggattgagattctcccaaaaaaaatcgtatttcttccagagattccggatttcgatactatgaaccgtattcgacataactttaaagtaaaaggtaaaaatgtaaaagggtggaaagagcaagccgcaacaatcgacccttcaacaaagatagaaaacaaaaatgaaaaacagatgagaaaaaagaataagtaaatcagaaaagatataattttgcggcacttgaaacgatttcaattcattatcttttagttttaatttttacctgaatctatgaaagggttatataccgtcttattactggtttgttcgaacatctttatgacttttgcgtggtacggacatttaaagttgcaagagatgaaagtgatcaacaactggccgctcatcggtgttatcctgatatcgtggggaatggcttttttcgagtattcgctccaaatcccaggcaaccgtatcggttttcaaggcaatggcggaccgtttacacttgttcagctgaaagtgatccaggaagtgattacccttatcatttttgccattttcacgatgatcttttttcagggagaaacattaaaatggaatcacctggcagcgggagtatgtctggtaatggccgtatattttgtatttatgaaataagcctattttcaggagggttggacaggtttatacggtaaggtaaaccaaaattcgacatcttcgccgggttgggagtcatcaccgatccggccttcattttccggacgatcatttcacagatggccaatcccaaacctatcccctgaacaaaaggatcgagtctgaccaaacggccgaataccggtttttgacctaaaaataaagttcccggttatcggacaggcagtatcccatcgagatactttcctgttcagtaaattttatggcattattcaaaaagttgatcaggatcttgaaaaacgcacccggtaattaaatgcaacagaattcaataaaacgatctgtttttcccccataccgtaagaacaaaaaaaacagagctatagattaaaagcagaaagaatgacgtaataatatatactcattcaaattttgacaaagaaaaacaattccggaagaaaacctttctgatataatcccgttcattttatattaaatcccagtatatatgttttctaccgaattcagatataaactcaacaatctccgacgtatcctgaaaaaagcgaccgtccagctgatccgtattttatttatcctcgcttcagtggcaacgatcgtactgatggcctacgaatacggttatgcgatcagtgaggcagggaaaagatacgttacagagggattcaatatcatcatccggattttctttttcggcagtatcgcaacgatctttctggatcccaaagagatctggcaagagaaaggatattggatagagattatcgtattagcacttttgttattcgttatcctgacccaaacaccggctcattttcccaccgacaactggttacaaaaaacagatcatatcctgacccatattctcttgttgtttataagcatcatccatctctcgaaagtggtagttacgggattacaacggcatataagacctgaaatgacgtttgtctacagtttcctggccatcatcctgacaggtgctttcctgcttatgttaccgaaagcgcatcatggatcgctgagttttatcgatgccctgttcacttctacgagtgccgtgtgtattacgggcctgacggttgtcgatacggccaccacttttactacaacaggtcaggtggttctccttttgctgatccaaatcggagggatcggggtcatgactttcaccagttttatcgctttgtcttttttcacccaaacctcttttaacgatcaaatggctttaaaaaatatcctgagcgaggaatcgatgaataatattttccgaactcttttctacacacttttcacgacgattatcgtggaagctatcggagcctggatcttgtggtgggagatccgggatctctccccctcccttataccgaataagatattttttgctattttccatgccgtatcggccttttgcaatgccggcttttcaactttaacgggcaatttgtaccatccgggtatccgggatttatacggcttacagtgctggatagccaccctgattatattgggagggatcgggtttcccatcctgttcaattacggtaaactggtaaatcataaagtcagaaaccttttttaccggcttaccggctcttcgaagcgtatgccgtcgcatgtaagaattgtgaataccactacccgtattgtcattacggcaactttactgctccttgtgggaggaactttactcttctggttgtctgaaaacaacaattgcctgagagggcttccattaagaggaaagctggcggtgtctttcttcagtgcagtgactccccgcactgcgggttttaatacagtcgatctgacttctctcctgccgtcgacttggttcctgactctcctattgatgtggatcggcgcttcgcccttatctaccggcggggggataaaaacaacaacgattactattgcgttgaagaatatcatcaatacgctgagaggcaaagaaaaaatcgaaatttttaaacgtcaactcccatcggaaaacgtgcgacgggctcatgcaatcatattattatctatcctgtggatcggaaccgccacctgcctggtggctttttgggtaccggagggatcggtcacccaaattttattcgaagtaacgtcggcgataagtaccgtaggccttagcctcgactttacctcccagttgaatacggccggaaaaatcatcatcagcctgacgatgttcgtaggtagagtgggattgatcactttactttcaggacttattccccggcaaagttcacaaagttatacttatgcggaggagaatgtgattgtttaaaaaggccaaaggctataagctaaaggccaaaggctataggcgaaaagctataggcgaaaagcgaaaagaaaaaggcaagaaacgagggacaaggagaagaaaaggaggaaactaaaagggggaaaagaaaaggaactcatttttaaaatatacgtagacattattgttattcatttttacttttagcttatagcctatagcctttagcttatagcctttagcctattgcttattgttttttgttttttgttttttgttatgaaatgtattatcatcggtttggggaatttcgggatggcgctggctcaacggttgacggccatgggatatgaagttatcggggtcgataaagatatagataaagtgaatgcatataaagatagtattaaaaatacgatctgcctgaacctcaacaacgaacaggctgcccgcaatttaccgttgaaagatgcagacctgaatatcgtttcgttaggtaaggatgcaggagcttctatactgaccgtggctattcttaaacaaaacggagctaaacgtattattgtccgggctatttctaccttacataaaacggttctggaagcaatgggtataacggaaatcattcaactcgaaaaagaatatgccgattttttcgcaacaaaaaccgaattaactacattaatctattcttatcaggtatcaccggattattatatttatgaaatgaagcttccccctgcttttgtcggacgacgactgggagatatcaaactggaaaaagatttctcgctcaaattaatcgctataaaacattatgaccgggatgaagaaaaggggtatttacgcatggaacttctcgaagaagtatccgatgactttgtggtcaacgccaacgatgtgtttattcttttcggtaaacgcaaccgattccgggtactttcgcgcaattgagccggaaaatttggattttttaaattatttgtgttaaattttcaaactttatttggatttatatgcataatacatatatttgcagagagaagatccatgtttgatacatatataaaaacacctttattaacgacatgatgcaaaactatatcgatatactccgccaactgaactatgaactggtcaaggaattgggtttattcaaacatcgtgcgggcttatcattcagtcagcggcatatcctctatcatataaagaacaatataagtctttctattcaggaattagcagattttcttcatgtcgaacattctacgatgagtagaaatataaaaaagttagtccaagccggcttggtggatatctatcaggatgaaaaggacaaacggaggaaagtgatcaccctctcggcagcaggggagtcccggcttgcagaagcaacagattcgattaatgaaacgatatccaaaatactggaggtattggatgacgaggaaattgaaatcgtaatacacggaattcatcgttattgtgaagccctgaaaggaaactgataatcagacggtttattagaataaacgatgaaaacccaaggaataatccgataaagaaacagaataattttccgattcgggaatgttataaaattatgttattcaactaataaaacgttcattatcacagcaaaggtaataaagtaaacgaaaaaccaaaaacggcaggcccgtttctccgtcgaactcaatacaactcttcgagttgtcgtacgggtaataaaacccgatgcacctcttcacccgtcacggcttgccgaagcgtaaaagattgttttaaacggcaatcccgggaagaactcccccaaatagccagatagcgaccggattcaactgcccaacaggaagcttgctcgtcgaaggacgccagttcggacaaaccgacaaccaaccgaacgacctcactctctccgggagccaatattttcgttttggcaaaggctttcagttctttctgtggtttaaccattgtttttccgggagcggcgatatataactgtaccacttcttttcccggtatctttccggtattggtcactgtacaggaaaattcatatccttgttctgtacgcaaataccgaggtttgctataagtaaatccggtatacgacaagccgaaaccgaagggataggaaacatctacccgatatttatcgaaataacggtaaccgacatagatcccctcttcatatcgggtaaagtcgatattcggccggtcggtacctttaggcccggtataaaactcccggtaaatatcgagagcttcctcatcgccgattaggggaaaattttcagaggaagcggcatcttcataacggacagggaaagtcatcggtaacttaccggagggattcaccttgcccgataaaatatcggccaccgagtttccaccttcctgtcccccctgccaagccaacaggattgcatcgggccggtctttccaggaagccgtttcgatcactcccccgatattcaggatgacgactacctttttaccctcctgatgaaagattcgggttaccttttccagcatttcccgttcgtcggcacaaagctcgaaatcgtctttcactttccggtcactgtattctccggcattccggccgatggtaatcatagccatatccgtttcttcggcttttcgccggatcaacccttcgtctaaagtacattccacgatacggggaggagtgacgtggttgtatttcttccaatcgattttagcctcttcagcccggatataatccaaataatgctgtttcaagcccttatcgaggataaaaccggctccggtcaatccttcttccaaagagacagaataagcttcttcgacatcaccgctaccggtacctccggcaataaactggtaagaagtatttccaaaaacggcaatatcacgcacatcagcggccaacggtaacgtttttccatcatttttcaacaaaatcattccttcggcagcagcttcacgggtaaccgaagcatgtgctttcagatcaggctgttcggaatagggatatcctttaaaacggggcgttttcaggatcaactccaacacccggcgtacattccggtcgacgtcggccatagatagttttcctgtcttcaatgcctggcggatactatcttgctggcgaattttcccgggcatcagcaggtcgtttccagcctggacctgcccgacggcatcgcgtccaccgaaccagtcggtgaccaccatcccctgatatccccactctttacgcaaaatcgttgtcagtaaatcataactctcggaggtataaacgccgttgatcttattatacgacgacattaccgtccagggattcgcttccttcaccaccatttcaaagcctttgagataaatctccctcatcgcacggggagagagaatcgcatcattagcaatccggttcgtctcctgattattgacggcaaaatgtttcacagacgtgcctacgccgttttgctgaataccttttaccatagctactgcgattttacctgtcaggaaaggatcttcggaataatactcgaaattccggccacacagaggattccggtggatattaagagcaggtgccaataaaatatcacaaccatattcgagcacttcgttacccatggcctgcccgacctgttgtaccaaatccgtattccaggtcgaagccagcaaagtagctacagggaaagcagtacaataaaatgttcgcggacaactatcacgccgggcagaaatccgaagtccggcaggaccgtcggccattaccatcgccggaatacccagccggggaatgggataggtggtaccggcagcaccgggcacaattttatcggtttcgcccacggcaaccaaaatatcttcggccacctcacccgttccggtcaacaaccggatcttttcgtcgaccgtcatggcctgaatcactttttccaaaggagccttacccagttggggtaactcatccgcccaaatcaaaaagggaagaaaacaaaaaatagaaaaaatacagtattttatcatagcacaagatttaaaaacagtgcaaaattctgtatttcgatccgatttacaacgttttcgatactgaaatactttccggcaggacatttcttgatctgtatcaagcaatcttaccagcccgtatccggcttaaggtttcaggactcatccccaaaaaagaagccgcatgaatctgaggagccctccggacgatctgagggtgttcgaactccagacgccgataacgttcgaaagcagaatgccggttgcgggcatccgctttatgttgggaaatgattaacgaactttcgaggatggtacaatatacccgcaaaatttcgggatcctgttgcatgagttcatgaaaaggcccgtaaggtatttcatagatcagagtaggctcgagtgcctcaacataaaattgtcccgggatctgacgaataaaactttccagacatacgaaaagatggccttcgtatgtaaaatgctccgtaatctccagattttttttccggtaaaactgcctcaccatcccttgttcgacgactcccatcgaacgtgcgacatcgccttctttcagaaataattcattcttcaataatttccgtggttctaagatagcagccaaacggcaaaggcttttttcactcaaaggataagtatgagctgctatttcaccggcaactttaattttatcctccatgatgctttaaatatgggcggcagttttcccgtcgttcatgtggtaaattttcatcagatcggccgtcatacaggaatgcacaggcaatacggtgacaacatccccgacatgaagccgatcgagaaaatcgtccgtacaatgcattacgccatgttcctgggacaaggacaccaattccacacccgaaataatatttccccaataatcgttatggttttcagcaaccatcccataaagcggacgattaccgggacgatcgatcctatccttagaaaaatgtactccccccccataaatcaccgcctcattccggtgccggttgatgtccaccaccgggcatttcactgccaaagcgatattataccagtcgcaggaaccgattttcaattgtgttacatcataaaaaacaaagtttccggggcgaatttcatcggccacaccaaaacgatcggccaatgaacaggaaggcgtatcccctaaagaaatcttgagctgaggatagcgatcaatatatctttctttgatatttttaagcatgcgcagattgtctttatgaatctgcaaaatttcttctttagaacgggcgttatacgtatgtccggcatgggtaaggaaaccctcgaatttgatattcacatcgggagcaacgatattcatgatccgttcgattttttcatagttaccggcgtctaccccatcccgatggtatccggtatctactcccagatatacgcctaccggatatttcaggcattcggacaattgccgggctccttcggaatggaccaataacaaattcaaacgaatcttagctgctaaagcgttgattttctcgtgttccagacaatttaccggaaaagcgaccgtaatatcgttccatccccattcggcgaatttcatagccatgttcaatgaagaaacggtaatcttatccactccgctcgctctgaaccactcaccgatttcccgggactgatgagttttaaaatgtggccggaataccacattggctgctttcgctttggccgccatccgggcaatattacttttacacacttcctcattgaggaccatcgtcggctctgttacctgaatcatcgtgctcataacaaactagttttactcctacaaaagtaaaaatatataattgaaaaatccgaccttaatgacataaaaaaaagcgtccgcacttcaacggacgctcatttattttatcgaagtcacgattattctccgcggatagcagtgattccgggtaattcttttccttcgatgtattcgagaagggcacctccaccggtagatacgtagctgaccttgtcggccagtccgaactggttgatagcagcgacagagtcgccaccaccgatcagagagaaagcacctttttcagtagctttcacaatagcctcggcaatagccctggtaccttcggcgaatttgggcatttcgaataccccgaccggaccgttccaaagaatcgttttggattcttcgattactttagcaaaacgttcgcgagtctccggaccgatatccaatccttcccagccatccggaatattcatgggatcagccaatttggtattcgcatcattgctgaaaccatcggcgatgacagcctgatcggacaataccagattaacccctttttctttggcaatacgcatgatatcgagcgccagatcgagcttatcggcttcacaaatagaacttccgacatgtccccccaaagcagccttgaaggtataggtcatccctccacccaggatcaggttgtccaccttatccatcaggttcatgatgatgtcgattttagaagaaactttagatccccccatgatagcggtaaaaggacgtttcggatctttcatcacactgtcgaccgccttcagttcaccttccatcacataaccgaataatttatcgttggggaaatattttgcgatcaaagcggtagaagcatgagcccggtgggcggtaccgaatgcatcgttgatccaaacatcacctaaagaagccaggtcggcgacaaatttcttctgagattctttgaccgctgcctttgcagcttttttttcttcatcggaggcatcgtcagccaaaccacggggtttaccttcttcttctgcataataacgcagattttcgagcagtaatacttctcccggtttcaattcagcagcttgttttttggcactttcacctatgcaatcatccgcaaatctgaccggttgtcccagtaattcttctaaatgtttctgaatatgtttcagcgaatatttactgtcaacccctttcggacgtcccagatgagacatcagaataacagcaccgccgccggcaagcaccttcctgatcgtaggaatagccgcccgcatacgggtgtcgtcggtgatctcgaatttatcatttaagggtacattgaaatccacacggatcaatgcttttttcccttgaaaattgtaagtgtcaatcgtctgcataaaattattattaatgattaatgaactagcaattcatatgccccgttgtttcgggatgataaaattaggaataatttatctgctacccaaatattttgattacaatccactcaatatcatactcaaacgattgatataaaagaccggctttccgggcggtgatccgggaaaaatccttaactttgccgggtaaaagttgctgaatggtaaatttttccgaccgaacagatccgacgtagccgatgacgacacatgaatattatatgcataaagccctgcaggaagcccgacaagccgcagaggaaggagaaatccctgtaggagccgtcgtcgtatgtaaaggaaaaattatcgcccgggcccataatgaaaccgaaaaactgaatgacgtcaccgctcatgcagaaatgctcgccatcacgatggcaacctcttatctgggaggtaaatacctgaatgaatgcacgctgtacgtaacgatggaaccttgcaccatgtgtgccggtgcattatcatgggcacaactcggcgaattagtgaccggagcccccgaccctcatcggggatactcgcgtctgacccctcccgtattgcatccgaaaacccgaatcacctcaggcattttaaccggggaatgcagtgaaatagtgaaacaatttttcaaagctaaaagatcttaagagtccgaatatccggatttcgtcccaaaacatccggccagtgcttcccaataacggggaaaagatttggaaacgacttctttatccacaataactaatcccggatgtttcagggctgcaggagcaaatgccatggccatgcgatgatcgtgataagtcgcaatccggggacatggctgccccccggtccgttccccttcccaaatcaaggctccatctccttcagctttcaacagataacccaatttgcccaattcctctatcagcgcctggatccgatcggtttctttaatccgcaaggtctccactccccggaacagaaatggaatacgccgcatacaacaagccacagcaaacgattggacgagatcgggcatttccacaaaatcataatccaaccgatcgatttcaggctttgcggccgataatctcactaaatctccctcatagcaggttcgaacccctaatttcctccacacaacagtctgacgggaatctccctgcatgcttttttctttcaagccggtcaggataatctctccttctccggcgatagccagcaattcataaaaataagaagcagcactccaatccgattctacccggtaaggaacagaccggtattctcccggcttcactccgatcacagtatcctcccgaccgacttcggctccaaactcccgcatgatctgcaaagtcatatcgatataggaactcgaaactaccttgccggtaagccggatttccaatcctttttccatataaggagcgatcatcaataaagcagagatatactggctactgacagaagccggaatatctatacttccacccaccaagcgggaaccgtaaatctccaatggcggaaaaccttcgttttcaagatacccgatccgtgctcccaatcggttcaaagcttctaccaacacccgaatgggtctttgtttcatccgctcggatcccgtcagtacccacttcccgataatccttgaaagataagccgtcagaaaacgcatcgctgtcccggcatgccccacatcaaaatagctattttcactacacagtatccgcaccatactttgcgtatcgtcacaatcggcgagattttctatcggtagttcactatcggccaaggcattgacgatgagcacccgattggaaatacttttcgaggcaggcaaagtaaccgtaccttgtacccgtttcgacttgaaatccaaagttatatccattccccttcccattaaatttgtttaagggcttcgaaaatttcatcccggctacaataattatcgatgtcaaattcgccgggtttatgtatgagtgtaaaattaacccctgcctgttcgtttttcttatcgtgcagcatcagctcatataattcgtccgcttcggctacaggatggtagaccgggtatttttcgcggataaacttccttaccgcctcgaaatgtttttcatcgaaaccaagtttttgcacggagaggaacaattcggcaatcatgccgtacgcaacagcatctccatggaaaatatcgagtccacggcggatagcgacactttcgatagcatgccccaccgtatgtccgaaattcaatgctttgcgcaatcctttttcccggggatcactttgtacaatagccgctttcaccgcaacggatttacgtatcagcttcaaaaaatcttcttccgccactccggcaaaatctacctgcatcgcttcagccacatgttcttcatcggctaataaagcgtgtttcagcatttcggcaaatcctgacataatctgccgttcgggcaaagtagctaaaaaatgattatcgataagtacccaatcggggatagcgaaactaccgatttcgtttttcaatccattgaaatcaaagccggtctttcctcccaccgacgcatcgatctgagccagaagtgtcgtcggtatattcacacaatgtattccccgtttgaagcaagaagcagcaaacccaccgagatcggtaatcactcctcctcccacattcaccaaaacagcatttcgccgggccccttgatcggacaatacctgccaaatctcagccacactctctaaagatttgtgatgttcaccttcaggaattgtaataatatgttcttcaggaataccgaaatcctcgaaacttctctgacaaaaattacgggaattattatcgaccagtacgaaaatatctgcaataccgaagtccgccagcttcaattgtaaatccgcccggatatcacgggtaaaaattatattgttcatatacctgcaaattttgccaaaaataaaaaggaaaaagcaaaactccaatattaatcggagaaaacggcaaaagtaaagaaatcagcttctctgcccatcgaagctacggaataatatcttgtttttaagaagtataattcaataatatttcataactttgttaaatacggatccatttaaatcttctttagccatgaatcgaaatagctctgtgaaagcccgcattgcgatcagtttattacccaagctgaatagctgcatatacctcccgttgatcgaaagatgcggaggtctggaaggtttttttctcgaaagcgaccaaacgctgaatcagctctatcgggagttgaatatacccacggacacttttaaccggaaaacggctatacaaaattcagaagcggagatagaacagttggacaaacacgagatacaaatctgcacaatcgaagacgggtgttatccggaattgctccggcaatgtgccgatgctcccctggtctttttttataaagggaagttaaagtcctctccggcaaataaatatctggccatcgtagggacaagacatgcatcgtcccggtgtgaagccagagtgacggcattggtcgaagacctggtgaatctgggttgtcgtcctgtcctggtcagcggattggcttatggcatcgacgcctcggcccaccgggcttccctgaagttcggcttgacgactttagccgtattgggacatggattacacatgatttatccggcgacccataaaagcatggcacgtcagattctggagaccggcggggcctggatcagcgaatttccttgcacggcgaatatacatccgagcaatttcttacgccgcaaccggattattgcgggtctctgtcatgcaaccctggtagccgaatcggccataaagggaggagctatggccacagcgcgcctggccatgtcatacgaccgggaagtcatggctttccctggacgtccggaagataaatattcggcaggctgcaattttctgattaaagaaaacattgccgcattaaccgaaaatgccaccgacgtggcccacctcttaggttacccgataaaaaaaacgacactacaacaaacgatcttaccgaatttcagcgacgacgaacaagggaatacactcattcagctcttaagtgaaaatggagccctgcatatcgatgaattatgccagttgacccagcgtccaagtagtgaactagcggctatcctattgcaactcgaactggaagggaaaataatcggtctggcaggcaaaaagtattctctccggtaattttatcactccgagagggcccgccgaagtactaatttcagttttagtaacagattatcagcagggatatatctccaactatcaatccgaaagcaaaatcaaggtttgttaataaaaaattaactgcaaaaagttttgatatcgtaaataattagataattttgacatccgaaaacgtttgaattaactcatactaaaaattatacacatgagaccagaaattaaagaattcatggaagccttaaaggcaaaaacagtaggtgaagcagagttccaccaggctgtagaagaagttattgaaactgtatgggatacctatcaggcaaacccgaaatacaaggccaataagatcctcgaaaaaatggtagaacctgaaagagtaatcatgttccgtgttccatggatcgacgacaaaggtgaagtacaaatcaaccgcggctaccgcgttcaattcaatagtgctatcggaccgtacaaaggaggtttacgtttccacccgtcggtaactttgggcggattgaaattcttaggtttcgagcagactttcaaaaactctctgactacgctgcctatgggtggtggtaaaggaggttcggacttcaacccgaaaggaaaatcagacaatgaagtaatgcgtttttgccagagctttatgactgaactttgcaaatatatcggcgccgacacagacgttcctgccggtgatatcggtgtaggagcccgtgaaatcggttatctgttcggacaatataagagaatccggaacgaattcgtaggtgtactgaccggtaaaccaagagaattcggtggatcacgtgtacgtccggaagctaccggttacggtacggtatatttcgctcagcacatgctgaaagaaaaaggccaggacatcaagggtaaaactgtcgctatctcgggattcggtaacgttgcctggggtgctgcacagaaactcgttcaattgggagccaaattggtaaccatctccggaccggacggatatatctatgacgaaaaaggtctgactcaggaaggtgtcgactatatgctggaattacgagcaagcaacaacgacgttgtagaaccgtatgcagctaaattcggagctaaattcttcgctaagaaaaaaccatgggaagtaaaatgtgatatcgctttcccgtgtgctattcagaacgaattgaacgaagaagatgcaaaacaattggttgctaacggttgccagatggttgtagaaacttccaatatgggttgtacagctgaagctgttaaatatttgaattctcatatcactttcgctccgggtaaagcagctaacgcaggtggtgttgccgtatcaggtctggaaatgagccagaactcaatgagatatagctggacagctgaagaagttgaccagaaactgtctcagatcatgaaagatatccacgatacttgtgttaaattcggtaaggagggagacaagatcgactacgtgaaaggtgctaacatcggcggctttataaaagtagctgaagcaatgtgtgctcagggacacgtatagaaagttaaaggtaaaagttaaaagctgaaaaaacgattacctgaaaattaaagcgtacacttcaatggtgtgcgctttttttattatcttcgtttccgcaaaatcattcagttttcagctaatcatttttagcttcaaatttatgtacatcgacactcattcacatatctacgaagaggaattcagagaagaccgggaagctgtcgtacaacgtgccagagaggcgggagtgaattacatcgttcttccggacatcgatagtgaatcgcgcaaccggatgctcgatctggcagcccgacacccggagatgttatttcctttggcagggctacatcccacttctgtgtatgagaactataaaacagaactggcccaggtagaaaaagctttgggtaaccataccttttacggcatcggagaatgtggtatagacttatattgggataaaagttattaccgggaacaaatcaaagcattcgaacatcagcttggaatagcaaaagaaaccggtttgccggtaatcattcattcccgtgactctctggaggtgattttcgaagtgctgaaaaaacatccttatacccgtggtattctgcattgttttccgggtaatgcagcagaagcccggcaagcaatcgacatggggtatttattaggaatcggaggagtcgttaccttcaaaaagagtcagatggcagataccctacgcgaaatcggcccggcaaacatcgtgctggaaaccgattctccttacctgactccagtccctttccggggaaaaagaaatgaaagtagttatattccgttaatagctcaaaaaattgcagaattaacgggtctcgagacaaaaaaaattgaagaaataacgacacaaaatgctttgaatttgtttaatttgcagtgcgaaaacgtgtgaggggtcatcgataaactttgatatgacaatgacaaaatcggtattgataatatatacaggcggaaccatcggaatggtcaacgatccggcgacaggggcattgtgtcctttcgatttcgagcagatagcgaaagcagttcctgagatcagagaattcggtttttctatcaacagttatactttaccggagatcatcgattcgtccgatttgaaaccggcactttgggccgacctgtgccaaatcattctggacaaatacgatcagtactccggattcgtcattctgcacgggacagatacgatggcttattcggccgcagccctgagcttcatgctgaacaacctgaccaaaccggttgttttcacaggttcacagcttccgatcggcaccatacgtaccgatggccgggaaaatctgattgcagccttagaaattgcagcggcgaccatcgaaggcaaggcagttgtacctgaagtctgtattttattcggagccaaactcttccggggtaaccgaaccaccaaaatcaatgcagagagtttcgatgctttccaatcgttcaactatccgcctttagcagaaatcggtattcatattcactataattacggagccatcgattatactccccggacagagccgattggtgcatttacggaaatgaataccaatatcgccatattgcaattatttccaggcattcgtccggaattaatagatgccgttattcaaactcccggtctaagaggactgattttggagacttatggttcggggaatgctccgaccgaccgttgttttttagaaaaaattaaagaagcctcccaaaaaggcatcatcatatacaacgtcacccaatgccagggaggaacggtagaaatgggccgttatgagaccagcagagagttattaaactacggggtttcaagtggatatgacattacgatggaagctgctgtctgcaaaatgatgtatctgctggagaaataccgtgacgctaacgaaataaaaaaatacttaaattcatcaataaaaggagaaataaccatgaatcatattgggttttaacattttttttgtaccttgccgcgtcttttggtgcgtcctgtgggaatacaaaggtttgcaagggtacgcctgaagtttgagagttaaattttaattatttataaactaaaaatcagttaaagagatcatgagaaaattatttgcactaatagcagttttaggaatgcttactattggagcatcaaaactaatggctcaggaagacgaagcagcaccagcagctcaaaccgagcaaacaacagtttctatcgatgacgaacaaattgaaagcacttcaatgcatgcagcgatcaaacagaaattcatcgaaggtggtgccggatttatggcttgtgttgtattgtgtttgattttcggtttggccatcgcaattgaaagggttatttatttaaacctttccgatacgaacaccaaaaaattcatcgctggttttgaagacgcgctgaacaacggtggtattgaagcagcaaaagaatattgccgcaatacccgcggacctgtagcaagtattttctatcagggactttcccgttacgatcagggaatcgacatggttgagaaatcagttgtttcttacggatcggtacagatgggtttgatggaaaaaggattgacctggatcggattgttcatcgcattggctcctatgttggggttcttgggaactgtaatcggtatgatcgaggccttcgaccagattcaggcagcaggtgatatgagcccggcactggtagcaggaggtattaaagtggcattgattacgaccgtaggcggtttgatcgtagctatgatcctgcaggtattctataactattgtgtatcgaaagtagaaggtatcgtaaacaatatggaagatgcttctgtaagcatgttagacattttggttaaatacgagcaaaaaaacaaataaaccatggatagtaaaaaaatactcaaccttgtaacaatcgtaatgttcgtcattacagtagtattgttagggctgtttatgttcggaggtgaagtaccgaatcagccgtacactactcctgtatatacatcgacattattgaattgggcatatatcctgtgtggtattgcaatcattgcagctattatcttcccggtgattcgtctgtttacccgcccgaaacaagcgatgaaaagctttatcggattagccggagtagtcgtagtcatcctgatcgggtatgcactggctgatggtaccccgataaaactggtcggttatacggggcctgataacgtaccatccatgctgatcttctcagatacgattttgtatacgatgtatttcctttttgcagcagctattttagctatcttaggaacggaaatttacagaagaatgaaataatactattcccttcggggaatagagataaaactaaggaatatggcaaagaaaacaccagaaattaatgccacttcgactgccgatatcgcattcttgttgcttgtattcttcctggcaacgacgacgatgaatgtggattccggtatatacagaagacttccgccctatcagccggataataccgaagccccgaaatatgcaaaacggaatattttgcaggttttggtaaaccggaacaatcagctggcgatcaacggagaattggcagatgtttctaccctgaaagacaggacaatcgaatttgttctaaatccgaataatagcgaagacttaccccaaaaagaaattaaaacgatcgatcttttcggtcccgtggaagtttcgaagggtattgtttctcttcagagtgataaaggaacgtcatatgaaatgtacatcgccgtacaagatcagttgacatccgcttataatgaattgagaaacagaaaagccaacgagaaatggggtaaaaactttgatgaactgaatgaagaccaaaaagaagcagtcagaaaagttgttccgatgcagatttctgaagcagaacctaaaaacataggagggaaaaaataatggcaaaatttaaaaaagacggtaaaagagagacgcccgcaatttcaacggcatctttacctgacatcgtgtttatgttgctgttcttcttcatggtgagtaccacgatgcgtgaagtttccctaatggttgccaatgcgatgcctcaggctacagaaaccgtaaaactggaaaagaaatcactcgtaagtaatatttatgtaggtaaaccaactcctcaatatcaaggtgcttacggaaccgaaccccgaatccagttgaacgatcgtttcgcaactttagaggaactgggagcttttgtggtttcagaacgtgaaagtcgtaaagaggaagacagaaatagcattaccaataacctgaaagtagataaaaatgtaacgatgggtgtcgttaccgatatcaaacaggaattacgtaaagcaaattcattgagaattaattacggtagtacgaaaaaaccccattaattaattctaaaaaataaagggggacatggttccccttttcttttttttattatctttgcaacgcatttggttccgtagttcaatggatagaatgaaggattccggttcctttgattggggttcgagtccccacgggatcacagagcaaaacgctaaataaatgcttttcatttatttagcgtttgttttttgttgtaactttcaaaattttgtacgacatactctaaattttgatgcatttttttatatttggtgaaaaattgaaatgtaataaaaaacgagatcatgccctcactttcaaaatatacccaatggaaggttatcggaggatatagtcttctgttcttattgagtatcctggctgctgttttgatttataagcaaataacgaaattaattgtcaacgaagaaaatagtgataatcctaaccggaaactattcattattggcaatacgatcacggggctttatgaatcggaagggctgggaaatgcttttgtacaaaccggttcgagatcctattttctaaagtaccgggatttaatagaggaagttgaatcgaatatagactctttaagagacttaactacccgtctggaccagattctccgtctggatacgatcgatgatctactcgatcagaaaatacgcaatttgcaggatatcgtccgggtaaaacaatcctttgtcccggatgatttctataataaagcgattgccagtatagaatccggaagagacagcctgcaagggacggatatccggaaaagacacattacgacactggacagttcgtacaccaaatcagaaaaaaagaaaagacgttggctatttttttccaagaccgagcccgattccgtactcaaagtttcggtttctcatcatactgttatcgatacgctcaacaggcaaacagccttacaaaatacggacagtgtcgttcatattctgaaaacagcctgggaagatgtacaaaaacaaacccaggatattacccgtcaaatcaaccggaaagaatatgccttaattcagcagagcacctacattacggatcagttgaaacgaatattaggagcctatgaaaaagaagaaatcacgaattctctaatcaaacaagaaacccgggaacaaaccctcaacacgatgatacggatttttgcctggctggcagtgattgccttcctgctgatcttgttctttaccttcttcattcttcgcgatttatcccgtagccaacgctatcggaaagaactcgaggcagccaaccgctatgccgaccaactattgaaaagccgggaaaagatgatcctgaccgtcacacacgacatcaaatcaccgctaagctctgtaatcggttatatcgaactgctcaataacacccccatcaacgaacggcaacgttatttcctgaaaaacatgcggggttcttcggaacatatcctgaaactgatcggtaacttgctggacttatcgaaactggaaaacaataaaatgcccgtcgagcatatcgtgttcaatccgtatcatttattccaggaaattacggacaattttatgccactggcagcagccaaacatttggaattaaaagcccgtttcagcgaagatctcgataaagactactcaggagatgccctgcgcatccggcagatcctgaccaatatcttatccaatgcagtaaaatacacgacaacaggacatatctccttctctgccgaaaccgtcaatccggaaaagatcagactaaaaatccaggatacaggttcagggatgactcccgaggagcaaaaaatcatcttccaggaatttacacgcctaacttcacatgcaaccatagaaggtacaggcctgggattaacgattacattgaaattaatccatcttctggggggagaaattcaactgaacagcactccgggtaaaggaagttgttttacgatcctgcttcccctcgggcagtgtaccacctcatcctcaacggcttcccccgagccacccctcctcccccgaccgggtattccggtgagcggttcacctaaaattctgtttatagacgatgatccgcttcaactggaaatggcggtcggtctattggctaattatggtattcaggcagaagccaccaccagcccacagcatctcctgaacaagctggcctctaccaaatacgatcttcttttttccgatatccagatgccggaaacgaacggtttcgatttggttaaacaaatccgtaattcctcactacctaatgctgccgatctctgcatcgtagccttatcggcagattccggacggacggaaaaagaatacctcgatgccggtttcagtgcttttctaagcaaacctttcacctccggtcaactgacagccttaatcacccaactgacaggtatttcactctcagaaccggcaaccacttcctattcaaatccagcccaggacatagaacgcagaggatatagcctgaaacatatccttcagtttgtcgacaacgatcgggaagccctacaaaaaatcctcgattcatttgtaatgacaacccgggaacatatagaattattaaaaaaatatcaggaagaaaaacaatggacagctatcgtccaactggcccacaaaatgctcccgatgttccgtcaactggaaatagatgaagaaatccccctattagaaaagttagaacaggcgactaaaaacgatctccctgaaaatcaaatctcatccctgactcaggaagtaatcgacaaaacgatcctgttactaaaagaagatttcaaaatctcctgatcaggctccctttcagggctcgctgatcagccttaaagacaggttactacttctcgttgtatcagcatcgagaaaaaatcatcagattcattataaatgatttgggaatccgacagattttaacgaatattgtagacagaatgtgcggatctcaacaaatatttataaaacgaaatcacatcatgcgtataatcacattaagtctattactgtgtggtttagtcatacaaagcttcggtgtacgaccgccgttaaaaggttacacctatgcttcggaacaggctccaacaggaaaagagtggcaatctccggaaaatctggctctaaacaaagagcagccacatgcttggttttttccttttcaagatataaaaagtgcccgaaaagttctgcctgaaaacagtatatattggcaatcgctgaacggtaactggaaattcaactgggcagcggatccggattcacgtcccaaagatttttataaaaccgatttcgacgtgacggcttgggacaatattccggttccttccagctggaatatttatggagttcagcaagatggcagtttgaaatacggagtacccatctatgtcaatcaacctgtcatttttatgcatagcgtaaaagcagacgactggcggggtggcgtaatgcgtacgcctccaacgaactggacaacttacaaatatcgcaatgaagtgggttctttccgtcgggaattcgagattcccgaacactgggacggacgtgaagtatttatcagttttgacggagtcgattcatttttctatctatggatcaacggaatgtatgtaggtttttcgaaaaactcacgcaatacggctaatttcaatattaccaactatttgcgttccgggaaaaacatagtcgcagcagaggtttaccgaaattccgacggttctttcctggaagctcaggatatgttccgtttgccaggtattttccgcaccgtagcactttattccacccctaaagtacagatacgtgatctggttgcaactccggatttggataataactacaccgacggttctctgacaattcaggccgatatccgtaattttggaaagaaaacggccaaaggatataaagtatgctatagtttgtatgccaacaaattgtattctgacgagaatgaaccggttattctggctagagatactaagggagcggctatccggaacagtgtcgttgcccaggtagaacctattaccacaggaaatacccaggaagcggaaaaagtggttctgaaagtaaaaaatccgaataaatggtcggcagaaactccttatcgttataccctgatcgcggaactgaaagatcataaaaaccggagtatcgagacagtatctacgattgtcggtttccggaaagtggaaatcaaagacactccggctgatcaggatgagttcggcctggccggccgttattactatgtcaacggcaagacgataaaattaaaaggggtgaaccggcatgaaaccaacccggctgtaggtcacgctataacccgtgagatgatggaaaaagaggttatgctgatgaagcaaggtaatatcaatcatgtacgtaactcacattataccgacgatccttactggtattatctctgtaataaatacggcatttatctggaagatgaagccaacatcgaatcacatgaatactattacggggcggcttctctttctcatcccgttgaatggaaaaatgcacatgtcgcccgggtaatggaaatggtacacagcaatgtaaacaatccttctatcgtcatctggtcgctgggaaatgaggcaggccccggccaaaactttgtcgctgcctacgaagctttaaaacaattcgatttatcccgtccggtacaatacgaacggaacaattcgattgtggatatgggttccaaccaatatccttctatcggttgggtacggggagctgtaaaaggaaattatgatattaaatatccgttccatatctcggaatatgcccattccatgggtaatgcctgtggaaatctgatcgactactgggaagctatcgaatctactaatttcttctgtggcggtgccatttgggattgggtggatcagtcgatgtataattatgacaagaaaaccggtaagcgttatctggcctatggaggagatttcggagatatccccaatgacggtcagtttgtaatgaatggtattgtatttggagatcttgaacctaaaccacaatattatgaagtgaagaaagtctatcagaatatggctgtgaaagcgattgacatcgagaaaggtcaattcgggatattcaacaaatattattttaaagacctttcggattatgatgtaaaatggtccttatatgaaaatggcaaggaaatacaatccggtcctgtgactacaggcattgttcctgcccgccatacggtacaggtagttattccttatcaatacaataatctgaagaaagattccgaatatttcgtaaaagtgcagtttttactgaaaaacgatatgccttgggcgagaaaaggattcgtggttgcagaagaacaaattcaggtgaaagaagcccaccggcctctcatcagcacgatgataagacaaggcggaaaactgacctgcgacaaaagcaggactgcccgccctgtgatccaagggaataatttcaaagtcgagttcgatgaatccacaggaacgatttacagtctgacttatgattcaacaacaatcatagcagcaggtaatggaccgaaactggatgtactccgtgcttttacgaacaatgacaactggttctattcttcgtggtttgaccgtggtttacaccatttacaacacaaagccaaagaaacaacgattatgaataaaccggacggaagtattgtattggcttttacagtagaatcccaggcgcctcatgcagcaaaaatactgggtggtaccagttccggtaagaatacgatcgaagaattaaccgacacccctttcggtccgaacgatttcaaattcactaccaatcagatttggacggtttatccggatggttccattgaattacaggccagtgttacttccaatcagcctgatctggtattaccccgtttgggttatgccatgaaaatccctcaggaatatgccaattttacctactacggacgtggtccgatcgacaattatgcagaccggaaaagcggacagttcattgaacagcataagaatacggttgccggagaatttgtcaacttcccgaaacctcaggacatgggaaatcatgaagatgtgcgttggtgtgccctaaccaatcaggcaaatcagggggctgtatttatagccaccgatcggttatccgtctccgctttaccatattcggcccaggatttgattctggcttcccatccttatcagttgccacaagccggcgacacctggttgcatctggatgcagcagtgacaggactgggaggaaacagttgcggtcagggtggtcctttggtagcggaccgggttttcgccaacaatcacaatttcggatttatcattcgtcctgccggtaaagacctgagtaaaatagccaatatcgctcctgccggagaaattccattgtctatcacacgtagtaagtcgggaactgtagaaataacctcagcccgtaagaatgcaacaatttgctacaccgttggaaaaagcaaagtaaaagaatacacaaccccgatatcacttcgtgaaggaggtctggtaactgcctggttcaaagacagacctgctatcaaaacgaagatttcctttgagaagcaggaaaacatccaaactgttgtgatctatgccagcagccaggaagccggagagggagatgcttcacacctcacagacggagatcccaatacaatctggcatacgatgtattccgtaacagttgccaaatacccgcattgggtggatctggatgccggagaagtgaagaatatcaaaggtttcatttacttaccccgccaagacggcaataacggtaagatcaaagattatagcatccaggtaagcatggacggtaaaaactggggaactcctgttcagaaaggtactttcgataatagcagcaaagagaagcaagttgagtttgccaaaccggtgcaagcccgttatatccgtttcacagctttaagcgaacagaacggtcaggactttgcctccggtgccgaaataacgattctggcagaataaaaacaggatttatcgataataattgaaaattcaactgccgggatgaagctttattcaatagaataaagcttcattttattatacaaggttttacggtctattttcaataagcgtgcagcctcacttttattgttgtggcatttcgccaatgcttcacggataagctgtacttcattcttttctcgcttcaaagccagatcttcgatttgagggacaggatccacagctgccaattcggccggaatatctttcaaagagataaaatcaccgagacacaataatgtcgcccgcttgaccacattccgcatttcgcgaaggttaccgggccagttatagtttttaaagacagacattacctcatcctcgaaaccgatcacatcttttcctagttcttcattcgaggcagccagaaaatgattggcaaaaaccggaatatcttcctttctttcacgcaaacttaaagcttttaaagaaaattcattcagacgatgataaagatcctcccgaaaattcccctcggccacagcctttgtcagattctcgttcgtagcggatataatacgtacatcaaaagcgatctctttatcactccccacaggcttcactttacgttcttccaaggcccgtagcaactgtacctgcacatcgtaactcagatttccgatttcatcgaggaaaatcgtccctcccgaagcagccacaaaataacccgtcttatcgttcacagctcccgtaaaagcccccttcacatgtccaaaaaattcactggctgccaaatccttggggatcgccccacaatcgacggcaataaaaggcgcctccttacgattgctctgagcatgaatcaaacgggctatgtactctttaccggaaccactttctccggtaatcaatacagtcatcatagtcggagctaccaatcgaatatattcgtaaagtttgtcggcttccagactcgtacctttgatgtatggcaccgattggggcttttttgtccgctttttttgttcgggaacagcagtctgttccaaagtgtcctggatctttttcaaaatctcgtccggaatgacgggcttcgccacataatcgaaagcccctaatttcatcgccaataccgcagtttgtatatcagcataaccggtcatcaaaatcacctgaacctcaggagtcgatgccttgatatttttcaacaaataaattccgtcctcatccggtaaacgcaaatctgtcaacacgacatcatatttcgtccctttcagcttcgccaaagcttcgcggcaagaaaaagcattctctacttcaaaccctctttttgtcaaccatgttttcaacatcagacaaaaagtggtatcgtcatctaccaataaaattttagccatataccaatttataaaacagtcgaaccgactgaactgttttacaaaattaggaaactaactccacgaaacgaagcatttatcttttttttcgcaaaaaaaagtcaattcaaaggcgaatttttcaaaaaatatttaactttgcatcacaaagtaatttgaaatatgaataatcaggaagctttaaacactttaaacgacatccggaacatgatggaaaagtccacccggtttgtctcattcagcggattgtcctctatcgtcatcggcatatacgcttgtatcgccgcgataattgcttattctatcctgggaaatacaacaccggtacccagactggatgtcgacacgcctgcgaaactacaacttttgatcgtcttcgcttctttactgattatcgtttgtatcgttacggtcatcctgatgtgcaggcacaaagcccaccaaaacaaccaatctcttttattcgatttcaataccaaaaggctactgtggaatttcttcctgcctttggttgtaggcggaatactttgtatatcattgatctggcaaagccattatggccttacttcttcgatcatgctgatattctatggcgtcgctctgatcagtgcgtcgaattatacgttttccaatacccgctatctgggttatgcggaaatcgctctcggcctggccgatagttttgtagaaaattatgccctgttgttttgggtcgtcggcttcggcctctttcatatcgtctacggtatcttttttcatttgaaatacgaaaaaaagaacaaatgaaactaaacctggaagatattaataaggcctttgaaagtaaagcccggttaggaatcatgtcggtactcctggtcaatgaatccatcgattttgtatccttgaaaaatttgcttgaactaaccgatggtaatctggccagccatacccggaatctggaggaattggggtatatccgaagctacaaacaatttatcggccgtaaacccaacactaccttttctgtcacccccgaaggaaaagaagcttttaaaaaacacctgaatgccctggaaaattttctaaaaaatcaactggaataataatatctatttttttacacttatactttgaaatacaaagttctttattaaataaatttaaactcttctgattatggaaacacaaatctctttttccaaccaggaaaaatacccacgccaagggtttatgcaacggaatgccttgtctgtcaaaattattttaatcggagttttaattctcattctcctgattccgcttgcaatgatccggggattaatctcggaacgttccgaaaccgcctcggaagcaacaacggaagtacaaaacaaatggagcagctcacaattggtaacaggccctttcatcagtattccctgctatgaaaactacgaagagacttattatgaaaacggagccacgaaaatcagggtaaagaaagtcaaaaactatatccatattcttcccgagcttctggatattacaggaaatgtagaaaccgaagaactgagtcgtggtttatacgatattgtcgtatataaaacgccgttagtattaaaaggcaaatttatcatcccggaacatttcgaaaccaccattttgcccgaagacatagcgcttcagcatgcgaccttgaatctggggatttccgatcttcggggaatcagcgaacaaataactgtcgactggggtaaagaaacgcttcaattcaacccaggattaccttcggattttattttatcttcgggtgtttcctccgtactacctcaacaccaaaaacttcaggccggagattcgattgaattttcgatccaactacagcttaaaggctcagaatcgattcaattcagtcccttcggtaaaacgacacaaatccacctaacctccaattgcactaccccgagttttacgggagcctttttaccggagaaccgtgagattacgaacagcggtttcactgccgactggaaggtattgaacctcaaccgaaattacccccaggtattcaccagtaaccagtaccacaatgaagaagaactctcttctttcggagtcaacctcttattacccgtacaacaataccagcaatctatgcgctccgtgaagtatgcctccctgattatcattcttacttttgtgatcagtttttttgtggaagtgatgcaaaaaaagaatatccatcctttccaatatttactgataggacttggcttatgtttattttatacgttattgatcgccatttcggaacatctggggtttaatttagcctatcttatttcagcgatcatgactattattctattgacactatatatgcggggaattctcaaaatccggaaaacagcctttacaataggcggattgctggctctattatatctctatatctttgtattgattcagatggagacttacgctttattagccggtagcctcggattattcatcatcctggcggtcatcatgtattattcacaaaagatcaactggaacggaggaatgaaatagtagaattattccggtccttgttcgtcttcggtgttcgtgttcggggacccggtcgcttctgtcggtcatctacctttttctttcactgaccggcggaactcctcgcaagctcgtcagacaccaccggtcgggcgttcagaaaaagcaagacgacactcgccggagctccaatggtccccgaacacgaacaccttcgactcccgttgtcactacctggcaagctaaaccggacctgaaaaccataaatttcaacgaaaaaagattttccggtaaagtaacccaactatccataatccgatagaggtgagccggtattttattctataaaatttttctaattcttcctttgcca

SEQ ID NO: 5975 - DNA, 4731 bp, Unknown
  gut microbiota DNA sequence
aaaagttacattttaattttaaaataattttatttacaatatggctattataaagaaattaaacggacatacccctaaattcgggaaaaactgttttttagccgataatgcagctattatcggtgatgtggaaatgggagacgattgcagtatctggttcggcgctgtgctacgcggcgatgtacactccatccggatcggtaataaagtcaatatacaagacaatgccaccatccacgccacttataaaaaatcgccgacaaacatcggaaataatgtctctatcgcacataatgccgtcattcacgggtgtacgatcaaagacaatgtcctgatcggcatgggggccatcgtgctcgacgatgctgtggttgaaagcaatacgatcgtagcggcaggcagtgtagtcactaaaggtactgtagtggaatcaggctgggtatatgccgggacaccggccaaaaaaatgaaacaattgggggaagagttattgaaaggagaagttgaaagaattgtgaatgcttactcgatgtatgcaagttggtacgaagacgaaaatcagaaggccgaataaaataaaccataaaaaacaaagcatatgagcgtaatagtttctccttcgcttttagccgccgattttatgaacctgggcaaagacgtggaaatggtcgatcggagtaaagccgactggattcatctcgacatcatggacggcgtattcgtgcccaatatatcctatggtttacctgttgtatctcaaatcaagaaaatagcccgtaaaccgctcgatgttcatttgatgatcgtacaacccgaaagatatatcgaagcatttcacaaagccggagccgacatcctgaccgttcacctggaagcgtctacccatttgcaccgtacgctccaacaaatcaaagctttgggtatgaaagccggagtcgctttaaatccccacactcctgtcagcctgctcgaagacattatacaggatatcgatgtggtgctgatcatgagcgtgaatcccggtttcggagggcaatcatttatcgaacattcgctcgaaaaggtgaaaaagctcaaggcactcatccaggctacccatagccataccctgatcgaaatcgacggaggagtaaatttcgaaaccggacgggaattggttactgccggggcagatgcgttagttgccggaagttttgtattcaaatccgaagatccggaagcgactattgcaggattaaagaacttaaaaacggagtagggcttagaacacatattcaaatttgaacctagtatttcagtaagatggcagaaagtattattaaaatggaggggggagtaatccgccaacaaaaaaacaccatactcaaaaatgtcaatatcgatatcgcaagcggtgaatttgtctatttgatcggtaaagtaggcagtgggaaaagttccttcctgaaaactttatatgcagaattgccattggaatatgggaaagctgaagtggccggttttcaattaaaaaaaatcaaaaaatcacagatccccttgctacgccggaaatgcggtattgtctttcaggatttcaaattattgatcgaccggaatgtatatgaaaatctggaattcgtcttgaaagctaccggctggaaaaataaaaaagccatcagggaacggattgaaaccgtactcacgaaagtcggtatgagtgacaaacaagccaagatgccccatcagctatccggcggagaacagcaacgtatcgtactggcccgggctttattgaatgcccctcccctgatcctggcagacgaaccgacgggtaacatcgacccggaaacctcctatcagttggtggaattattaaaagaaatctgtgacaccggtaaaacgattatcatagctacccaccaatacgacctgatcgaaaaattcccggggcgggtattctgttgtgaacacggagaactttacgaaaagactccggccaaggcttgcgaatgtacagaggaagtgcttcccttacccccgatagaagaaattatccccggtccctcttctgaagccggaacgattgccccccccaatacggaggaggtacctgaagatacaactgcggtaaatagtgagccagaaacagctacgattgtcgaagtaacctcagaaacggtcaatctcacagaaacgcccgaacaagcggcgtcagagatcgaagataaaaaaacaaccgaagataccaccggggatatcatgaccctcatcggcaaactcgactaccccgaaatcaccgccttcgactacgagctggagcatctgcccgagctcaaaccggaagatcaagaagtcgcaaccgaagaaaatacagacatcccggaaattcaggaggagcttccggagaaaaaaggaaagcaaaacctgcctccggcattagatgtcgaacttatcgactgaacaaccactccagagattgtcccgaagtgagatttcccactttcggacaatctttgttcagatttccattttctttttcaaccacgctcttacgggttcgtcatacaatttcagacaggcataagccatcatcacacaaaacgctgcaatcaaaatagtagaaggccataccgatgtccagggcaaatgtctcggtgtaacccaactccaatacaaatagataaccggatagtgaacgatataaagcggataagaaatctttcccataaaatcacaacctttcgaaaacagactcccggataactttccgcctgctccgagcgctacgatccaagggaagacaacgatcacacacagagcttcatacaatccattcaaccaataatggttttctcctcctaaacgaggcatagccagaacgatgaaaagcaatacgctacacttttcaaaagcatattttgtccggatcaggaagccggtccgggataataacaacccgacgaaaaacggatacatcagacgggtaaacccgagcctcagttgcggaccgtccagtttccatcctccggccagacaaccgttcggacttgtcacggcatagtgtatcaaagcaccgccagccacgatcaccagcaaggtcagcaaaaacttcgaaaacctccggatcaccaaggcatagagaatattggccatatattcgaagaaaagtgaccaggcaggtccgttcaacggatgcatttcccccatccgcggatatccatagagggtggaacaggaagcagggtggaaccgatgacaaacaacaacatcacctgccaaaccgaaacccggccgatctccggaaacatagcgtcgctcccgaaaaagaaaaatacagctccgataaacatccccatcaccaccatcggctgcaaccggatcagacgacgcttaaaaaaggcaccgatagtcatcttattccaacgatcgtcgtaagcataaccgaccacaaaccccgaaagcacaaagaaaaaatcaacggccaaataaccatgattgatcacctgatccaggtggccggacgaatgagcttcgaacaaatgaaaaaatacaaccagaatagcagcaatacctcttaaaccatccagaattaaataatgtggtttagcattcaattcagttcccattaaaaatcatttttcaatttacatttcaccagcacagctcctccttttcctctggccgggagatacggcatccccccaaactatcattccggccataccccaaaacaatgtccgtataagcttcgaatttaatcttctgttttcagccggacttcggaatcaccgatctcgatcagtctttgtttcagtaaagtccccaaagcctttttataatttttcttactacatccgaagaccttgtagatttcctccggctcgcttttatccgagaggtccagaatgccaccgtaatctttcaatttttcaagcaccataccggccaaaccttctatttttgcatatccgggcagctgcaaggttacatcgattttctcgtcttcccgcacttccttaatatatcctttcattttttggccgatcttcagcggctgaaaaatttcattattatagatcaatccccaatgcatattattcacaatcacattgtatcccagatccgacttccgggcgatcaacacttctacttcctcgtggggttcgtattccgggaatacctgatccaggtacttatcgatcttcgtcgaagcgacaatccggtcggacgctttatccagataagcatacaccaaataggatttcccttctatcatcggatcgcgctgctcccggaaaggcaccagcaggtccttccgcaatccccaatccagaaaagccccgacaggactaagagctaccactttcaggaatgcaaattcgccgaccattacatggggatgttccgtcgttgcaacaatccggtcctccgaatcgaaataaacaaaagccttcacttcatcgtccgggaaacaattggccgggacatattctttcggcatgaggatctcaccgcgttctcccccatccaaataaactccaaaatcgacgattttaactaccgtcaaagtattaaatcttcctatttcaaccatggctaaattaattgaacgttttactcctgctacctgcggcaaatataaagaataaaactcagaataatttaaatccccggaatgttaatccgcagctctccgatatatttaccgtatatacgagcagaacatacgtaaaaaaaaaacccgacggtaac

SEQ ID NO: 5976 - DNA, 7758 bp, Unknown
  gut microbiota DNA sequence
cgagcgagaggagtgacaaacagaaaatccctacaggcacctttccggagaaggctcaggcctgatcggccgttgcagtgaccataaaaaagcgcccgcagggtttatgaactttacagaccttacaaactttttatttaaacgccttttcggataatccgggcccgttcagtttcaatttttcaaaatattccggaacaggacgtcccagcaatttgtcgacatacatccgggcaatatactgcgaaagcatgaatccgtgtccacgcattccgacgaacagtcccaattcaggatcgacaatataacggggttcggtgtaatatccggcccataccgcttgtattcctacgccggccaaatcgggaatccattcggagaacatctcgctgacgatttccaaaaaagcttttgtatttactttcagattcttatcgatacgcatagcgtcgagtttcggcgaagcacaaccgataatctggccggtataggcaatctgttgaccataaaccgcagaaaaacctttgtaatcctgccggtcgatcaacatatccagattcgtcccatgtttacctaacatcggtaaacggcgggtaatgaaagcctgatggcgtacaggatacaatccggcatctattcccatactatcgcacaatttaccggctccgctccccaaagcatttacaaaatgttcggtacgatactccacatattttttatcgtgggtctgtaccaaaacactggtatatttcccctcccggcaagcttcgagcacccggcaatcctccatgaccgtccctccggcagctattcccagattacgtaccaggtctactacttttccgggagtcgcctgccagcaatcctccgataccaaggccgaaatatattttttaggattagcattaaaatatggagaaatctcttcccggaactgcttcggagcgatcatttccgctttcgaccaggctttgctggcttccagtgctttataagtctcctcatcgtgcgcaaaactgatgtaccggataggtttgtaatcgatattggacagatattgtaattctttaaaaatatgatgattctgagccgctatttctgccagttcgggtaaagagaaggccgtacgtccgccgccgatatttctccacgacgatccccggtcggcattcaccaatatcggattcatacctgcctctgccatataacggaacaacgagcttccggcaatacctcctccggcaatcaaagcactgacttctatcttcttgaaggtatcccgattggctaccagataagtatctccttttttagcaggtgcgatctcacccaaggtcaattgattcgacagcggagcccggggagtggcatctccgaccaattcgattcctctgctgcgaagcgctgtccgcaaacggggaatacaccgtttaccacggcagggccccatgcccaggtgggtcgtatgtttgatttcatctatcgaaataaaggtccggtccccgatcacttgcaatacttcttccagttttacatcatcacaatggcaaatataggtgggccctgctgtatcttccaacaaaggtttcggctgcaaaggttccgggtaattgtctttcacaacgaatcccctgacccgcgtcagggcatccccttgtattgtcagggattttacccgggctacattcgttttattcggtttatgcagaatcttttcgatctttccttctcccagtatctccccgttattgttcaccagatagacttccgccccttcatatgcttcatattcaatcggtaagaaaagattgtctttccgtagatcataaccgaaaatagccagtccggggcactgataaacgcattccatacaaccgatacacttatcgtaatcgattaccggcaccgtggaagtcgaagttttggtaatcgcaccatgcggacaggcaaaggaacacgggttacaagcaaagccatacaggcaatccgcctgtacgaatccccgggccagccgtctggattcttccggcaaacggggttcttccaatactttcaccggatgttgctgcgaatcgatgtattctttggacaacaaaaggtaatcgtcataatccagccgtacacctagttccatcataatctgcatcgccgtatgccgtcctttcagtaccgcactggtcccttcaccgatccggatcgcatccccggcagcaaaacaacgtccgccgaacacctcttttcctttggtgagcaactgattatccgggatcaatccggtacaaatattgataacatcgattccttcgatcaccttttccgtacccggaaccggacggaagttttcacaccgggcgatcaccgcaccgacgataccattatgttctttattcgggattgccttcaacagcatatgcgaagtcagaatcggaatagccaaacgcctaacccggttggcctgaaccgggaatcccccttcccggggcatcgcttccagaatagccttgacacgcactccggcctgcatcagctggtaagaggtcaggtaaccgatattaccggcaccgatcgtcaggacgtttttacccaataaggtcaactcgctgttcatcattttctgcacgacagcggcagtatatacccccggcaggtcatcgttctcgaaagccggcataaacggcacggcacctgttgcaacaaccaggtaatccgcatcaacaaaaaatatctcctcggtctgtatatttttcacggccacccttttcccttcgagcaaatcccaaaccgtagaattcagataaataccgtcggtattttctccggccaatgtcctggctatatcgaatccacgcatcccaccaaaacgtttttctttttcgaaaaagaaaaactgatgggtttgcatagtaaattgtcctcctgtcttatcgttattatcgatgacgatattatctacaccatatttattgaattcttcccgaacagcaagtcctgcaggtccagccccgataatcaccaccgtcgtacgcaaaattttctttttatcggctaccggttgttttacctttctggccataaaatcttcggtcacttcccgcacttccttcactccatccactttcgtaatacaaatccgccggatttttccatccaccaacatttcacaagccccacatttaccgataccgcattccagcgaacgttcccgcccgtccagactatgactatgcaccggaaagcctgcccgatgcaatgccgcagctatcgtatatcccttctctccttctacctcctgcccgttatatttaaagatgactttatccctcaccgggacttccaacaccggatgttttttaatttttgacataataactggttttagattaatagcatgggcaatttaaaagaaaagaataaaaaaaaagctgactttcgtcaactttcctgaattttgtataccggtatgacaggcatttcaaatttccatgggcaaactagtagctactttttcaaactcaaaatatccttccaccccttgtccgtctttacttactcctttaatcgtattatcatcgaccaataacccgaaccaatgatccagctgataggtaatcggaaactccgaatgaatgatgtcgaactcgacggcttccagccgcactttacgtccttccagttctccttttaaaaattcctgtatcatataagaactctctccttcgactttatccgtaaacacaatcctgccggccagcgtttgtcctttctgtttcaggtaaagctcaccttcagcgacaccgtagccgtaattctcgatatatctccatttccctgtcaaatccatcttttaccccctatttctgttctctcccttttgcttcctgccaataaacctccatctcttccaggctcatatccgataaatttttccctgtctctttcgctttatcttccacataaccgaaacggctgataaatttccggtttgtcttttccaatgcattctcgggattaataccgtataagcgggctgcattgatgaccgaaaacaaaaaatccccgaattcctgctccatcttttcctggtcggctttcgctatttctgtctcgaactcttgcagttcctcttttactttggtccatacctcctccttttgtttccagtcgaacccggctccccgcgctttgtcctgtatacgataagcctttaccaaagccggcaatgacacgggaaccccttccaatacccggtgtttccgccctttttccttcaatttcaactgctcccaattttgcaatacctcttcagcactatccactttcaccccgccataaatatgaggatgccggtatttcaatttctcacagatactattcagcacatcggtgatgtcgaaagctcctttttcactgcctatctgggcataaaatacgatatgcatcaacaaatcccccaattctttcttcacttcggccatgtctcctgtcagaatagcatctcccagttcatacacctcttcgatcgacaaagccctcaacgattccatcgtctgttttctatcccagggacactcgacgcgaagtgttgcgatcacttccagtaattcggcaaaagcctcttttttcttttccagatcttccataaataactagtcaaagaggttatctctacctccttccgggacagcttacccgacagcctcatgcatttctcaccaattcgtggctgcaaaaataacgtatttttgtgattaaaaaaaatcggtatctgccctcacatatcataaaaaaggtagtacctttgttatatttattgaagattgcatgattgagaaaagaataagtatagggaatatagatcccattgatttctacggagttaacaattcaaaattcaatctattaaaagagtattttcccaaactgaagatcacagcccggggagatgaaattattatccagggagaaatcaacgatatagaaattttaaatactaaaatcattgctttactcgagcactaccaccgttataatatgctcacggtagcgaatctgaaacggatcatcctggaagatcatgttgtcgccgatccggaagataccgaatcggtgattttatacgggaatgccggtaaagcgatccgtgcccgtacctccaatcagcgtaaactggtagaactggccagaaccaatgatttattgttcgctaccggtcctgccggttcgggtaaaacctatacagcgatcgccctggctgtaagggctttgcgtaatcgtgaagtgaaacggatcgtgttaagccgtccggctgtcgaggccggtgaaaacctgggattcctgcccggagatatgaaagaaaaggtagatccttatcttcagcctctatacgacgccctgtcggacatgattccgcccaaaaagctggaagaatatctggaatccgaaattatccaaatagctccgctggcttatatgagaggacgcacgttaaacgactctttcgtaatcctcgacgaagcccagaatacgacccgcaatcagttgaaaatgtttttaacccgaatggggatcagtgcaaaatttgtaatcaccggtgatatgagtcagatcgacttaccccggcgtggagattcgggcctcattcatgctttcaaaatcctgaaagacatcaagggcatcgctttcgtggaatttaattccgacgatatcgtacgtcaccggctggtgaaggatattgtaaaagcttacaatgaagagcaggaagaacggcaaggaaagaatgaagaataaatggattaaatttttaatataatttctatggatgctattgtaaaaacagatttctgtttcccgggacaaaaaagtgtgtacaaagggaaagtgcgtgacgtatatgatatcaatgatgaatatctggtcatggtggtttcagaccgaatttcggccttcgacgtcatattgccggaaggagtgccttacaaagggcaggtattgaatcaaatcgcatctaaattcctggatgcaaccgcagatatcgttccgaactggaaaatagccacaccggacccgatggttactgtcggacataaatgcgaaccgttcaaagtagaaatggtgatccggggttacctgaccggaagttcctggcgggcttataaatccggagaacgtaccctttgcggtctgcccttacccgaaggaatgagagaaaatcagaaattcgactctcctctgatcactcccacgacaaaagccgatgaaggtcatgacgaaaatatttccaaagaagaaatcatcgctcaaggcttagttagccgcgaagattacgagctgatggaaaaatacacctatgccttattccaacgcgggacagaaattgcagccgagaaaggattgattttggtagataccaaatatgaattcggaaagaaaaacggtcggatttacctgatcgacgaaatccatacaccggattcttcccgttatttctatgcagaagggtatgaagaacgtttcgccaaaggtgaaaaacaaaaacaattatccaaagaattcgttcgtgaatggttgatggataacggctttcagggacaagccggacaaaaagtaccggaaatgactcccgcagtagttgccggaattaccgatcgttacatcgaattatatgaacacatcacaggccagaaattcgtaaaagccgattctacccatgtgctgaaacgaatcgaagacaatgtcaacgcttgtctgaaaactttataaaccaaccgcttaccgtcaaaagaggggttctgtatgcaggaccccttttttactaccaccggccgggcaaatcacattatttcaccacaaagccggagaaatcgttgctcaaaaattttttcaactcctcgggactcacttttactttaaaacttccgtctttaaagaaagtgatatttccggtttcttcgctcacgacaaccacataagcatcgctcaccccactgagtcccaaagcagcccgatgccgcaatcccatacttccgggaatatcccggcgatcggagaccggaagaatacaacgggcggctaaaatcttattttcattgatgataacggctccatcgtgtaaaggcgtattcttgaaaaaaatattttcgatcaattcatcggtcaccttcgctttcatcatgacccctgtctgggcataattgtacaattcggtattttgctgaaaaacaatcaaagcccccgtcttcgaagccgaaaaattcacacaggcctcgacgatagcatccgatacatcttccttgatcacaggcttggcaaacaatttctccagattgaaaatattctgcaaattatatttactacccaccagcaataaaaaccggcggacttcctgttgaaaaacgatcagcagggcgatcattcccataccgaaaaactgccccataatggaagtgatcagctccatattcaacgccctcaccaacaaccaggccacataaaacgtaaaaattccggcaaagatattaatcgctaccgtccccttcaccaaacgataaatctgataaaaaataaaagcaacgatcagaatatccagtatatcgaaaaagccgagcttgataaataacaacataggtccttaaacttatttcaccatacaaatctaaataaaatttcagaatatacggtacattctgtatctttgccgtaatgaaattacaaaataggatcagaacacattaaaactttttattatgcgatattttatga

SEQ ID NO: 5977 - DNA, 237 bp, Unknown
  gut microbiota DNA sequence
attatgaagtctgaattactgtataccgagaattttgaatctcctgaagcctttataaaggctttggataaatatattgaatattataacaataaaagaatcaaagcccggttaaatggaaagagtccggtacaataccgaactctttctattacgggataatgtttaacttgtccaactttttggggtcacttcattttgagacagcctcttttgcttattgtttattatttgttt

SEQ ID NO: 5978 - DNA, 290 bp, Unknown
  gut microbiota DNA sequence
gggcaaagaaggaaagttttattgaatgaaagggcaggccaccctgaccggagtacggatacctgggttacctgaccggattatttctataaaataccgatggctgaattaatccctcatgtaagggttcagaaaaacagctgtttgatagaaatttatacttttcaggtcacagttcgtttcctatgtagtgataacgtaagtcggaggtgttcgtgttcggggaccattggagctctggcgagtgtcgtcttgctttttctgaacgcccgaccggtggtgtctgacga

SEQ ID NO: 5979 - DNA, 6361 bp, Unknown
  gut microbiota DNA sequence
aaatcggaatagatagaaaaaaataaacctacttttaaagtagttaaataggtttcaacggttacaaaagttttaaaagtcaagtctaaccgttgaaaccatggtaacttatgtaatcgctgtaactaaaaaagttttattcatccagtttattttcttgcttgctgaagcttcgaagcaagattagtccggaagttttcgggcctgtagcttatccggacattcttgcagtaaggtggcgattgttttctgaaataccggatggacaaaatccggtaagatttctgccagaggagtcagtacaaaattgcgttcctgcatacggggatgaggaagtattaaatccggcgtattcagaatgacagaatcataaaataacaggtcgatatcgatcggacgggaagaatagcggggtccgccggcaagtctgatccgtcctaagcgtttttctgtttcgagacaacgttgtaaaaaatcgaaggccgataaccgggtttgaaaaacaacgacctggttgagaaaattttcatcacattcgaagccccagggggctgtttcgtaaaacgacgaagccattacccattgctctgtcgatgacaatattcgaatggcttctgttataagctggcgtttattgccggaattgcttcccagtatggtgactacctgcatcttttacccgttctttttgtaatattgccggttattgttgcctttattattgttgttattgttattcttctggtagtttttgttcatcggcttattggaactgggcttgctctttttctgtaacagatctttcggattggaaagagtcataccctccggtaagataacggtacagccgcataaggtgttgatgtcgttatagatttgttcgtcttcgacgctatctttattccaggtgaggaatgatttcttcatgtggttggcggtcagaacgatcagtgctcttttttgttccggatcttccagctctttgattttgtctatgagtttttcaactaatttgccgtagtgcttgtatttgatgtgattcgaactgtaaggcagtctttccggtttctcctgtagtttggagagagaagggagaggatagggagtatctatatccaatttaaattcagacatgatggccagatgatcccaaagtttatgccggaaatcgggaacgtcccgtaagtgaggataaagatttcccatcacgtcgattactgtctttgcggctctggttctttcttcccggtcttcaatggtcaataggtaatctaccattttttgtatgttacgtccatattcaggaagtaataattttttcttttgggtattatattccataaaaatactatgtgtttcttaatcgcagtacgttgtttttaccagatataaagaaaatatttatttatttgcagactttaaccggatttctccgggttgaaggcaatccgaaaatcgttattctgtaaaatagcgatttcaaggtatctctttcagattatgaggcaaatatacgctttttagtgttctgacggaagtttttagtctgcttgaatgtataattttgcaaattttaacaaaagagtccggcttcccccttcacggaagaccacttttgcctttttttgtacgcctaaaccttccaggttgatcacttttccggctccgaaggtaggatgaaaaatgatcataccgggaacgacctgattggagtcgatcggtttgagtttcgatcggtcgatggccggaatatctattgttgcgggtttattcaaagtgatcgccggcttatgtaaaccggacatagctgtcgtagtttttaatttgaaacctgagggttcttcccgcatcgcgatatatccttcgaggaattcctgatcgatctcaccgataaaacgggaaggccgggaggataccacttggccgtttttgtaacgggaagtggcgaacgacatgaaagcccgtttttctgcccgggtgagagcgacatagaaaagccgccgttcttcttccagggcggcaggagtggtcacacattgctgggccgggaaaagttcttcttccagaccggtgataaatacattgctgaattccagtcctttcgatgcatggatggtcatgagggtcactttgttttgatccccttctttatctccgtcctgatctgtcaacaacgctactccttcgaggaaggccggtaatttatcgtctttcccctctttataggcggtttcactgaaatctttgataccgttcaggagctcctggatattttctttccgggatacgccctccggtgtttcgtcattggaaaggtcgtcgatgataccggaagaacgggcgatgataacagctgcgtcatacgcattttcattcgctatctgttcccggaaacgttcgatcagactaccgaatttctgtaatttggaaagggtaccgctgttgaaagcgccggccaccttatcgaggttacagagtacggtccacaggctgacatgatattttccggcgatttcccggattttatctacggtcgaatctccgattccccgtcggggatagttgatgatccgtttgaaagcttcttcatcgttctgattcacggtcagccggaaataagccagcaaatccttgatttctttccgttggtagaaagattggccgccgtaaattttataaggaatattccgtttacggagggcttcttctaagatacgcgactgggcattcgtacggtagagaatagcaaaatcgctgtattcctgctgctcgtaattggctagccggaagatttcattcgtgacctggaaaccttcttccttatcggataaggcccgcaataccttgatcttttcaccttcttcgttttgagaaaaggtctttttgggaatttgttctttgttcttactgatcacacaattcgctgcatctacgatcgtggtcgtcgaccggtaattttgctccagtttgtatagcttgtattccggataatcgtttttaaaattaaggatgttctcgatccgggctccccggaaagaataaatactttgtgcatcatccccgactacacagatgttatgatgccggtccgaaagtttttttacgatcaggtattgggcgtaattggtatcctgatattcgtcgaccaggatataattgaatttctgttgatatttggccagaatgtccgggaaatcacggaacaggatattggtttgcagcaaaagatcgtcgaaatccatggtatccgattgtttgcaacgctgctggtattgtttgtagatttctcccaataacgggcgtttgccggctgtatcttcggataaaatgcgggaagattgggcataactctgagcgacgatcaggttgtttttcgccatcgaaatccgtccgaggattgtgctcggtttgtaaatcttatcgtccagtttcatgtctttgacgatggccttgatcatatttttagaatcctgggtatcgtagatggtatagctcgatgtatagcctaatttctcggcttcgaatcgcaggatttttgaaaaaatcgagtggaaagttcccatccacaggttggcagcgatttcctggcccactaactctgcaattcgtttttgcatttcacgggcagctttattggtaaaggtcagggccagaattttataggccggcactccctgactgagcaattgggctatccggtaggtcaatacacgtgttttgcctgaaccggcacctgcaatgaccaatgaaggaccttctgtgttgatgaccgcctcctgctgactgctgtttaattcattgataaaattcaccctgaataaatttttgatcgacgataatgattgattatttcccgtagcaaaattaaaaattaatctccagcctcacaaaataccggggatttttagtaatattgcaaggataatcgtcaaagtgtgtggagatgtaagtattgtaaaacttttctgtatgttatccgtcagacccagggcggagcggttccggaagggcaggtgagttttgtgccgggaggagatcattgggaattcggctggacttacgagggttcccctcaggccgttgctccgtatgaggattctacccgcttgaccgtccctttgctgggaaacggactctatacttttactgcccgaaaggacggggtgaatacggttcaggaacggttttatgtgttttatgattttatggattttaaaattaccttgaccgatgtactggattgtgaatatattacgattcatatcgattatctttatattcccgattttgccggttttcccggtggagagaatgtggattactgggtcgattgggatggcaaagaacggcaattgtcttctatgaatgactatcggtatgaagatctaagtcaggctgtcgccggctgtgccgaagatgtgtcttgccgcattaggatcaaggatcgtttcggattcgtatgggaaagtaacgaagtgacttacgaatcgatgatcccggaggctgtccctgaactgactctgggaaatacggtggatgtggtcggggaagtcggcgatgaaatgggacaggcgcctttagaagtagaattcgatgcttccggttctaaaaatgcttcttcttatgaatggtatttgtataaagatacgaccgatttggtcggaatggtcttatcgcccgaggatagcctgattggaaatcagatccggacgccggaagattttgtttatacttacgagcattccggacggtataaggtaatgctcgtagccatccatggaaaaggaaatttttgccgggatacttcggatatacaatatgtaaatgtcgtcgaatctttgctggatgtcccgaatgtctttacacccaatggagacggtaagaatgatatttttaaggtgaaagccttgtccctggaatctttccaaggggtgattctgaaccgttggggacgtaaaatctacgaatggaacgatccttcggaaggctgggacggacgtatcgggggtaaatatgcaagcccgggaacttatttttatgtgattactgccaaaggaagagagaaggtgaatcctccgaaatatgttaaaaaaggagctttgttgttagtccgttaagggaaatatttttgcaactaagtttttagttgaaacgtttgttttatcgttgaaatctttttttatttgtgatggaatatcaaaactattgaaataaagatatatttcgttcttggaatcctgttttgtattataggaaattatgctcaggacatcggtcggcaaattttagaaagagagttggaccggaatcattacgatgaggttttaagaggtgtcgattctttataccggatagaaggtgaatcttccgatttgctttttttgaaggtaaagccaatgaagggatgttgcgttataaggcaactttccgctgttattcggagtggttggagcgggattcttccgattgggatacccggcttgctttggcgcgggtagcagccttggcggggcggacgatgaaagcggtcgatatctatgaacaattggccggagaagattctctggatttttttgtcaattatcagctggcccgtttgtatcagcagataggtaaaactgttcgggcgatcggaatctatgatcgtttatatcagacagacacgacaaatgtcattttattaaaacggatcggagattgttacaaccggataggctggagtatgaatgccgtagatcattatttacgtgctgtctgtttggacccggaagatggagagactgtcgtgaaggctgtcaatctgatgatggcgaatacagttttgtttcaggcttataaaaaactgaccgggaaacagcagcaagaggtgatggctgccattcgggataccaacagggtggctgatttatgcgagaacaattccggtctgaaagctgtctgcttgaagaagttcccggcagccttccagcagcctttgaagaatctgtttgttcatttatgggaaaatgcattgcgttccccaaaatttaatgatcatttttcgaccgggttggaagattttattgataaatttattgctgaaaataaaagtattgaagtatgtccgttttgtgctttggaaagtttttatgatttgcaggggcaatccagacgagaaataggtcattggttgtgtaaagaacaatatccctatcttgtggttaattttgataatcttgtaccgattgggcatgcttgtactctggttaaacatcgatgtgtttattatcctgaatataggttacatttaacttttaaacgaaccggcactaacaaatgatattaaaaaaggggattaggagttagtgatataaacccaatg

SEQ ID NO: 5980 - DNA, 4333 bp, Unknown
  gut microbiota DNA sequence
agtagatgaaaaaaaacgtttttttgttttaaatagcgggaataactgaattcaccgggattggcattttgtcggaaagggagtatacgggcattgaaatgcagggagtcgccggacgtataaatggtatcggtataaaaatgactgagatagtagttttgattgctcacggataagatcagattatggtgtgggagtatttcattacaccggccatcgatgcgatagattttgtcgggaaaaggagtaaaaagaggcggagcagaaataacgaatccgtaacttaggaccgttacaattaaaaatagttctttccagccgggagacaattgaaaaatgaaacttagtaaaacgagaaacaggccgatgaagaaacagtaaatagccgctatcaacggcatatcgataagaatacctccgataagagccgctaacagatagataaaaggatacttataattgaaagttacacctgcataaaataattgaaaatttttcttgtataaattacggaaaaattttcaattatccaatattttgagcggtttatttgggaagaattacccgataagcaggtttgaattttccggtactgatattattcagcttatttttcagaattctcttttttaaagcagacagatgatctgtaaacagaataccttccaggtgatcatattcgtgttggatgatccaggctttaataccgcaaaactcctcttcgtgttcttgtccttgctcgtccatatagctgattcgtatacagttgggtcgtttgacgtcttcgtggatgccggggatactgatacatccttcgttgcggctgatttcatctccccaacgttcgaggatatgcgcattgataaaggcttttctgaaacctttacaatcaggatccatttcttcgaaagcatttgcatcgacaacgaatatacggatatttcgtccgacttgcggagctgccaggccgactccgtctgcttcgtccatcgtttggaaaagatcccggatgaatttatccagttcggggtattcgggggtgatatcttctgaaattttacgtaagatcgggtgtccgtagactactataggtaaaaacatatatgtaaagtttttaaatttttaaattccgttgttgttccatgtaagaagtcaggataatggttgcactcatcgtgtcgattaaagctttatcctgacgtgtcttttttttggcacctccttctaagagggctttatgagccagaacagaagtaaagcgttcgtcatacatgactatggggatatgcgggaatctgcgtttcaaaccactcaggaaaggcttgatataggtcatactttccgagtcgctgttatccatctgtttggggtgaccgacaacaaaaagatctactttttcatgggataaatatgcttccagaaatcggaatatctcttgagataaaacggtttgcaagcctgttgctataattccgcaaggatcgctcactgctaaaccgactctttttttcccgtaatcgatggccagtattcttcccacgttcctatttatttaggataacaaagatatcttcgtttttatttttcataaggtattgttctctggcaaatttctcgagattatctttattactcaataattccttcattttccggttatcttcttctatcttattctggtagtaagctttttcttttttcaaagtagcgatttttcctcgcaattgcattttacctaccaggctgttccggtcaaaaaaagcaagccacaccaaaaaaataagcagggtaatggtatatttgttcattaatctgctcacccaaacgctgttactcgtatttttatccttttcttgcatagttttgcaaagataagaaaaaacgatcaaagttccgattttgcgccgcataattataaaaatccacggaataattatacctgttgttgattatcaaacgtttgcagttgctgaaaatcgtcattttgctatttttcgaacagcttattttcctaaatttgtagaggaggatgtgctcctgaaagtaaagaatatgaatctgtcgtctggttttagttaagaaataaaatgagaacgatgaaattagaaacaatttaaaaggaaatatatggaagaaaagaaattagctgtgattgctttggggggaaatgccatactgagaggcaatcagaaaggtactgtcgaagaacagaaccaaaatatccgggagactttggagaatctgatttatctggttcgtgaagggtataatctgattattactcacggaaacggtcctcaggtaggaaatatcctgatgagtgacgatgccggagtaaaaatgtatgggttacctcccatgacattagatatgtgtgtggcttattcacaaggtgagatcggctatatgatcgagagaaatttgcggaatatactccgggaacacggacttacccggcatgttgtttctatgatttctcagatcgttgtcgacgagcacgatccggcattacaaaatccgactaaacgggttggtagaatttatacccgcgaagaagccgataaattggctgcagaacatggatggatttttaaagaagagattaaagtagaaggagggtggagaagagtagtaccgtctcctgctcctatcgattttaaaaatgctgctttggtggaacggatggctcgttcgggaagtattgtgatcaccggtggaggtggcggtatccctgtatatgtggatggggaaggaatgttgcagccgctcgaaggagtgatcgataaggatttggcttcggcaatgatcggagcaagggtgaaagccgatgagttgtatattctgaccgatgtcccttatatttataaagatttccgtaaaccgacccaagaggttttggagttcctcgattatgccgatgcgatgaaatatctggaagccgggactttcggagaaggaagtatggcaccgaagatccgggcttgtctttcttttgtcgagaaaggtggacagaaagcggtaatcaccgaagctaccaagctggaagatcgtcgttacggttctaaaattaccatgcattacgattaagaataggtgtacgaaattagtgttagaattagtttattttttatacttttgtccattaccaagattttggaatctgaaatttacaatttaaaataaagaagattatggcttttaatttaagaaacaggaattttctgaagttgttggacttcacccccgcagagattaaatacatgttggatctggctgccgatctgaaaagagcaaaatatgccggaactgaacagccccgtttgaaaggtaaaaatatcgctttaatatttgaaaagacttcaacccgtacccgttgtgcttttgaagtggctgcctatgatcagggtgctcatgccacctatctgggacctaccggatcgcagataggtgtgaaagaatcgatgaaagatacggcccgtgtactcgggagaatgtacgatggtatcgaatatcgtggatttgctcaggatgttgttgaagaattggctaaatatgccggtgtacctgtttggaacggtttgaccaatgaattccatccgactcagatcctggctgacttcctgactatgtcggaacataccgataaacccctgaacaaagtaacttttgcttatttgggagatgctcgtttcaatatgggtaattctttgatggtcggtggtgctaaaatgggtatggatgttcggattgttgcacctaaagctttacaaccggctgccgaattgatcgctacttgtcaggagattgcaaaggaaacgggtgcaacggtgactgtaaccgataatgtagaagccggagtgaaaggatgtgatttcttatataccgacgtatgggtatctatgggagaacctgccgaagtatgggcagaacggattaaattgttgatgccttatcaggtgaatgcaaaagtgatggaaatgacaggaaataagaattgtaaatttatgcactgtctgcccgcttaccataatctggaaactcaggtaggtcgtgatgtacataaacaattcggcctgaacggtatcgaagtgacggaagatgtattcgaatctccgaattctatcgtattcgatgaagctgaaaaccgtatgcatacgattaaagctgtgatggttgccactctgggtgactaaaatgagttctcggcaaaagaaacgtgtcaggttttccctggcacgtttttttgttttcagtaaccgaaggttaacttattttatttgtcctgctatttctttttggaatttatagatagcaaaagtattgacaggaatgg

SEQ ID NO: 5981 - DNA, 4540 bp, Unknown
  gut microbiota DNA sequence
agcgttttgccggaaaattgaatcggaaattcgtccggttggatcaaattggactgctccagggtgttttctagtctcggttcattggaccggagttggatgcaagttccgtttgtcagtctttcctggggggcaatccgtcgaaattgaatgccagcttctgaggttgcccggaagtatcgactaccttcacaataatttcccgggtatcgttatcccaaaccgcgctggcaaagaggccgtactgatcgtcattgccggcaacaggcttttgattcatcgttagggggagtacctgactacctttatttctcgaaaatagttgttgtacataataactactagtgcgtacggcatgtagattgtcgaaccaaatcatatccggtcgccattgccatccctctgtgcgggcaaagagaggtgcataagtggccatgtggattacgtcggcgtttcattccattcccgtcatgaaggctgcttccaaaagtgctgcattgaaatgattccatttttcccccgaccatgacaagcatactctcctgcgaaaactttaggacctttacggtcatatcgatcataccggttaccttgggataaaaaccagctttccggtctgtaaaaatattcgttgaccaggtctacttgtaggcgttttatttccggccatagatagtcgaattgatctccttcggaattcggacccgaactgccgataatctgaatttccggataggtattccggatggtccatttctgcctgtattttgccccaggttgtactcggagtattgttagcgaactcgatcaattccaaatcatcctgaatataaggagcgagatcgtcgggagctatgtgagcagaagcattgttattctggaactggcaagccgggccatagcttaaaaccggaagtggtgtcgctccgatttcttcggctaattggaaaaactcaaaaaatctcaaaccgtaactttggtaatttacagcttctttcccgtcaggtatacgtgcccagacgctgaggcggtattgttctccttttttttacaccggtaccgaaataaccttcattttccaggcctgtccatttatggggatgaccggagggagagaggcgaacctaatgaaggttgcgttcgaacggaccgtcattctttacttctagctttccgaatgtttgccagcccatcaaagattaagggaattcgaaagagcggtttttgattaattctgcatacaatcctccgtctgcaccataattgatgtcttcaaaaaagagaccgtacatggtaagctgaatgggagctcccggtttgttggtcgaaatgttcatttcgtggatttgactttgtaccaataggtgggcggacaaaaataagcctgtaaataatctgttgagttttatcattgtttggcaaattttgaattttatgtaataatacattcaaaaatttattttttaggtagaaaaatacttgtaaaaggtcagtgtatagctaaacattataaaaacgtaatttcaacacttatgtttgttgtgctgagggagaagggataatcagcataattttaaatcgatgaattgggggaaatgtataattttaggtatattgcagacataaatgtaaggcaataacctttgaaattgacttgagcaaaagcaagttgatagggggtggataattttttagaaagatgaggaacgtttgtatttttttgcttatggtatgcagtctatacgcttgcgaagagggatgcggaaataaggaagtgaatgcagatctgacgatatcttttcccccttctgttaacacacctatcctggaatatatcgatactgtaaaatacttgaaattggaagataaagacgaagctttactggcttatgtaaataaaatggtttgcagggaagataagatctatctgggggatttttccaatcacaaaatagttgtctatgatacaataggaaggtttcagtatgtgatcgaccggcaggggcgtggcagtggagagtatcttcagatcaaaagttttgccgtcgacgactcctgtctttatgtgttagatacttttctgcccggtcttcatgtttttgacaaccggacgggggcctatgttgccaagaaaaaaatggcttttattgcttgggatttcgagactttgagtcggggacggatgatttttactttttgttttttcaaagatgggcatttacctccctctcaaccttcttatcgtcttttgattacggacaacgatctgaatattattcaacgcctgttgccttttgaggaagaaggcgatcctataggaaaagaggtctattttacttcaaacgaccgggaagtggtttttaattggtgtatgaacgattcgttcgttacactggataaagcaaatccggatagtctgagaagaatccggatcgatttcggtgtgaatcagattccggaatcttaccgcggggactatgacttgataatcggaggttcttgtaactatatatacgaaactccggttgttgacggagactatatcgcaatggaagtaaggaaaaaagatttggacgaatgttatctttttcatgtaccgtccgggcagttgcttgcaaatccttccgaagtttcctctccttatatggcttttccggattgctgtgatactcagggacattttatcgaagtgatcgtcaataaagagttttacgacgagcacgtcgaatccggttttccccgggctgatgcagagttcgaaaaacatttggaggatgggatggctttgttaatttataaaatgaaaaagtaacttgggtactggaaatactccgcggctaagcttaaaaatattaagctgtcatcgagacttttgggtaatcctttatagccatagtgtcaatgcgtttacagagtttgcgggtaggtataccgtttgtttgtctccggtacgaggatatattttcgacatcattttatttgttttttaatagtgtttcttttcagatagacgatggattgtaaggccaataaaattacaaaaagatattcagccgttaagtatagcgttagtgtggtatttgtactgttatttaatccatacagataaattaagtatatgcctgttgcgatggcctgaaatataaaagtgatctttgtttttccggtaccaccgactgcattgaggtaaacataaccgggtaaagcaaatgaataattcagcaatgtgacaaccaaaggtgcaacagccgattgtatcaatgattcatcggttgtatagattcctataatcgatcggtggcagatcaggacaatgccaatcaaggggataccgatggaataccccaattttagaatttttcggcagatagggaagagatttgctttttctcctgctcctatggaattactgattaatgctccggtggtgacagcgaaggaattaacgatgacaaaaaatagagcggagacacttctggtgatattagaaacagctaattcggttttgcctaaatgttcgatacctacaaaaaacaggaaccagggagctacactgataaaagcatgaaacatgctccataccgataatttgagtactgcgatgagtaattgtccatcatagactgtccgtaaaccatattttattttgtctatttttatccacatatagatgcataaggtaatgaaagaacctccttctgccagtgaagaggcgatagccgctccggatatgcctaaatgctgcatgaatatcaggaagtagttgagaggaatattgatccctattgcaacgatagctgctcctgatagagcccgggtatacgttatgccgacaaggaaggaacgtatagctaaaaaaggaaatgaaaacaataatcccaggctacgccaatccagatatcggataattgcctggtaaatttcgggagaattgatcgatcttttgaaaatgactggcgaaacgatatgtaccgttaggtaaagaaagagggctagtcccattagaaacaataacccttgaaaaaatattttgcctgtttcttggtaatcttgttctccgttttttcgggcaatcatcacttgcaatccgatactgaatccgaacccaagcatataaacggccagataataaattccggcaatggcagaagctcctaattctatttctccgacatggcctaaaaaggttgcatctgtaatattgatcagttgttccattaaaatgctcatcatcaccggaaagttgatgagccagatttgtttataggtataattcatcgctcaactgtaaatagtacgatctgacttgctgtacacaagcagttgcttcagttcgtaaattcataaataaaaagatataaaactcaggacaaatttctggaagtatttgtctgatagctgaatagctttattatgtggagctattcgtcgagcgtagctatatacagagtttcattggaagtgaatactttttgttaatcgattgcaggacaaaagtatagaaaataattctgtttcgatgatcgtgtttccaactttt

SEQ ID NO: 5982 - DNA, 373 bp, Unknown
  gut microbiota DNA sequence
acgtgagagacgtatgagaaatccagagcaagtattaaacattttagctggacacagcaacgagcccgcgtataaatacgaaaggctctaccgtattctattcaatgaacagatgttctttgtcgcctaccaacgtatgtatgcaaagccgggaaacatgacatccggcacagatggcaaaacagaggatgaaatgagcattgacaggataaacaaactcatagagagtataaaggatgagacttatagtcccaatcctgcaaagagaatttacattccgaaaaagaacgggaagatgcgtccgttaggaataccgtcttttgaagacaaattggttcaagaggtagtaagaatggtgcttgaagccatatat

SEQ ID NO: 5983 - DNA, 565 bp, Unknown
  gut microbiota DNA sequence
atgttttctatttttaagttcgccaccatgctgaagaactcccccaatatggggacaggcagcctgacaacccggaatgatccgcgagtattgcctttcggccgttttttgcggaagacgaagatcaatgaattgccgcagatattgaatgtgctcagtggaacgatgagtatcgtagggccgcgtccgcagatgaaggtggatttcgaacgttttccggaacatgtacaacgggtgatttataatgtgcggccgggaatcacggggctcggctcgattgttttccgggatgaggagcggttgttgtcgcaaccggggatcgatcctgtcgtgttttatacggagaacatcgctccgtacaaaggtgaactggaaatctggtaccaacagcatgcttcgttatggctggatataaaactgatctttctgacggcctgggtgattgtgaagccggaaagtgatctgcctttccgttggctgaaaggactgccggagcagccggagtatttgaaataatttcttacctgaatttgaaatcaaattaaaattaagcagatgttgaatg

SEQ ID NO: 5984 - DNA, 1925 bp, Unknown
  gut microbiota DNA sequence
atttgtttttattatcaaaagagagtatgtcaaaatgttattctattctctttttatttctatttgagcttgattttaatatttgacatactttctttaagttttagtttgttaattaaaagggttttggacaaagatgtgattggtctcctgtaaaatagcatttgaagcttgtgggaagtgatccgtatttatctatggcccaacatctaccccaaccagcatttgagcaaataacatcaataggaggcaaagtctctccagcggctaaggcttctattttatcgaatagaagttctaattttaagtcatcaacatttagcatatttgcaaaattgaaaattgttattacaatgcatacacaacttcctaaaattaattttcttttcatattttctgttttagattaaaaaaactatattgactaaatatgcaatcctgtataataaatggatcattgatgatcgcgttaaatatttataggttcttcaattggaataaagaagtgtttgaaacgtaaatctttttttcttttgtgtcataagtaatatgggtgacaggttcctccagtttaaaattgctcaataaatttccgtcccagtcgaataccaataaagtttggcagtgctggaaattttttccactttctttatatgtttttccggaatagatggcatagatacgatcctgcgaaacagctatatctgaaaaaccgaaataattattctgtgaataagcgacatcgggaaatctgcttccttctttgatatttactttagggtaatgaaagcaatgttgttgaatacgttcgatttgattgctttcgatacggcagatgtcgataatcccactgtacatatctgcacaaacgaaagcttgattatcgggacgtgcttttaaaaccgtactggcatacaatactcctttggtcttttcctgaatattcggataagacggatgatcgggataggtaagaaagtaggcagccttgttttcttccggtgagtataataaatatcgtccttcttcatatattcctgttgcaataacaaatggacctgcttttatagctgatatatgctgttgctctgttgggagttgtatgaaagaggaagcagtggaacggggttggggggtattggctgtcggagtgatcaatagtttgccttgacggaagtcaaaagcagtaatttctgaatcgctattggtagatagcgaagtaacagctactgctgcattgtggcttcgaccacgcggaaacaaatttttctgcgcttgggatcgcagatcaatgtttaccgcgtggcgtaaaccaatccgatcgcctataataagctgatcaccttgttttataataccggaaacttggtatattccctgatctttcagattactgacttgaactgttttaagagtaattgcctggtctgtattaatggaaacagattccgaatccaagggatcagataccgaacagctaaagctgattaactggaaacccaataatatggtctgtatcgtttttttcattatttttcaggaacttcaaaatggataccgtaagttggtaaattatttttccaacaaatgccgcctgctgtcttacattcaaaattgatggactctgagcttgccaaagcttcaatattttttgttgaaattgaagcttcatttatatttatggattgtgttatagttaaacctaaaatacacatgcaaagaatgaatattgtaattattttttgtttcatatgtaggtttatgtgttaaattcaagtccaaagttatgagctaaattaatatatgtttagttttgtagctgaagaattgtataagatttgtataatggtagtcagaaggaggacagaattaaatgtaagtcgatggataactttggtggctattacgttgattattttaatgat

SEQ ID NO: 5985 - DNA, 2400 bp, Unknown
  gut microbiota DNA sequence
tatgacttgaatcgtatatgtaaaagcatagtctatcgacacaactaaggataaaaacaacaaccagtaatgaaaaaaataattatcaggacccctaatttcataggggacacgataaatacgactccttgtttagagttgataaaacaggagtatccggaagcggaatttactattgtcggaccggattttgtcagggaattatttaaatacgatccccggattactcattatattactttcccgctcaaacggaagaaaaaattatctacctattggaaaattgtcagggaattaagaaaagaaaacggtgaattaggtgtcatttttgtaaatacctttatttctgctttgcttttcagattaggaaatgtaaaaaagaatatcggttacaatagagaaggcagaggttttctgctggatttcagtcttgagatcaattatcacaaacattacatcaaccgatatgcttttttattcaatgagtatatcgggaacaaatacgtgtatttacccgaattatcgctccggcacaccggtcagaagactttccaattcgataattcgcataagaccatcgctttatatttgggaggcgagaacaaagaattccggaaatatccggatgaatatgcggttcagctcctcaggctgttgaatcggcaaggctacaacctcttgcttatcggggacgaaaacgacaacatcaaacacacccaatatgccgaggaagcccgtatcgatcatctgatcaatctgacagcacgcacaactatcgaaggttttatcaatacgatagccaatgtcgatttgatcattaccatcgattcgagtgctctccatatagcggctgccgtaaaaactccttttatcgccctgatgggcctttctaccagcccgacatcgacaatccttcctaaagttccgctaggacggatattgaaaatagaaaataatctgatccgggaagaagattatatccgtaatatcaccccggacctgatactgaaaaccatttccgaattgatttaatcgctttcgtgttctaaagcatagaattgatcccggaagacataaaacatcattaaaaagaacatgacaaccggaagtgcgtcatttacgatcagcaatacttcaaaattactgtcaataaaaaaagcgaccaggagcgataaggcaagaaaagaatattttttgctacagatcatgctttttacaggatacacaaaccaactcagtatgaaagccagtccgaccacacccatcaacatccagtattgcagataagaattgtggctatgagtcagcgaagcgacaacccggtttcccgatgcctgataccattgtttcgacaccacattcgtatacacccctaatccccaaattccccacgaatcgatatttttcaaacaagactgatagaaaacgatccggggtactaaagtagatcccccatctaattttccattattcacatcttcaatctcctgtttcaactgtatccacctttgatcgaaactcgccggacgaaaaatatatccgcttattccaacaagcagaattaccccgataaacatccaacgctgccatacggaaagttttctaaagaaataaagattgaaaataacgaaaccacatagaaaagagagtatcgaactttttgtgactgtcaggctaagcaaccatacgaacagagcaaaagcagtgaaagcgataactttctcgcccattttcgtacggataattccgaagaaataagcgattaaagcagccgcataactctgtaaagcctgtgcatccagatagacttcaccatttaaaaagtgcttggtacccccaaaacgactggcatacaaattttgcacgacagtctgtggagcagtaaaccaattctcccctccaagatgaaaaagcatgaccaaattgaaagtcaggacactgatacaaaaacaaagtaaaaattgcttcaataaccgcaaactgacaaaacttttcaacgaaataacatacagcactcccaataaaaataccagaaattctttttcaaaaattccgaatcccggtttcagcccggcatattttccggaagtcacaataatcaaggtatgaacagctgaatataaaatataaatgaccgggattgctacataatacttgtatttttttatattcattacaaaatcatctttatatttgacgatgttataaattaatcctaaagcgatcaaacccgtttgcatagcatggaacaaggccccccaagtcccgataaaaaaagcaataagcaaaaaaagcttgctttccagattcttcatatgaattattttattcagaccttaatttgatgaatggtgcaaaagtacaatataattttgatttggcacttatatctgtttacat

SEQ ID NO: 5986 - DNA, 15814 bp, Unknown
  gut microbiota DNA sequence
ctgaccggcggaactcctcactgcgcaaaaaactttacgttacgtttccgtcagacaccaccggtcggacgttcggaaaacctaaccggaccctcgttcccgctccaatggtcttccgccataaccccctgcatctcacggcagagctaaccgacaaagaaaatacaaccagaaatttgcagcagcaggaagccggaccgtccggattatttccagtgagaataagctttcttaaatcaagaccggtcttcaattcagtgataacgttagtcggaggtgatcgggattggcgaccattggagctctggcgagtgtcgtcttactttttctgaacgcccgaccggtggtgtctgacgaacgtagtgaggagttccgccggtcagtgatagaaaaagccagacgaccgacagaagcgaccgggtcaccaattccgatcaccgaagacgaataagtaacgaactacctttataagtgtaaatatgtatataactgccaaaatgcaaacgaaactctttttattacaacatcaacaactattatctactgatacacaaacgtttccatttgtataaaattatacattttgaactttctatgtaaaaaacagaaaaaacatttggaattaaaaaaaattcgtcgctatctttgttgcataaaaatgataaaaacatgaagcgtttatccctacatctcctgaatattattattctcgtggtccttagccacggaacggagaggggtatataaacgaaaatcgaaccgaaatataaattgatcatatgcctttctcccaaacgagaaaggcttttttttaacagacagaaaaatgaacaaaacaatgtatcgccatattatcgtcattaacattctactcgtggtcctgcaaagataacgagagaagggtgacgcgtatatacacactatttgtagaagcctttctctcgccgggagaaaggcttcttcgcatttaagaacttactgcacaaaataaaagaaaatgagaaataaccttagaagcgctgttacaatgacaggccgtcggatggccggagccagaagtttgtggagagccaatggtatgaaagacgaacaattcgggatgcccgtcatcggcatcgtcaactcgttcacccagtttgtaccgggtcatacccacctgcacgaaatcggacaatacgtaaagacattaatagaagaacgcggatgcttcgcagccgaattcaacaccatagccatcgacgacggaatcgccatgggccacgacgggatgttgtactcgcttccttcgcgggaaatcatcgccgacagtgtggaatacatggccaacgcccatcaggtagacgctttgttttgtatcagtaattgtgacaaaatcactccgggcatgctgatggctgctatgcgtctgaatattccgacgatttttgtatccggaggcccgatggaagccggtgatttcgacggcaagggaatagatctgatcgacgccatggtcatgagtgcagacagccgttgcagcgatgcagatatcgagaaaatcgaacgttgggcctgccccggatgcggttcgtgttcgggcatgtttacagccaactccatgaactgtctcaacgaagcgttgggattggcgcttcccggcaacggtaccattgtagccacccacactaaccggcggcgtttgtttgaaaaagctgcttcattaatcgtacaaatggccggacggtattatttcgaaggggacgattcggtattaccccgtaacatagcgaccaaagccgctttcgggaatgccatgtcactggacatcgccatgggaggatcgaccaataccgtactccacctgctggccatcgcccacgaagccggagtagacttcaccatgcaggatatcgaccgcctgtcgagaaaagtaccggtactatgcaaggtcgctcccaactctcactttcacatccaggatgtaaaccgggcaggaggtatcctgtctatcctcggggaattggcggaagccggtttgatcgataccacggtcaaccgtgtcggatacaaaaatctggcagaatgcctctcgaaatacaacctgaaaagcccgaagctcactcaaaaggcgcaaaaattctatctcagtgcacccggcggcaaattcagccgggaactgggttctcaaagtaaaacctatgcccgcttcgataccgaccgtcggatgggatgtatccgggatgtagaccatgcttatttcaaagacgggggactggctgtcctgaccgggaacatcgcccgcaacggatgtatcgtaaaaacagccggagtagatgaatcactgttcgtattccggggacgtgccaaagtattcgaatcgcaggaacaagccatgaacggtattctgaacgatgaagtaaaagccggagatgtcgtcgtcatccgttatgaagggcctaaaggcggaccgggcatgcaagaaatgctttaccccacttcttatctgaaatccaaacatctggacaaagcctgtgccctgatcaccgacggacgattttcaggagggacttcgggtttatccatcggtcacatctcacctgaagcagctgccggaggagctttagccatcgtccgggacggcgatctgatcgaaatagacattccggcacggaccatcaacctgttactgagtgatcccgatattgccgcccggttagccgctcaaaaaaacttcgaaccggccggacgcgaacgtacggtacccaaatccctgcaggcttacgcccggttcgtcagttcagccgaccagggtgccgtccgcattctataacccataagtttttactttttatctcttttttcgtatgaacactactacacaatctatctatatggaaaagcaagtaacaaagacaacttgtttttcgggctcgaaagcggtaatcgaaacccttctacgtgaaggagtggataccgtcttcgggtatcccggaggaacaatcatgccggtatacgatgcgttatacgactatcgggaccgtctcaaccacatcctcgtacgtcatgaacagggggcattacatgccgcccagggctatgcccgggtaagcggacgtcccggtgtctgtatcgtcacttcgggtcccggagctaccaatacggtaacaggccttgccgacgcgatgatggattcgactcctgtcgttctgatcagcggacaggtaggttccggtttcctgggcaccgatgcttttcaggaaaccaacttcgtagggatcacccaggctgtaaccaaatggaactgccaggtacggcatgccgccgatatccctgcagccatcgccaaggcattctatatcgcccgcacgggacgtcccggacccgtcgtggtagatattaccaaagatgcccagcaagaaatggccgaatatcattatgaaaaggtcagcttcatccggagttattgcccgtctccggccatcgataaagaaaaaattgcagaagcggccaaattgatcaatctgtcccgtaaaccgttggctttaatcggccagggcgtcatcctcggcggggcagaaaaagaactacgtgttttcctggaaaaaagcggtatccctgcagcttccactttattgggactgtcggccattccttccgatcatccccaattcgtcggtatgttgggtatgcatgggaattatgcccccaatataaaaaacaaagaatgcgatttactgatcgcgataggcatgcgtttcgacgaccgggtaaccggaaatcccgaacaattcggcatcaacgccaagatcatccacctggagatcgatcctgccgaagtgaataaaatcatatatgccgacgtacctgtcctgggaaatgtcaaagagactttacccgccctgacagaattagtggtccccaaccggcataccgactggatagcggaattcaaagcctgttacaacatcgaatatcaggaaatcatagaaccggcgctctaccccacgagcaagcaaatccgtatgggagaagtagtcgacctggtatcgaaagcctatcaccacgacgcgattctggtcaccgatgtcgggcaacagcagatggtagcttcccgttatttccgcttcaaacatacgcggagtatcgtcacttcgggtggattaggcaccatgggattcggccttccggcagctatcggagcaaaaatcggagccccccaaagagaggtttgcctgtttgtcggtgacggtggttttcaaatgaacctgcaggaactcggtaccatctttcaatcccgggtaccggtgaagattatcctgctgaacaatagctttctgggtatggtgcgccaatggcaggagctctttttcgacaagcggtactcatttaccgaaatgactaaccctgacttcggggcaatcgcccaaggaaacggtatcgcctaccggtgcgtggaaaaacgggacgaactggaaacagccatccatgccatgaaggaacatcccggagcctttctgctggaggttcgggttgaaccggaagagaatgtgtttccgatggttcctgccggtgcagctgtgggggatgtgagattggaataaaggaaaaagttgaaagctaaaggctataggctggaggccaggaggtagaggagggggaggagggggagaaagggaaaaaagggagagaaaaagagattatcgataataataaaatagaaaaatgatgcgatgaataaagaatatatcataacggtcttttcagaaaacaaagtaggattgctaagccagatcacgacggtattcacttgccgggatatcaatatcgaaagcctgacgacttcggaatcgtctatcccgggcattcacaaatttaccatagtcgtcatcaccggtcccgaaaagatagagaaactggtcaagcagatcgaaaagaaaatcgatgtactgaaagcctttgttttcaccccggatgaagtggtacaacaggaaatcgcactttacaaagtcacccggagcaacagtgtcgaaaaattggtacgcgaccaccatgtacggatactggaaatctgtgacgattatatcgtactggaaaagaccggacacaaagaggatacccagtctctgttcgaattactacaaccccatggagtacagcaattcgtccggtcgggccaaatcgcgatcatcaaatcaaaacgcgaactattgaatgaatatttacagaaacgggaaaatacgacgaaagcgtaaacaacccggatcaaggacaaaataacactaacaattaaatcattattattatggcacaaattaatttcggaggagtaaaagaaaacgtagtaaccagagaagaatttccattggcaaaagcgctcgaggtattgaaaaacgaaaccattgctgttataggatacggtgtacaaggtcccggtcaggccctgaacctgaaagacaacggtttcaacgtaatcgtaggtcagcgccggggaagtaaaacctgggataaagccgtagccgacggctggatacccggcgaaaccctgttcgacatcgaagaagccgcccggagaggaacgatcatacaatatttactatcggatgcaggtcagatcgccgtatggccgactattcaaaaacacctgactcccggcaaagccctctatttctcacatggtttcggcatcacctataaagatcgcacaggcatcatcccgccggccgatgtcgatgtcatcctgatcgctccgaaaggctcgggtacttcattgcggagaatgttcttacagggacggggattaaattccagttatgccatcttccaggatgccaccggcaaagcttgggaccgggttatcgctttaggaatcggagtaggctcgggttatctgttcgagaccacctttcagcgggaagtatattccgacctgacaggagaacggggtactctgatgggagcgatccagggcatttttgcagcccagtacgacactttacgcgaacacggccacaccccttcggaagccttcaacgaaaccgtcgaggaactgacccaaagtctgatgcctttaattgcagaaaacggtatggactggatgtatgccaactgctcgacgacagcacaacggggagcactcgattggtggaagaaattccgggatgccgccaaaccggtattcgacgaattgtacggccaggtatcttgtggcaacgaagcccaacgttcgatcgattccaacagccggcccgactatcgtgaaaaactggaaaaagaacttcagaccatgcgcgaatccgagatgtggcaagccggtgccgtcgttcggaaactgagaccggaaaacaattaaagcgaaaaggctagaagcaaaaagctagaagcgaaaagtaaaaagtgaaaggagatcggcgaaaaagcaaaagatgaaaagcgccccaataaccttcactaatccctttccttttttacctactcccgcttccaccttataacttatagcttttagcctaatagccttttcgcctctaaccttttacctcatcacctcatgcgtgaaaaagtatatatattcgataccacccttcgggatgcagagcaagttccggggtgtcagctgaatacaatcgaaaagatagaagttgccaggcagctcgagaaactgggtgtagacatcatcgaagccggtttccccatctcgagtcccggggatttcaattccgttgtagagatttctaaagcagtaaccgttccaaccatctgtgctctgacccgggctgtaaaaaaagacatcgaagtggctgccgaagcattgaaatttgccaaacggggacgtatccataccggaatcggtacctcctggtatcatatccacgaaaaattgaattccactcccgacgaaatcgtcgggagagcggtagaggccgtaaaatatgcccgtcgatttgtcgatgatgtcgaattttacgccgaagatgcaggccgtacagaagaagaatacctggcccgggtagtagaagcagtgatcaaagccggtgccaccgtcgtcaatatccccgacaccacggggtattgtctgccgaacgagtacggagcaaagatcgcctatttgatgaatcatgtccccaacatcgacaaagccattatttccactcattgccacaacgatctgggcatggccactgccaacactttagccgccgtacaaaacggagcacggcaggtcgaagtgacgatcaacggcctcggcgaacgggccggtaacaccgccctcgaagaaatcgtgatggcgattgcctgtcacaaaaatctggatttcaatatcggtatcaacaccaggcaaatcatcgctaccagccagctggtatccagtttgatgcgggtgccggtacaacccaacaaagccatcgtcggccgtaatgctttcgcccattcgtcgggcatccaccaggacggtgtactgaaaagccgggagacctatgaaatcatcgccccggaagacgtaggggtcgatcagtccagtatcgtcctcaccgcccgtagtggccgtgcagcactgaaacatcatttgaaagccatcggttatactcccgacaacgacgaactcgacaccatcgccggaggttcatgtgtgctctatatcgaccggcaatacattcacgaagtaacgagtccacaagctttcgaagggcttcattcgcgcggcgcgaaagtattccgtccggctcaggtcacagccagccccgatcacaatatacccacacaaaatcaacatctgccggtacaggatctgcaatccgcccggcaactgtcgatgctcgaaaataactgtaccgaacacggtatcacgattttcaaagtcggtacccccaaaaacggaattatccatgtggtgggtcccgaaacaggtctgacccaaccgggaatgaccatcgtctgtggagacagccatacttccacccacggagctatgggctgcgtggcgttcggcatcggaaccagcgaggtagaaatggtattagcctcccaatgtgtattgcaatccaaacccaagaccatgcggatcaatgtcgaaggacaattgaatcccggagtttgttcgaaagatatcattttatatctcatttcgaaactaggtaccggcggcggcaccggacatttcatcgaatttgccggatcggctatccgctcgctatcgatggaagcccggatgacgatctgtaatatgagcatcgaaatgggagcccgcggcgggatgatcgctccggacgaaacgacctttgcctacctgaaaggcagggaatatgcgccccaaggaaccgaatgggacaaatccgtcgcacaatggaagcagctatacagtgatcccgacgccgtcttcgacaaagaagtcacattcgatgctgccgacatctaccctatgatcacctacgggaccaaccccggcatgggaatcgccctcacccactctatccccgaagtctccgaaatcgaagagacttcccggccttccttcttaaaagctctggaatacatggacttcaaaccgggcgaaaagctaccgggcaaaccggtcgactatgtttttgtcggcagttgtaccaatggacggatcgaagatctgcgggtattcgccgactatgtgaaaggcaagcaaaaagcagcaggcgtgacagcctggatcgttccgggcagcaaacaggtagaaaaacaagccatcgacgaagggatcagggatacactcgaggctgcaggcttcgaattacggcaaccgggatgctccgcctgcctggcaatgaacgacgacaaaattccggcagggaaatattgtgtctccacctccaatcgtaattttgaaggccggcaaggaccgggagcccgcactctactggcaggcccactcgtcgctgctgcctgtgctatccacggcataatcaccgtccccgactcactccaactcagcaacccagtaactcagcaactcagcaactcaacaactcaacaactcagtaactcagcaactcagtaactcagcaactcagtaactcagcaactcagtaactcaacaactcagtaactcaacaactcagtaactcaacaactcaacaactcagtaactcttttcaactcatgataaaccaattcacaaccctaacatccacagcgataccactgaaaatcgaaaatgtagacaccgaccagatcattccggcccgttttttgaaagcgaccacccgggaagggttcggcaaacaattgtttttcgactggcggtatgatgctcagggaaacccgaaaacagatttcgtcctgaactcccccgactataccggagaaattttaattgcagggaaaaatttcggctgtggttccagccgtgaacatgcggcctgggccatttatggagcaggtttcaaagtagtcatttccagttttttcgccgatattttccgcaacaatgccctgaacaacggattacttcctgtacaggtgagcgaatcgtttctggcaaagctattccaggtcgtccggtcagctccttcgaccaccgtcagtatcgatctggaacggcagaccgtcaccttgacagccacaggagagcaagaacttttcgaaatttctccctacaaaaaagagtgtttgttgaagggatacgatgatgtcgactatctgatgagcatacaccataagatcgaagcatttgaaaagacccgttaaaacgatcggcgagccttcggttctgacaaagccagtgcaagagtcgccttatgaaccttacaaactcatttcatcatggatttaaaaatagcagtattacccggtgacggcatcggaccggaaatcatagaacaggccatcaaagccatcgatgccacttgcaaaaaatacggtcataccgtcggctatacctacggatcagtaggggcaacagccatcgacaagaccgggaatccttatccggaagaaactcaccggatttgtatgcaatcggatgccgtattgttcggagcgatcggggatccccgtttcgacaacaatccccaagccaaagtccgtccggaacaaggattgctggaaatgcgcaaaaaattaggattatatgccaacctccgtccggtcagtactttcaaatcccttgttcaccgctctcctctgcgacaagaactcgtagaaggggccgatttcatctgtatccgggaactcaccggcggcatttatttcgggcagccccagggacgttcggaagacgggcaaaccgctttcgacagttgtgtatacaccaaagccgaaatcaaacggatttgccgattaggtttcgagtacgccatgaagcgccgcaacaaactgacagttgtcgataaagccaatgtcctggcaacctcccggctatggcgcgaaaccgtacaagagatggctccggcttatcctcaggtaaatgtcgaatacatgtttgtcgacaatgcggcgatgaaactcatccagcaacccaaacatttcgatgtcatcgttacagaaaacatgttcggcgatatcctcaccgacgaagccagtgtcatcacaggctcattaggcttgctgccttccgcttctatcggtatccacacctcgctgttcgaaccgatccacggttcctatcctcaggccgccggcaaaaatgtggccaatcctctggcaaccattttatccgccgctatgatgttcgaatatgccttcaacctgaaagcagccggagcaagcatccgccaggcagtcgatcgttcggtcgaagccggtatcgttaccgaagatatcgctgaagacggacaggcctatccgaccagcgaagtaggcgattttatagcaaagaacatcgggtaaatgaaaaaacagaccaattaaaccgaacaatatgagtgatccttattttccttctttgaaagatatcatgacggcggagcatacgctcaacgacatcctggtcccgacacccctcatgaaaaacagaaatctatccgataaatacgaagccaatatctttctgaaacgggaagatcttcaaatggtgagatcgtataaaatccggggagcttataataaaatcaaatccctgactcctgaagagatggagaaaggagtggtttgtgccagtgccggcaatcatgcccaaggcgtagccttctcctgcagcaaactcggtatccagggaaaaatctatatgcccgttactactcccaggcaaaagatcaaccaggtaaaaatgttcgggggtaaatccattgaagtcgtcctgacgggagatactttcgatcaggccaatacagcagcaatcgaagcctgtaaaaaaaacgatatggtatttatccctcccttcaacgatccccggatcatcgaggggcaggcaaccgtcggtttagaaatcattcaggaagcccggatgaagctcgattatatctttgtaccgatcggtggtggcggactggcttccggtatcggtagtttctataagcaaatgagcccgaagaccaagatcatcggagtcgaaccggccggtgccgccggaatgaaaaaatcgttcgaatgcggagaggtaaccgaactgaacgaagtagataaatttgtcgacggggcagccgtacaacgggtaggagagctcacttacgctatctgcaagaaagtattggacgatatcgtcgtcgtgcccgaaggcaaaatttgtacgacgatcctgaatctttacaacttcgacgctatcgtagtagagccggcaggagccctgagtatgagtgctctcgacttttacaaaaatgaaattaaaggaaaaaacgtcgtttgtgtggtcagcggcagcaacaacgacatcacccgcatggaagacatcaaggagcgctctttattatatgaaggcctgaaacattacttcgtcgtccgttttccgcaaagagccggtgcactccagagttttgtcagcaacgtcctgggcccccacgacgacatcacctatttcgaatacaagaagaagacaaaccgcgaaaaaggccctgccctcatcggcatcgagatccagcagcccgaagatttccagggcctgctggaccgcatgaaatccgaaggtatcctctacgaatatctcaatgacaatccgaacctattcgaattcctgatcggataatccgtcgccgggtaaggtgtcccaaaagtctttttgaaaccgatctgatcggcgaattctttcccaatcctatttcagaaaaaccggtttcatttccttgcttccaaaagaagtaaaagaactgaaggaatacatcgaagaataccacagcatccgggaaggagacggccggaactggaaaatcaaaaaaaagaaaatcgagacagcaataaaatgtaaacaaatatacgatttttttaataagtcgatacatttctttgggaattaagaaatattttcttattattgaagtctaaaaacaaacttatgaaactgatttctaccctcatttttctattgtgtgtaacttttgcatttgcagaatgctacgacaaccatttcgacgagtgccggatcgaacggcaaaacgggaaatacggtatcgtgatcgacaaacagctggccataccgtacgagtacgacgaaatcgtacctcaacacaattgctttttcaaagtcagaaagggccggaaatacggtatcatcagttatttttatgaagagcacaaacgggatggccggtttccgaaagagattgaccggccgattgccctgaaaaaagggtatgcctggctttacctttccctcgcttgtgaatacgataagatcgaagaatatgaaaatcagtatcttcaaatcagccgcgacgaccggaaaggaattgtcaattattacgggaccctggtcttgccctgccgttttgaaaaaatagaattatcgaataattttttttgggtatcgtcggaagggttatacggaatttacaaccggtacggttcgacaattatcccctgccgctataaccagatcgaactcaccgaccgttgtttttacgtctgccgggaccggctcaaaggggtttacaaccgctatggaagtgttattatcccttgccaattcagccagatcgaatgcaaagacaatgcctattacgtgacaaaaggcaaatatcagggcatatacaacctgtacggttcggtaatcattcctacccaatacacttcgatatacaaagaaggggggaaatacctggttgaaaacgacagtctgaaagggatcgtcaatacctatggaagtaccgttatcccctgcaaatacaacacgatagaatacgaagacggagtttattatgtgtcggcaggcggtaaatacggaatttacaacacttacggctcgacgatacttccctgccgatacaattctgtccggaaagaaggaagagaatatctggtggagaataacggtcttcagggtatcgtcaacacctatggaagtacgattattccttgccgctacaacaaaatacaacaggaagggaatatttattacgtcacggcaaacggtaaaaagggcatattcaaccggtacggctcgacgatacttccctgccagtatgacgagatcatttctttaggccatcgttatatcgtcaaacgggacaagaagttcggggtatacaaccaatatggctctaccatactgccttgtcagtttcagaaaatcgaatgcctgaataacgggcattatgtcaccacccgtgacaaaagccaacaggtgtataatgcctatggggcgctattggaaaaccgtacgaatatgaaggtagtcttctcgaccgaagactgattttttaccggttagatttgatttttgcgtgttaagtcggtattgtattgacttatttattatttttgttttcgttttaaactaaatggatatagaaaatgaaaaatcgactggtcctatataatactttatcgcgcaagaaagaacagttcgaaccgatcaatcctccttttgtcgggttgtacgtttgcgggcccaccgtctacggggatgcccatttgggacatgcccgtccggccattactttcgacctgttgttccggtatctgaaatatctgggctacaaagtgcgttatgtgcgtaacatcaccgatgtcggccatcttaccgacgacagtgacgacggcgaagacaaaatcgagaagaaagcgaagctcgaccggttggaaccgatggaaatcgttcagttttataccaaccgctaccatcacaatatggagcaattgaacacccttccgcccagtatagagcctcatgcttcgggccatatcatcgagcaggaagaattggtgaaaaaaatcctggacaacggattcgcttacgagagcgacggaagtatttatttcgatgtcgaggcttacaacaaaaaatacagctatgggaaactatccggccgccgggtggaagagttatttgccaacacccgtcagttagacggccagggagaaaaacggaatccggccgatttcgccctatggaaaaaagctactccggaacatatcatgcgctggccttctccgtggagtaacggttttccgggttggcacctggaatgttcgtgcatgagccagaagtatctgggcgaccgtttcgatatccatggcggcgggctggacctgcagtttccccaccacgaatgtgagattgcccaaagtacggctgcctacggacacgaagccgtgaaatattggatgcacaacaatatggtcactatcaagggacagaaaatgggcaaatcgctggggaatttcatcaccctggaccaactcttttcgggagaaaacgatgtgctcgagcaagcctattccccgatgaccgtccgtttctttatcctgcaggcccactaccggagtccgctggatttctcgaacgaggccctgaaagccgcccaaaagggatatgaacgcctgatggcagcggtccgggcactggacaaagtgaaagcttcggccggtaatacggtagatgtggatgaactgatcacccaatgtgaagaagcgatcgatgacgacctcaacacaccggtcctgatctcccacttgttcgacggagtacggatgatcaattcactggtggcaggaaacgagaagatagacgccggtaatctggctaaattgaaaaaactgtatcaggattatgtattcgatatcctgggactgaaggccgaaagcgaatcggtaagccaggatcacgaagtgctggggaaaatattggatatggtgatgtctatccgtacagaagccaagcaaaagaaagactgggccacttccgacaagatcagggacgaactgaaagcagccggagtcgccattaaggataccaaagagggatatgaatgggaactggtagaaaattgaacagatacgaacagcggatgacctgttttttttacatattatgtgcctttttcatctgttcctgcggagggaataaaacggcgaacaaagaaaaaaaaactcctttggctgcagaacttccgaaagacgaggtgaggtatgtgaaaagtattcaacttacatcgcccgggaaagataagatgtatgctttcaacgaggagatcgttatcggttttgaaagcaaggaccgtttccctgtcgattctgccgccttctatatcgacggccagcaaatcgcaacggccggtaaagaggaccggagttttacttaccggataccggaaggtaaaaccggcaatatgaccatcaaagtgatggcgtggcatccggacaacaaacggggaatcgcgacaacgacgatccgggtgaaacccgatcaggctccggccatttacagttatgaagtagt

SEQ ID NO: 5987 - DNA, 5262 bp, Unknown
  gut microbiota DNA sequence
gcctatacacaaggtttgatctatcaggacggttttatatacgagggaacggggcaatatggcgaatcgtctattcgtaaaacagacatgcaaaccggtaaaactctatcggtcttaaatatcgacagtcagttattcggagaagggatcacgatatatgaagataaaatttaccagatcacctggcgttcacgcaaaggtttcatttacgatctgaaaacttttaccctggaatcgaccttcaattataattccgaaggttgggggattactacggcgggagaccacctgatcatgagcgacggcagcaacaagctttatcatatcgctccgtcgacgttcaatatactgaaagaagtagaagtatacgaccataacgggccggtagaccaactgaacgaactggaatacgtagacggtatgatctgggcgaatgtgtggctgaccgaccggattgtcgtcatcgatccggaaaccggcattgtccggggcgagctgaacctgcccggcctcttgcctgccaccgataaagcccggctagacgacaaagacgatgtgctgaacggtatcgcatggaatgccgggaaaggaactttttatgtcaccgggaaacggtggccgaaactatttgaaatcaaggtaaaacttattccatatggacgttaaaattgaagaatcctggaaagcactgcttcaggaagaatttgacaaaccgtattttgccgaactgatcgcttttgtaaaaaacgaatacgcccaaacccggattttccctcccggcaaactgatattcaatgcattcaaccattgcacggtagacaatacgaaagtcgttatcctcggccaggatccttaccacggtcccggacaggcgcacggcctttgtttttccgtgcccgaaggtatcgagcaaccgccttccctgcaaaatatatttaaagaaatacacgatgacctgggtactcctgttccccgttcgggcaacctggaacgctggtcggaccagggggtactactgctcaatgcaacgcttaccgtacgggcccaccaggccggttcgcaccagaacaaaggctgggaaactttcaccgatgccgttatccgcaagatcgcagaaaagaaagaacacctggtattcctgttgtggggatcctatgcccaacgcaaaggcgcatttatcgataccgaccggcacctggtacttaaatgcgtacacccctccccgctttccgctaaccggggcggatggttcggcaatcaccagttcagccgcacaaatcaatatctacgggaacatgggttgaaggaaatcgaatggtagagagatcactttctccattcattttctggtattcacgaccgaatcgatcgcttcaacctttttcgtcaccgtcggcacgtttgccgttatgagcctctacggctgtctgaccaaagcagcactgacccaattaggcaatctggcctttatgatcctgattttcttgtgataaaaaggataccttttcctgaaagagtaaaactttaattctctgttttttaatctttggtatattatagaatattgaatatttgtttgacttcaatcggtgtaatatatttgaaatgtaatattctgtaatagaattttaataaaatacatcaaggtgctgattttttcaggtgtgtcaaaatgccatgcctttttatgttttgttttatatgcaaaataaattgaaattttgtaaggggatttgcgttgagtatttcccggtaggcttcctgctgtttttatgcccggtcctttggcctgtcgacgtctatttaataggatcgactgcaaggttcggcggttttatagttattgctttatgggtggggatgaagattctcagaaaacggcaattcagattaaatgaattggatttgatattcggcttattcgtcctctattacggaagtcgtattttgataaccgaccgggtatttaatccgaatgttcccctttataccgttatgctgctcctgttatatgtttatgcaaggaatataaagtcgggcaatacattttttatcctgttgtttttcgcaggtgggctgcaaggaatatggtatattttacaaatcacggatttcctgccctcctaccattatttactgaagggtacgggatgttttttcaatccctctatactcgcattgtttttagtactttcctttctggcagggatctgttcttttaagaaagagttcggcatcgggtggaaggtgtgctggttgctgaattttttacttttgctttatggtatactgtccataaattcccgggcatcctggattgctttggttatgggtatactgtggaaagcagcccggcaaaaataccggtatccgaactacttgtcgtttatactactgtcggtcattctattaattggaatctatgccggataccggatgcggccggattccgtgcaaggcagatttttaatctggcaggttatcggaagtaaactgccggaagcattgtggtggggccagggtagtctcgaggctttatatatgcctttacaggccggatggtttagggaacattccgtttctgcttatgcaaacgttgccggaaataatgtatatgcttttaacgaatttctccggatactttttgaaacgggaattgcaggttttgttctctttgttctcctgatttttaccggatgccgtcactctttccgtggtaatcaaaaatcccgggatgcgggttccgtatttctggcaatcctgagtttcggttttttcagctaccctttttcgatcggtttgattataactatcgctgttgctgctttggctgtaattgccggaaatgtatcgtctccggtccttgtaaaaaaggggagatggaaaaccgggtacagatttgttgccggcctgttccttctttccttaccggtctttatctgttttgaatacaggcaggaaaagagggcggacaggcttctgtcagaagcacaatcggatgtatcggttctgaccggaacagggatgatgaactcttaccggtatctgcagggaaatgctgattttgtactttgttacggaaagacattattcaatcaccggcaatatgcggaagccctgccggtgctggaaaatgcctgtgctttaaaaccatcctcccggctggtgtgcgatttggggatgtgctatcagcaggctggcaggaatgcagaagctgaaaaggcttatctctccgcttcttttatgactccggcctatatagttccgcattatcatttgttcaatctctaccgggctgacggctctcccggccaggcagccatacaggccgaatatatgttgtctatgcaagtgaaagtagtcaatacctcggttttgcggattagaaatcaggcaagaattttcttacagaattatcgacccaaagagtaagacatatatgagcaaatattattttttctttgtgtgctggagttgtttttttatcagctgcacgtccgactcaccattggaacaggcgttgagtaaaagcgggaaaaacaggatgcagctggagcaggtattaaaacattattctttgcatcctgccgattcgttgaaataccgggctgcctgctatctgatcgctaacatgccgggtcatggctggtatgagggagaggccctcgatgtttataaacaatggatcgattcggtttactgtggacaaagcttcatttttaaagcgactttgtacgaagcattctttcaacaacccggtgcaacggaagggttggtgcggtatgaagatatcgaacaattggatagtaattttctgattacttatatcgactcgacttttagtgccatccgaaaaagaccctggttaaaaaacttgctgttcggtcaattgtgtgagtatgtattgccctaccgggttggacacgaacgtccccagcaacttttcaggttgcaggattcgatattcaacaccgatattgccgatttactgaactatgacgatatcggcaacgaagtggcaacaggcatcgggttgtctcagatttttaatggccggattccccgggaggcaaaagtattgtaccggggaaatcttatcaactataatctgacgggatgtgtgggccaggctatgctcagaagctggttggccagacttacgctgtgtccggttgctctggacctgaatccggctttcccgacccggaacgacagacattgctggtcggtgatgatagataacagacagatgaacagtatacaacggctggcatttgaggttaataaacaggggaagatttatcgccagacttttacccgtaatcctgctccggacaccggtaaaagcgaatacattcctccttttttccgaagtcctttttaccgggacgtgacttcctgctatacccgggtgaaagatgtcccggtgacacccctcaaaccggtatccgttacctatgggtatttgggtgtattcaatgacttgaaatgggaacctgtcgcttatgccggacttcgggaaggacggttcctttttaaagatgtcgggtgtggtattgtatatttgccgttgatttatccggacggggatgccgttgccgtttcttatccttttctattggatttgaccggaaaagtacagctgttacgacccgataccactcacctgctcacgttaaaactgaaacggaagtatccttcaaggctcatgctaaggtcggccaaccgaccgtttttgaattcggtggtggaagcttccaatgatccctctttccgacggaaagacagtatcggcgtgtttaaatatatctccgaattacaatgggctgaaataaaaaccggttcttcccaatcctaccgatactggagaatatgttcccgaaggccgttttatgtaggtgaatgtgtattatataacgcgaaaggggaaagtataaaacccctgcaaaatgttccgggattcaccgcttcttcccctgctttcgatgataatccgatttcttatgccttttcagatcggaattacattttacaatgggatatgggcaaaaaagtttccttgtcgggtatagagtgtttattacgtaacgatggcaatagtgtatatcctggccattggtatgaattgaattatcatgacggctcgggatggtgttcgctgggagtaaaggaggccactgaaaggtgggtggaattcagtgaaatacctgccaatgccctgctatggttaagggatttgactaccggaaaggaagaacggat

SEQ ID NO: 5988 - DNA, 583 bp, Unknown
  gut microbiota DNA sequence
tattgcttgggggctttattactcgatttaaatgacccgtcgaaagtcattgcaagaagcgaagaacctatcatggaacctatcgccgcttatgagcaaacaggtttcttcggaaatgtagttttcactaatgggcatttggtggacggcgatacgataaccatgtattatggagcaagcgatgaagtgatttgtaaggcagagctttccatttcagagatattaaacgtattaaaacagacacaagagaagtaatgaataaactgaaaaaagaatatctgttctttaagcaacaggaacctaacatgagaacactgttggttaccaatatgctttatgcattggtactaccgatagtagaaatctttgtgggagcctatatcatgaggaacacgagcgatccagtgatggttgctttttatcagctggcaatgtatataggcatcattactacctctcttgttaacggttatctgctaaagaaatacagtgtgaagacgctttattcgataggaatcctggtaagtggcatttccatgttcggtatgatgactatcaagtcacttggcttcgtcgaacttgg

SEQ ID NO: 5989 - DNA, 14341 bp, Unknown
  gut microbiota DNA sequence
tttttttgtataaactaaaaaatcatcccaagctttcttcatattaatttggtgtatttctttttcaccagaataataattatcgaaataatatttggctttctcataatattcttgattccgggcatcttcatgcaaccactcctcaacttgctcatcatcgacaccggtagacttacctaaaagactttgcataattaccctccaatttataaacttcttgtccatggtttttgtggttattttttttataaagacacaaaagcaaaaaaaacggagtacataaggaaagaaaattttcaatattgtcctaaacgtttttgagaaaaataaaaaaggaagtagtttactaaggaaaaatgactaccttagtagtgagcgacaactcaactacttcctatgacacaaataacactttttgcgcaggtaattgcgcttttacccaaagaaatcatcagaaaaattattcgcgatgccggtaccgacaagcattgcaagggctataacacctggatccagctggtgagcatgattttctgtcagttctccaactgcgactccgtccgtgatatttccaacggattaaaatccgccacaggaaatcttaaccatcccggcataagccgcgcaccatccaaatcgacagtcgcttatcagaatgcacaccgagacagttcggtcttctaggagctattctatatgttgttccgttatttcggacagcaggcggcttgggagcgcaaaggcttccggttcaagatgcccatcaaattactggattccactctggtctcgctgaccatatcggtttacgattgggcgcactataccacgtcaaagggtgccgtaaagatgcacacattgcttgattacgactgcttacttcctgaatttatgaatattacaggtggtaagcgaacagacaacaaggcggcatttgacattgaaatcaaaccgcacagcattgtggtggctgaccgcggatattgcgattatggacttttaaactattgggacagcaacaatgtattctatgtggttcgccataaggacgatatccaacacagaaccattaaagagttgccattgcccgagaaacacgcccaaaacgtcttgttggatgaaatcatagagtttgaactgcctacggccaaggataaatgccccaaaaggctaaggcgtatagcggtatgggatgaagaacacggctttgtaattgagcttcttagcaataacgtcacgcttgcagcctctacgatagcaaaactgtataaggcaagatggaatatcgagattttcttccacaacctcaaacaactattgcgcatcaagagctttatcggcatctcgcgcaacgccgtagagactcagatatggacagcaatgatcacaatgctgctatttatgtggctaaaacatatcgcacgctacaaatgggcacttgccaacctcgcctttctcgctacgactgaatacattccccaaatagacctctacaagtggttgaacgagccctttacaccgcctcccgaagaagaaaatccggcatgaggggggggattgctcattaattatgcagagtcgtatgactccgcaagttgcctcatacgcaaaatttatttaggacaatattggaaaatttttgatatttttttctctgcaacacaaataactcaccctccattacggtaatcaaatacacacaaacataaaactactaatatcctccattttgaagccagctaataaacaataatataggtattaactgttctcttaaaattctataagcccgttgtacttgtgttttaactgtagtttcagccaaccctaattggttcgctatttctttattttttttaccttcaactatcttcaacaatataatttctctacacttatcaggcaaagtattcaaagcattctgcaaccgcatttcaacagtttcatttatctcgatatcttttatcccagcaaacaattgtgcttccagtaatttatcattacaactatccactattttgcggtcacgcaatgcattcagacaacggtttcgtaaagaggtaaataaataagctttcaaagaagtttttatcaacaaagaatccgcatggtcccaaatataaaagaataaatcttggactaaatcttttgcttcttcctcatcgtacacataactttctgcaaacaaaaccattttagagaaatacgattcataaagataatgaaatgcgttgtagtctcgtttatacaatgattttaatacaaatagttccttgtcttccataaagtatgctttcaaagagattacaaaaataagaaatatcttaagaaatacaatttgcgccaagcatcaatattgtcctaaataatttttttgcaggagataacttgctgagtcatacgactctgcaaaatcaatgcgtaaccaaacccctcaaaccggattttcatcctggggagggggtgtaaagggctcgttcagccacttgtataggtctattttggtaaatgtgttgagccaaagcgagaaaggcgaggttggccagcgcccatttatagcgcgctatgtgcttgagccaggaaaaaagcagcattgtgatcatcgcagtccagatttgaatctccaccgcgttgcgtgaggtgccgataaagctcttgatgcgtagaagttgtttgagattgcggaagaaaatctcgatattctatcgcgccttatacagttttgctatcgtagaggctgcaagtgtaaaattattggtaagaagctcaataacaaatccatgctcatcgttccacactgctatacgcttcagccttttggggaatttctctttggccgcaggtagcccgaactcgatgctttcatccatcaggacgttttgggtatgctgcttgggtaagggcagttcctcaatagtcctgtaccgaatattgtccttatggcggccaacatagaatacattgttgctgtcccaatgatttaggaggccgtagtcgcaatatccgcggtcggccaccacgatgctgtgcggctttatctcaatgtcaaaagtggctttgttgtcagatctcttcccgtctgtaatatttacgaactcaggcaacagacaatcgtaatcaagcaatgtatgcatctttacggcacctgttttcgtcacttttttagggtgaaaaagctatggtttgattatcagcgattaagctcattgagatttggtgatttgggtaacacagtgtaattttgtgccatgtttatcaaccgatccaaaaacaaatcaggcacaacgagcgtccgagttcttcaaaaacgaggtcgtaacaacgttttggtaaagagttttggcagttcacgcgacatgtcggagattgagcggatggttgaacaggcacaagagtttatccggcgtcagactgggacgtattacaatctctttaatcagccgccagaacaaaatctggaggattttataggcaagctttccaatagccaaatatctgtggacgggccggaggttgtctttggcagattgtttgaccatgtaggctatgatgcaataggaggtctgttccgtccattggttctcagccgtctcgttgccccgggaagcaagttgaaaacagttgattatctgtggagatataatggagtgtcgtatgatgtgaacaagatttaccgttatcttgacaagttgtgtggaagaaagggcaatgccgatgacatcaaatctaaaatcgagcagattacttttgcgcatggcgccagggcaatgggaggatgtattgatgtggtattctatgacattaccacgctctatttcgaggtggctggtgaagatgatctcaggcgcacaggatacttaaaagacggcaaatttgattgtccgcagattcttctcggactgttggtgacaagggaggggttgccgataagctatgagatattccagggagatctgtcggaaaagaaaacgtttatacctttgctgaaacgagctcagcagaagttcggattccccagcccgattgtggtggccgacgcgggcctgctgtcgcgcaaaaatattgatgctcttgtcgctgccggctatgagtatatacttggagcaaggcttaaaaacgagaatgccaatgtcaagaagaaagtcttggcgctcaatctctcagacggtcaggttgcatcaatcgagacagacgacggactacgtattgttgtgtcatttacagaaaagcgccagaagaaagatgctttcaaccgcaccagagggcttttgcgactccaggcaaaggtagcctccggcaagatcactaagaagcacataaataatcgaggctacaacaaatatctgcgaattgaaggagaggcgaatataagcatcgatcttgaaacttttgagaaagacgcggcatgggatggtttgaaaggctatgtaaccaatgccacgctcccggatgaagaagtccttgccaactaccataacttatggtttatcgaacgggtattccgcatgagcaaaaccgacctgcagatacgacccatgtatcatcgtctgaggaatcgtatcgagggacatatctgcatctgcttttgcgtttatgtcctacaacttgagatggaacgtctgctaaaggccgcaaactcgacaatcacattggagaaagcccgagagcttgtaaagacgatgtatgctctgacatacactaagtccggacatatcaagccctcaaagacaatgctgcgcatggatactctgcaacaggagctatatcagctggtcgacgaatgggtaaagtctgatttgggtaacgcatgacgaaaacaggaaaaagggagaataaacaagcggcataacaaaaaaagaaggtggccttttcagacaccttcttgatatttaagcttgtaataaattcttattacttacctgcatgcataatagcagcctgagccgcggctacgcgggcgatgggcacgcggaacggtgaacagctgacatagttcatacctactgagtcgcagaagatgacggatgaaggttctccaccgtgttctccacagatacctactttcaggtctgcattagtcttacgacccagtttcacacccatttcaaccagacggcctacaccttcctgatccaatacagcgaacggatcggttttcaggatacctttcctgatgtattccggtaagaatttaccggcgtcgtcacgggagtaaccgaaggtcatctgagtcaggtcgttggtaccgaatgagaagaattcggctacttcggcgatctgatctgcggtgatagcggcacgcgggatttcgatcatcgtacctactttgtaatctactttaacgcctttttcttcgaataccatagctgcaacacggttgatgatttcagcctgctgtttcagttctttcacagtacctaccaaaggaaccataatttccggacgaggatccagaccacgcagtttcaggttacaagcagcttcgatgatcgcacgggcctgcatttcggtgatttccggataggtaactcccaaacggcagccacgatgacccagcatcgggttgaattcgtgcagagcatctactttttctttgatacgttctaccggaattcccagtttctgagccatatattgttgtgaggccggttcgttcggagtaaattcgtgtaaaggtgggtcgagcagacggatggtaacccccagtccgttcatggcttcgaggataccttcgaagtctccccgctgcatcggcaggatcttgttcagtgcatcccggcgtccttctaccgtgtcggacaggatcatttcacgcatagcgtcgatacggtgtccttcgaagaacatatgttctgtacggcaaagtccgacacctttggctccgaagtcacgggctttacgggcatctttcggggtatcggcattagtacgtacatacatacgggtatatttttcagccaggttcatgatggctgtgaagtcttcgtccaatgttgcatcttctgtttctacttttcctaaataaacttcaccggtagaaccgttcagggaaatccagtctccttctttgatgattgttccgtttacggagaaattacgtttggcataatcgactacgatatctcctgcgccggatacacaacatttacccataccacgggcaacgacagctgcgtgagaagtcataccaccgcgtgcggtcaggattccttcggatacgttcataccccgcaggtcttcgggagaagtttcctggcgtaccagaaccactttttcacctctgtttttccattcttcggcttcgtcggcgaagaatacgacacgcccgcaggcagcacccggagaagccggcagacctttggtaataacgtgagcttttttcagagcttctttattgaataccggatggagcagctcgtccaatttagccggttcctgacgcaacaaagctgttttttcatcgatcataccttgtttcagcatatcgacagccattttcaccatagcggctccggtacgttttccgttacgggtctgtaacatccacagcttaccgtcctggatggtgaattccatatcctgcatatcgtggaagtggtcttccagtttttcctgtacagcgttcaggtcggcataagcctgaggcatagcttcttccagcgaaggatatttggaagcacgttcttcttcggaaataccctgcagtttagcccaacggcgtgaaccctcgatggtgatttcctgcggtgtacggataccggctacaacgtcttccccctgtgcattgatcaggtattctccgttgaagatgtcttctccggttgcagcgtcacggctgaaagcaacaccggtagccgaattgttacccatgttaccgtaaaccatagactgtacgttaacagcagtaccccattcttccgggatctggttcaactgacggtacagaacggcacgttcggtcatccatgaatcgaatacggcacagatggctccccacagctgttcccacggacaagtcgggaaatctttgccggttttggttttgactacttttttgaagttttcgaccaatacctgcaaatcttcaacggtaaattcagtatcttgtttgatatgtttggcttctttcagcttgtcgatttcaacttcgaacggattgtgctcgccttttgctgctgctacacccattacaacatcgccgtacatctgaataaaacgacggtaagagtcccaggcaaaacgggcatttcctgatttttctgccagtaattttacggcatcgtcattcaatcccaggttcagcacggtgtccatcatacccggcatagaaacacgggcaccggaacgtacggataccatcaacgggaaagcctctcctttggaaccgaattttgcattcatgattttttccatgtgtgcaataccggctttaacgtcgttttctattaattttacaacagcatctttacctttctggttgtaaagtgtacaaacttcagtggtaatcgtgaaacctgcaggtacaggcaggccgatcaggttcatctccgccaggttggcgcctttaccaccgagcagatttttcatgtctgccttgccttctgcttttccgtctccgaatgtgtaaacgtacttcgtactcatatttctgttagatttgatttatttccctgagagggaaggtttattattatgatattgtttttataaactattgatatacaataaactgaaagccacgcgagcttgcgtattcagagttgcaaatatagaatattttttgttattataaaaatcggcttctatttttataatgatctattactcaaacgttttcaattttgaattcttggctctttatcattccctccggattgtcgtttgccggtataccggttccccgtttttccccaatccttcgacggtgatggtataactgccggccatgtcggcagtgaaaaaagagagggaagtctgcccggatgaatcgatcgggacgaccggttgccaataaatcgtgctgcggtaatcgatttcgggagctttgagtatttccgggtcgttgtattggggcatgtagaattcatccggttcggagtaacctaaaggaatgaatttgatcaaccctggagtggctttgggggtgaaatggccatgtttggtattgatgacaatcacaccgccggcaccgccttgggccatgaagaaagtcagccgggctccgtcgcggatgactcccagattgtccacatcctccggcatcactgcgttcagcatgtcttcggtctgtggcaatccgtcgatcatgaacagaggcgtacttccgttgcgggccatcgtcactttggtaccggagacaataacacccggaagacgggataatagttgatagatactggaagtattgaatttattcaattcttcctggcccaggatgtaatccgtcatatctgtgtattggccttcgtatttgtgttgtacgctttccggacggtgacgtaatacgaccgcttcgtcgagaatatagactttcacaccgttctggtagaaataactacctttgaactggtccataaattcttctttgcccagtggtttattttcccgggggattgtaaaatgagtgacgggatctttaaatagccggggagtgatagttatatctaccatttttcctcctttctctttgtagccacgtaccagaaaaatcgtactatcggggaaatccagatcccggatgatgaattctccgttttcgttcgacttcacttctcccaatgtattttcaccggggataaagatttgtacactggcattcgccatcggcttattgctataattggtgatttttccccggatttcttgtccctgttcaagcttgaaagtggctttagaaggtgtggcggtcaggaatttcccgatctcataacgggtccagccatgagtgagcatgaggagatcgatgtgttcgggagtttcacgactataacttcccggggcttcgatgtgccctttgaggtcggaggtcaggagcagataactgacgatattgtccgatagggtgtcacggggaaccatcgtattgtccgtaacagagagggaaaaactgccttcgagggggtgctcgccgatgtctgtaaactgtagtgtcaggtttactttttcccgtctgtcgtatttttctttatcggtccggagttgtaatacaggttgcggatccggctttataaaataagaacgctggctgtaaatgtgtgagtcggcatcggctagtacgaactgcacggtaccaccgggcagggagttcaggggtaaggctcccacgaaatcgtcttttgccggtagcacgcctaacagacgtcctctggagtgcataacgatataaatcgttttccctgcaggaaaatgaattccttttttgacagcaaggatcaggtggttgtcctgaggataaacctgcaaggccagattttccgcttggggaatctgcaagtcgactcttttttcccggtttgtggcggtatgtaccagggcatagtagcgttcgcccggctgggtggtcagttccagggttcccattccccggtgaaaggttgaaaaagaaacgacttcctgttccttactattgtaaatttttccctcggcagctatcgaacgtccgtttgcatccagtgccttaaaggcgacggtttgcgtggtgcccgctaataaattaccgccttccgggaagaattgaaagtcgaagtcgtcggaaagattcaataaagggatttctcttgaaaaagcaaaaggcaagtccgtcgggaacgctacctgaatccggtcgatactgtcgctgaccggatattgtaaagtggcggatccttgttcatcggttttcaaggtagtcttgtttaccgctagtttatgacggtaggtcgtgattttcagacgttgatgaacataaggtttgccggcattatcgattagggtgagcgtcgtccggattgcattgtcctgacggctgcttgccgtgtgaatgtttacttcattcactgtactgacgatctgtatattttttttgaagaaaaaatcttcttcgttattttgcatccagttggtaaagacacgcaggcaatactctcccggaggggtggtggatggaatcgtcaaattgccataaaaacaagaatcggtctgttttatttggatacgttttaaaatcgaatcctgacggttgatgagttcgaggtagataaatttacttaattgggtcgggatatgatagctggcatctacgcagtaggctctgaaccagatattttcgccggcagagtaggtcggtttatcggtatgtagataaattttttcctgggggttgaaattgaaatagttgttgaaacattgttcgatgtatgaaggaaaagcatcttcggtttgagctccgacgggacggaaaagaaggaccagcatgatcgtgaacatgcccgtgcagattgttttcatcatttattgtttgtggttacgggaacaaaattaagaaataaaatgatatttttgttctgctaaagagaaaatgcatgaagccaacagagagtcggaaacggtacaatgattaccccgcttatttcaaagaattatttggagaacgggtgcaaaaattgtctatcgacggtggatttacttgtccgaaccgggatgggaaaaaagggaccggtggttgtacgttttgtaataatgagagttttaatccgggttattgccgggctgtgtcggggatatcccgacagatcggggagggaagggccttttttgcccgaaagtatatcggtcagaagtatctggcttattttcaggcttattcgaatacctatgctcctttggaagagttacggcaaaagtatgaggaggcattggattgtcccgatgtagtaggattggtgatcgctacccgtccggatgctgtgaccgatgacgtattggattatattgccggattgtcccggcgttgttatgtttgtgtagagtatggagtcgaatctgcaaatgatgaagttttgcgaacggtcaaccggggacatacttttgccgaagctgaggaagcgatacggaaaacggctgagagaggtatccggataggagctcatttgattttcggcttacccggagagagccgggagtctatgttggagggggcggtccgtttgtgcgatctgccgattcaggtattgaagctacatcagttgcagattgtccggggaacggcgatggccgaacaatatcttcggcatccggaggttttcaggttgtatagttatgaagaatacctcgattttgtagtggacgtgatcggacatatccggccggatgtttatctggaacgttttgtcaatcaatcacccgaagaatatctgatcgctccgaaatgggggataaagaattatgagtttgtggctaaactggagaagagattgcgcgagagaggagagtggcaggggaggtggtatagggggaaaggtaaaaagtaaaaagctaaaagttgaaggtttggggaaaatgaaggaggggaaaagaagagagatgaaaaaaataaaataaaatgagatgatgattggacaggagaaagtgtatgagacattgaaagctttgggtattgaattcgattatctggaacatcctgaggcacctacgatcgagattgcccgccaatattggaaaaatttggacagtacacattgtaagaatttgtttttcaggaatcataagggaaaccggcattacctggttatttttcattgtgatcggaatctggcgattcatgatctggaacaactattaaaacaagggaaattaagttttgcttcggaaaaacggatggagaaatacctggggttgaagccgggatctgtcagccctttcggattagtgaacgatacggaacaccatgtctatgttttccttgatgaaaatttgaaacaagcccggaaattgtcgtttcatccgaatgataaccgggcttctctggctataaagacggaagattttatccgttatatggatcagacagggaatgggtatgagtggatcagactttattgattggcgcactgcgccaatcctacttcatcccttccacctccccgatggtcatcggtttatatttgccgagccggcgtgctccgtcgggagtgatcaggtagtcttcttcgttacggatgccgctgaaacctttccaggcttccagtttgtcgtattggataaattcgcagaaccgtttttcacttctccaatagtcgatgagctcaggaataaaatagatgccgggttctatggtaaagacaaaaccgggttccagggggcgggccagacggagcgatttgaaaccgaactgtgtacttttgggttgtccgttatatcctacccatacttcgcctaaattctccatgtcgtgaacatcgagtcccatcatgtggccgagtccgcagggaaagaacaacgcataagcacccgaacgggctgcttcgtcgggatctcctttcatcaggccgatcgatttcatcccttctgcaatcgtacgggcggcaatcagatggacctctttgaacggaatgcccggtcttagggcggcaactgcggcctgatgggcttgtaaagcgatttgatagatggttttctgctgttctgtaaaatgtttacttaccggaatggtcgacgagaggtcgccggaatagtgcatgccgttttccgctcctgcatccaacaataacaactgcccttcgtggaggatattaccgtgataatgattatggagggtttgcccgttaatggtggcaatcaccgggaaagacaattgtccgccattttgtaaagcgacttctgtcactgctgctgctatttcacattctttcatccccggccggacaagttgcatcgcccggatgtgcatatcggcggagatatttactgcttcttctatctccctgatctcctcggccgatttgtagtttcgttggccgactacagcccggatcagttcggtagaggctccggcaacttgcgcttcaggggcaatccccagtaaacggagtagggtgacctgatgttcaccccggtaaggaggcagataatggatacgacgtccctgctgtaccgctttatttaaataatcgctcagctgggcggtcggagcggttgctgtgatgcctactgaagcactcttttcccgtatcgtgggttgggtgcccatccagacgatatcgtcgatggtcagttcatccccgaaaataatttcccggtcttcatcgatatcgatcagagccgaaagaccggcataatccgaaccgaaaaaatataaaaaagtcgaatcctgacggaaatgatacgtgttgtcggcataattcataccgctttcattgttgccgagaaatagtaaaatccctttaccgatttctttcttcagtctgttacgtctctgaatgtaagtttctttgttgaacataatcgtatggttttataagtagatattgggtttggtcagttggtgttattgataaaatctttgggtaatacgccgaattgattttggaaacatttggcaaagtaggagggactgttaaagccgaccatataacagatctcgttgatcttatattcgtttccggccagatattccgctgctttacgcaggcgtaccaaccggataaattcattcggggtcaaaccggttactgcctttactttggcatacagaagggtacggctcatattgacacttcgggtgagttggtcgacggaaaattctgtattcgagatattctcctggatgatctcgttcaaacggttaaaccatttttcgtcggcctgtgtttcggtcagggtattgatcggggtgaaaggtttctctgaaaaaagacaacgcagtttgttccggttttccagcagactgaccatttgtgcatacagatagctcacagataccggtttctcgatataaacatccgctccgttttccaggccggcgattttgcttgctgtatccgtgcgtgccgtgagcaggattaccgggatatgacttagattgatgtctctttttattcgtttgcataattctattccgtccattaccggcatcatgacgtcgctgatgacaatgtccggcttcagattttccagtgatttcaatgcttcttcgccatttccggccgtgtggatatgatatcgttgtccgatgacacgggtgagataagaaataaactcttcgttatcttcgacaatcagtacggttccggcctttttcccatctttgtcggtcttctctgttccggcaggttcgatcggatcttcagcttttacttcctgg

SEQ ID NO: 5990 - DNA, 48723 bp, Unknown
  gut microbiota DNA sequence
gttttttcacataatccctaattaaatctttcataaggactatataaatatgcctactcgttactattagcttttcggctaccgctcctgtttaccagtatggtctggatataatattgtcaacttggctatccaatataaactcacccttgtagggatagtttctctattggaatcaaaaagcatagtttgaagcatggatttttaggcttcgctttaccctccgttacatactcgaactctattcaatatgttggaggtgatatatggggtaagaacagtactactttcataagcatattttattgttgtttttgcaaaaatagtcttttttctttagattgcaagaaatttgcccggaatttcaatgaaagtcgaaaatttaataattaaactgccgtaaaatgcacactaattgacctttgggcatattcatggctgttcgttttgacatgtatgtgtccgtatgtcccatctatggaatttttctcacgatttcttggaaggttggtgtttatctgcaaattttcgtatagttttctacgtttcatacatagcaaaaatatgaaagcaaaaggcctctaccatgtattttgtataaaatatatggtggaggcaattccaataagataaagagagtattctcctgcctatactttatatttctcttccaacaaccattctaagtccgaagccttataaagtattttccctgcaaactgtgtgtagggaataatcctcttgtcccgatagtcctgcaaggtgcgtgggctgatatacagcttctcgcatacttccttacctgtaagaaaatgctcaccgccaaatagcggcttgtgtgtctgtgccacttccttaattctcttgcttactccgctgatagctgacagcaccacctgcatatcgtcagcctctatattcaaatctcttacctgttccataatcttcgtgtctatttgttgattttagtttttcccgtttcagctttctccgtttttgtttggagcaactgttccacgtcctcacgcttgtagtagcacttatgcccgatttgggcaaagggcaacacacccgtatcacggtagtgctgcaaggtgcgcttgctgatattaagcagcctgcacacatcaccgttgtgcagccaatcggtgtgcctgcttcgttccccgaatgccttgtggcaggtctcggcaaggttgagtatttcgttcctcagctttgcccaatttgaatccgtaatgataaaatatcccatttccttattattgttttgtttgtaatttctttttgttttgcgcttcatcgcacatttctgcctgcaaaagtaggatgtgttttccatacctcaaagcaacagggaagagcagggaaatacagggaacttgaaggaaaaggcaacgcatttcatcgactggcatttacactttttgccatattttcttctttcaccattcgtttagtgtaaagatacgtcgtgccgatacaattctatcgatgttgttcaagtggcagcttgtggcactttcaatgtagccaaacgctaccacatctctgcacagattctatcgtttgcaatatcggtgcagaatattgcaaacatgcgcaaggggtacactattgtttttgccttttcttgtcgttttatcctctgttttggcttaaatcatcttttttcttttcccacctccataaaaaacatgtgaactttatagcagacgggcgcaacattatgcaagcactccctgaatgcttggaactttcctgttctcttcataacttcactcttggaaaccaaaccaagcatataatgaaaaagaatgcagataaaggtaaatcggagggaggaaacaatatgcccaagcaaaggaagacttcctccaaaaacggtgagatagaaacttatctctcctctcgctatgagttcagatacaacacggtattgggaagaaccgaaaggaaagaacaacctgatactggttatcaactcgtacctccaagccgttcctcaatttcacgagacaatgacactccacgagcgcagaatcccattggtgcggtggcagacaccattgttagtgcagccgatgaagttgtggaagggttaggcgatttgattacaccatccacacaaggcaatgactatgctgaaacagcatggcagcgcaaacttagaaaccaagccaacagaaagaagaagcgaagacgtggattatagtccaatcacaaatcgcattataaaagtgcagaaagaagaatatctcattaaaaacgcttgttattcgcaagcaaagtattatctttgcaaacagaataacaagcgttctttgttaggcagaaaacagcggagccaagtagttcgctcgtttccaaatcgttacctatttagttttaccaacaaggtaacttctttattttcaataagttgtattttaagaattatcttgccgtgcatttttctgggacttggatagtaaatacgggccattgatgcgtcgtgtgcctgggacgctgagcaataataatatggaacgttccggagtccgggaggcctataatctgattctggaggatctggattatgctattgattacgggcctgtgtataaagatgttttttctgcttccagaggattggcaaaggggttcaaagtggaagttttattactgaggggaacagatgaagattacgcgaaagtgccggaattggcaaatgaagtactttctaattatgaatttaagctggaagagagctttgaggatgtttttaaaaacggttataaatctactgaaatcatgttttcccgtttcctttctgctaaaaagttggccgacgtggatatgaatgtcgccagtataaagaagttaatgtgtggaaaatacaagcccaacgaccagtttttcgatattttcaactcaaccaatgacatccgttatgctttgacttttgattcggtactgtatgaacagtttaattcgacaaataagacgttgattttaaagaaattatggcgtacagacggaaattgtccgatgttttatatgcgtttagcccagatgaaactgtttcaggctgaagcgttggaacgtaatggggcgtcggttgcagatgttctggctcctttgaatgatttgcgtcagcgttcgggaaatgtgcttttaaaagcagaagatttttcggaccgggatgatttggtcaggaccatattttatgaaattgttcgggaaataggactagaaaatggagctgaatggtttgctgctgtccggatgcgtttatcttcaggtaaaagattgatatcggaactgaatccagtttattcggatgataaacagttagcctggcagattccggacgatgaggtaagttacaataccctgatggagcctaatccggtgtttatacgggagtaatgaatgtttaatgattttagattgcttgttatgagatttaaatatatattgattctattattaggatgttgttgctggaggtgtaacagtatcgatgatcgttttgaagaaaaagataatctgcgtctgattatgctggaagccatagaagaaccttatgcaaatcccaaggatgtgtatgtatataaattgatggcgcagagtatgagtggacttgaacgggttgttatttcgaatgttagtcatgaactggattctgctccggctttaccgacaattgtattagtggactctgttacagtggattcaaatggatatttaagccgtccggtgaaaactgcaattatagaatatcccatcgttgttcctcctctgcccggagaatcaatcagcctggattttacggtgactgctgtcaatgggaaattccagactataacctcttcgatgctggttgctaattataaagaaagtaagaaagggctcttttttgccaatacctatacttccaagaattatgctttttactcttcggaaaaagatgctctttatggtgtaaatcccaacttagctacttattataagaggaatattccttatattgatttttattctatttctgacggcgccagggaatattttatctattcacccacagatccggaggtcgttgaaagactgaaagggcagggaattacggattatgtactgacggagatgcggagaacccgtatggtaaaactggaggatataaattttacaaaggtgaaagataaagagattctagccatagattttacaaatacagtaacgaaaattcaggtaaaaaaaggtgataatataggttttataacggaagacggccggaaaggtattatgaatattgctggagcctccggcagatacatcgattttaaatgtaagacccagaccattccccaataatcaggggaggtttttgggcatcctactattgccggtatttgggccggaaaatgtaaccgggcagaaaagctgcccggttattatattaggtagttatatacatatttgcactcataagcgtactttttaaatagtagcggcggttttaacggttataaaggttttaaaagtcaagtctgactgttgtaactaaaaacgatacagaaatactgtttcaggtctttagaatcaattgtgtgtcggtgtttccgcttctttccgctttttttggaagttgtccactacgaatgcagtaaaaatcggaaaaaataccatgccagaggcggctaagataacagccagcgattggcctaattttgtgatgccgaagatgttggaaccgacggtagtgacgttcatcaatgaccagttgaaggcatcccagtagtctttgaccatggggtttgggccatgctcgacgaagtagaacatgatgctgcaaaaataaatgataacaaagacgatggacagataggtgacgaacagattggttactttactgcgggtcatccagctgacgatgatcgatataccgtagataccccgggcgataggaattaaacgcagtaaaacccaggtggcatgggaaagatgggcggaagaaatatatacgatattcagataggggatagaaatcaataataaaaagatatgatgacccagaaaatgccatccttcctgactaaaataccagcggacaaagaaatctgccaggaaaatcgtacagaccattaaatgggtattcagaataaagcgttcggataaaatcgttgttgcagataataattcgatagaaataattaccagaaccagtatgctactgagcaataccataatgttcaggaattttacgataggtttatcgttctgtaccatggtctatgggtttataaagttcataaagtttgtaaagtcggtgtcccctgcgggtacttaatttacggtactttcggtgggacgcatcggggacgtaaacgaagcgctcgcaggggaaacgactttatgagttattttataatttctacagtgtcgccactgaagacattgactccgagttcccgggcgatgtatttgatggcagcttgtgctttcaccgagtttccggcatcgtctaatggaggagcaaaggctgcaataccgaatacgccgggcagacaacccatcacgccgccaccgactccggttttggcagggataccgctggtgtagatccagtcgccggtgtgttcgtagaaaccgacagcagtgatcagggaaatgatatggggcatcagggattcatcgaatacctgtttaccggttaccggatttttacctttgttagctatcgtacaacctgctatcgctaactgtttcgtcgttactcccatagagcaatgccgggtatagagatccagcgacatgtccggatcgtcgtaaatccggttgtaatttttcaataaccaggcgatagaacgattgttgaaatttgtggcggattccgatttgtaaagttcgtcttgtaatattaattcgctaccgcatagatcggccatattgtcggcaatagcagcccatttcgaattgggatcaccgatgggcttaaccatactatcggcactgatagcgccggcattgaccaagggggtactcggatgatccttttccagtaagattgccatgatggagttgaaaggaagcccggttgcatcggcgcctatctttttcaatacggcttcggctccatattgtttgagtatcaatacagctgtatggactttagaaatagattcgataccgaaaacataggttgtatctccggcttcgatgacttctcccgtgggtagacagacagcgataccgaaaaggttaggatcgattttagccaggaaagggatatagtcggcattctttccgcctttcagattttttactttctcatgagcttgtttgacaatggcttcgaggtcggttatttttatggtctttttcatgattcaaaatttaattttttctgttccggatttattgaaaataagccggaacagaaaaagggattatttttgtgaagtcgggttttcttttgctcccagcgttgggggaattgttgtttgcccggtcgatgtattagtctgaggagtgccggccggggttgttaccggagtgggggttactgtggctgggtttgttgtagtagcagtaaccggagcaacttcccaatgaaaaggttggatttccgtattcggatctttccaggacggcttacgcaaagaataaataatcagtggtatggctacaaagataatgcaccccaggatcagtacggtaaaccatacggtattacttccggttgcaatctgagaaggtgggataaagcttaatacgaatgccagcagggcacccaggaaaccgatgcctgccactatccagatcaggccgtttcctttccgtccgatagcgaaaggacgatcggctttggacattttataccgtaaagtgatggctgctgtaaacatcagcatgtacataatcaggtatagcaatacggtcaactgtgaaagcatctgatagaaagattggacagaaggcatgacaacaaataataaggccaataaagtaacgatgcacccctgaatgatcaggatgtttttctgtactccgattttattcgttttttggaaaaaaggaggcagataaccggctttaccgacggcaaaaataccttttgacggaccggcaacccaggttagaactccggctaatacaccgaacatcaaggcgatggcgatgattggcgaagcccaatgaatatgaagataagccaaataattgtcaaaaccgaccaataaactttgggttaagttgatttctttagccggaataatcaatcccagggcaaaagtacctagaataaaaatgactacgataatgatggcaccgataaagatggctttaggatagttcttactggcgggttcttttacatccataacgtgaataccggacatttccataccggcataaaacaggaatatactggaagctaataccaggttattgaaattggacaggtccgggaagaatccctgactcatatccatgttattatgccctccggttgctaaatagataataccgaaaagaatcagtaaaccggccggaataatagttcctaccgttgcgccgatttttgagattttacttacccagcccaatcctttcagtgaaataaaagtggctaaccagtagatgaccaatacagtgaccaaggtaaagactttgttagaagccagtgctgcatcatgtacattattcatgccaatataggcaatggatacagcaccgaaggtcaatacggtcggataccagatggtactttcgatccattgcaggaaaatagccaggaagccgtatctttttccgtaagcttcaccgacccaacgaaataccccaccttctttgttggagaacatggctgctagttcggccgctaccaacgaagtcgggattaaaaatacgattgcagcgaacagataatagaaagccgaactcaggccatattcggcttctgccggcagaccacgaagactcactactgctgcaacgttcatgatagccagggtcattacgccgatttttgccgccgttcctgtttttttggaatttgttgccatagtttgaataaatttaattaataaatataagcttgaaattaagtgttttatattttttgaatttgttatcgcttttgctgtcctaggtacgagtttgataaaatgaatgtttaaatccttacattatttaactttgacggaggaaatcctttttccttgaagtgggataagaagaaaacaaattaaaccgatatttaattgtataattttggatacttttgcaggatatctactaaacagtgataaaaatgacagttgcagaagcacaaacgctttgtttgaagcagggaacccctttttattcctatcgtttaccgggagaacgagaatctgttttcggcgctcagctggacggtgaagttgcccctttccgtcaggttggagaacagggaaagggatttattctggttccttttgccgaatctgaagaagtacctgcctggtttatccggggagatataacctttagggaggtaacgacggatattgaaatccggaccggcttaagcgggactatggggctaaccgatattaaacccgggcaggaaccggatatttcctgggaagaatatgaaagtcaggtggcggcgatggtagcggccttaaaacaaggtcaggtacgcaagatggttttgtccagaacaattactttacaggaacgggcttatgaaaaagcggctgtctggtatactgctttggctgatcgttatccggaagcttttgtgtttttggtttttgttcctggtaaaacctgttggttgggagcgacaccggagattttcttgaggcagtcggcggctggaaccgagactatggctctggcgggtacccgaagggtaggaacatcaggagcttgggggcagaaggagatcgaggaacaggctatcgtaacggaatatatggcagagctgttagagacggtatgtggagaaaaatggcgacggcaaggccccttttcaaaacaggccggacgggttgaacatttgtgtaccgtttttcggcatgtgggaaaactgactcccgggctgaccgaccgggtacgtcgtgctttgcatccgactcctgcggtgggaggggtacctgctggatcggctcttccgatgatcaggcggatagaaggacgtaaccggcggtattatgccgggtatgtggggccggtatcgggtgacggatgttgggattggtttgtgaatttacgttgtatggagttgtggcccgatagaatcagattacatatcggaggggggattacggccttgtccgatccccggaaagaatgggaagaaactgaattgaaatcgaggaccttgttggatatcgtacagtatagcgataaataaattttgtcgtcggaatatggaatacttaactacagataaagaaggaataaagatattgatagaggttctgaaagaaaaaggaatccgtcaggtggtattatcgccgggctccagaaatgctcctttgttggttgcatttgcccgtgagaaacaaatcaggcactttgtcgtgctcgacgaacggagtgccgcttttatggctctgggtatggcgcaacaatcgggtgttccggtggctttggtatgcacgtcggggactgctcctttgaattatgcaccggcgatagcggaagcatattaccaacgtttacccttgatcgtgatcacggccgaccgtccggtggaatggatcgatcaggacgatagccagacaatccggcagcaagcggttttccggaatattgtaaaggcttcttatcagttaccggccgaactgttccatgcagacgaacactggtatgccaatcgtctggtcaacgatgctttgaataccgctttgaaaggccggcagggacctgtacatctgaatatacccttgcgggaatcgctctatgggctgagggattacccggagcgggaagtaaggacgatcgaatgtatcgatccggccccgagtctgtcggtcggggtgatgcaacgtctggtggatatcttcgatcattgtccgaaggtgatgattctggccggatttcatcggcctgatttccggttgagagaagcgcttcatcggttggcgggttatccgaatgtagtggtattgacagaaacgctggccaatgtgacttctgagcggcatatcggaacgatcgaccgggtattggcaacggtaaaagaggcagagcgggaggaatatagtccggagttgttgattactttcgggggaccgttgatttccaggcatgtgaaagcttatctgcggaagttccggcctcgttggcattggagtatcgatcgtaccgagcatccggccgataccatgcaggtactgacgactcagatccaattggaagcagaaggtttttttccgcaattggtagcggtggccaaaggtagggcatctgattatgctttgcgttggaaagaaaagaaagaatcggcggcagtacgtcatgaggaatttgccggtcgggtagagtggtcggattggaaggctttttcgcttattttgccggcattgccggaaggatctgccttgcagctggctaacagtactcctgtgcgttacggacaactgttcgactattttcaggtgaagcgggtagacggaaaccgggggacaagtgggatagacggttcgacttcgacagcagtgggggctgccttgatgagggaaggaataacaacgctgatcaccggggatatgagttttctgtacgattccaacgcattgtggaataaatatatatcctctcgtttgaagattattgtgatgaaaaatggcgggggtggtattttcagattcatatccggtccttcggaactggaagagttggaagaatgtttcgaaaccgggacggaggtagatgtctgcggatttgcacaacttcatcatttccgttatttcaaagcaagcgatgaggttgaactggccggtgttttacctgagttcttcaatgaaaccgaatggcccgtgatcctggaggtcgaaaccccacgtttgaagaatgcagaggtgttgaaaagttacttccggagtttacaaggagaatgataatatattaaataaaacagtttatgagaaagtggcaaaccataaaagaatacgaagatatcaaattcgatttcttcgaaggaattgcaaagattacgatcaaccgtccccgggtgtataatgcttttcgtcctcaaacgaataaagagatgctggatgcgatgacgatttgccgggaacgcaacgatatcggggttgtcgtgttgacaggtgccggagataaagctttttgttccgggggagatcagcatgtgaagggtgtaggaggatatatagatgagaacggggtgccccgtctgaatgtactcgatttgcacaaggcaatccgttcacttcccaaacctgtgatcgctatggtcaacggttatgctatcggaggcgggcatgtgttgcatgtaatctgtgatctgactatcgcttccgagaatgcccgtttcggacaaaccggaccgaaagtagggagtttcgacggaggatttggttcttcgtatctggctcgttgtgtcggacagaaaaaagcacgtgagatctggtttctttgtcggcaatatacagccaaagaagccgaagaaatgggaatggtcaataaagtggttcccttcgaacaattggaagacgagacggtggattggtgtaaaaccattatgaaacgtagtcctatggctatccgaatgataaaacgggctttgaatgccgaattggatgggcaacacggactgatggaatttgccggagacgcgactttgatgtattatttgatggctgaagcccaggaagggaagaatgcctttttagagaaacgggatccggatttcgatcaatttcccaaatttccttgaattctttattcgatcaggttatcggtatcatgttgaaagcatcttttcagaaatatcggcttcatttcaaagaaccttccgggacgtcccgggggattctgttggataaggatacttattttatccggatttgggaggaaggcgcggagacctgcttcgggcttggcgagtgtgctctcttccggggattaagtgctgaagaccggccggattatgaagaaaagctgagagaggtttgtaatcgtatcgctgaaatagagatagcctctcttcaggaatggagttcgatccgttttggtgtggagatggcattcgccgatttgcggcaaggaggaaagcggatttattttccttctgctttttctgccggcgaagcagggatcgaaatcaacggactcatttggatgggagaccgggaaacgatgttgcaacgaatccgggctaaattagatgccggatttcattgtataaaagtgaaaatcggagccattgattttcagtcggagctcgacttattgaaatttatccgtcgccgtttcggtagggaagacgtggaactgagggtggatgcgaacggcgctttcgctcctgagacagctctggaacgcttggatgctttggcaaaatacgatttgcattctatcgaacaacctatccgtcaggggcaatggcgggagatggcccggctttgtgcccggacaccggtgcctatagcgctcgatgaagaattgatcggagtaaacgatgccgggcagaaacgtgaattgctggaagcgatccggccccggtacattattttgaaaccggctttggccggtggttttagcggaacggaagagtggatccggctggctgaagcaagaggtatcggatggtgggtgacttctgccctggagtcgaatatcggattgagtgcattggcacaatggacgtatggattacagaatccgatgcctcagggattaggaacagggctgctctataccaacaatatcccttcacctttgcagctgaccggggaaagattatattatcgtccacagagaatgtgggatttgtcgtctattagctgagtatatgatggaagtacggttaaatggaagggtgtatacttgcctggaacaacttcgtgaacaggcagatgaagaattgttcctttttttagaagagtggttcgacgatcgttcttatgtaccggggcatacttccgggtcgacaggtgctcctaaagagatacagttgtccaaagcggatatgcgggcttctgcccgtatgacaaatgctttttttgctatcggccgggaatcggttttattgttgtgtctttcggtttcgtatattgcgggaaagatgatggtcgtcagggctctggaagcaggtgccgagttgttgactgtgaaagtttccgctcatcctttacgaataacggggcaggaggaatatgtggacaggaggatcgacctggctgctatggtgccgatgcaggtggaggaatctatgaaatcggaatcggaaaaacaacgtttcgggtatattcgtcatctgattatcggaggggctccggtatccgtggctttagaagaacggttgaaaaaaattccgacacaatgttacgctacatatggaatgaccgagacggtgtctcatatcgccttgaaaaagttgaatagtgatccggcttattttgctttgggggaggtcgggttcgaacaggatgagcggggatgtctgatcatcgatgccccccatttacaagcccgccgttttgtgacgaacgatatggtcagattgcatggaaacaaacggttcgagtggctgggaaggttcgactatgtgattaattcaggagggatcaaattgtttcctgaattaatcgaacaaaaattggtccgtagtatcccgggacgtttttttattacttcccggccggatgaagtgttgggcgaaagtgtcctgctggccttggaaggggcacactgggacttcgtgtctttgcaactattgctgcaaaaaatccggcctttgctgggacgtttcgagttgcccaaagcgtttgtagtcagtccttttttccgggagacgacctctgggaaagttgtacgtaccttgcctgaaaatgcggtcttttatcctgtccatcaattgagggtctccgaatgatgacggaaaaaggcaaaaatactgaaacaacaggcgatgatcgtgctgaggataaaagggaaataggccgaatccgttgaaaacagactttcgattccctgtaggataaacggataagtgatgattgcgatataattcatcaccatcaccagggacaggacgaaagtggcttccgaaggttttacgtgggaagctgttttatcgtaaatgatcggttgcatgattccatagccaaagccggtcagaatgactccgagggtcagtaagaacatacctgctttgaagacaaagaagattaatcctacggtcagtaaaacgatggctataaaattggtataggctttcagtagagcgatgatgcggttgatcagcaaacccggtaaagtcatagacaaaaagaatacggatatcaacgtgccggaaatgtcgtaattccccaatttcagattatgcatataaagggagagattgagcggtatggtcaatgccagaaaagtagccacatagtagaaaagcatgagtttgatcaaccagttgtattttttatgatgatgtgtcgccggctgttgaaccggagttgcctcttgggccgaagcggaatagaaaggtggtttttcgtccagatagaatgcgaaaaacagggaaatacctgagatacaatatacgacaaaggataaatgccagctgataccggccagaaaaccggccagtaaagtggcgataaccagcgtgaggttagtgatcgcagacacatagcccaattgttttgtccggtaagaacccgaaaaataatcggcgaccaggcctgttgaaaaaggaattaccagtccggctcctatgccgagcaggccactgatcagcagcaatgcccacatccgatcggcgaaaggataggcgatactacaggcggaaaatatcgccagaccggtaatcaataatttttttgtattgaaataaagggacatacgtcctgccaggaggatgaaaggaacgatgataaacgagggtagcgattccagcatttgcagttgtaattcacttgtcgaactgaatatcgactccaatttacccagaataggtgagatagcgaggcctggtaaagaggttaccatggatatagaataaatagctatcaatttttgcaatgtcatatttccctggcctgttttgatcttcatggttttatggcttaattagaaagtaattttgcatggtctgtttatggaattgtaacgcaggcggacctaaaaagttaaatcatttcggaaaaatgtatcgaaactaaaaggaggcatgccgaaacttattcgatggtttgtcgttattaagggaaataaactaaacagactcacgatgagaacatttaaaaatcagatgcaggcttttgccataaaacagctattgaagtatgtagaaagagatcctgaggtaaatgcggctaaagctttaaagataatccggaaaatagaccttgacgggacttacggatcctcctgggatgaattagagaaatgtttacaggatcccgggaacaattggacgcgtctggtaaaaaaggcttatacggaatgggatccgcatgtcaggaaaaaactattcgaatccctgatatgtaatgcagcgatcatcggtaatagtgctgtaaaaaagaccagtaaaaaatatggggtacatgtaccctggacgattttgatggatccgacctctgcctgtaacctgaagtgtacggggtgttgggcggccgaatacgggcatcagatgtcaatggacctggaaaccctggaccgtattattaccgaagccaaagctttggggatttatatgtttattttttcgggtggggaacctttagtccggaaaaaagatatcatcaaactttgtgaaaaacataccgattgttattttctggcgtttaccaacggaaccctgatcgatgaggcttttgccgacgatatgctgagggttggaaattttgcaccggctatcagtgtcgaaggatatggagaagaaacggatatgcggcgtggaaaaggtactttcaaggcagtgatgaaagcaatggagatattgaaacgcaaacgcttgttattcggtatgtcgacttgttatcatcgtaaaaacgtcgatgtcgtcgggtcgtctgaatatcttgattttatgatcgaccaaggggctgcttttgtttggtatttcacttatatgccggtcggtaacgatgctgtacccgaattgatggtgacttccgaacagcggaaattcatgtacgagcaagtacgtatgttccgtaagacaaagccgatctttgctatggatttctggaatgacggggagtatgtcaggggatgtatcgccggaggacgttattatttccatatcaatgccaatggggatgtcgaaccttgtgctttcattcattattcgacagtcaatataaagcaggtttctttgctggaagcacttcgttctcccttgtttaaggcttatcaacaacgccagccttttaataaaaatcatttgcgtccttgtccgttgctggataatccccatagtctgaaagaagttgtgcgtgtttcggaagcttattctacggatatgctgaaacctgaagatgtggatgtactgacaggtaaatgtgtcggaactgcagaaaaatggaggaaagtagccgatcacatctggtatggtaaaaacggtacagaagggcagaaagaagaaaaacaactggaaacagaaaaatctgccgaaaaacggaaaggaaatgaggtgaaagataaggaacgggaaacttcggaacaaaagcaggaaaaggaaaaagctttaagtgtttaatgggttttatgtgtccggatcagtactcgctgacctgaatagagggtggtggcgaataaataaatgtcacccccttcttttatgttactgcgtttgcggagttcggccactgtcaggggaaaattacgggtggtcagattggctttgggaatttggcggtaaagctgtttcaataacttaccggaaaattcataggtctcttcgatagtgaagatacggcctggaaaatcctgacataaagattcggaggtgtataaatgactgtgccggtgtaatttgaataaattcaaacgggtagcgattaatttgaatgctccgctttttaagagggcagcatggggttcgtaaagatagttttgcaaggtttgacacacttgcaacggagcttctttctcttcgtcgggagtaaagataaaaggtggctcggcggtcgtaccacctagatttactgcatatatttttaccggttgtacagagggggtagtgccttcaaggatgaataacagttctttgcattcattccttaccgccagaatatggatttcacgggtttccggtaagagccgcagggtctcttcgggatcggccatcggggatattttgacgattacccgtcgggcccgttctaaaagcaagggtttgagctggagaatgtcgggttcacaatcggtcagagcgaacagtcgcttattaccattgccccggcgtgcaggatccagatagaaagtatcggcttgcagggtttgaataatatcacatgcatccgaatggataatatgaatattggaggtattcaacaccttgaaattatgctgtgctgcggtacaatattccggaaaacgttcgacgtaaataacgttcccggctttttgggcgaagtaaaaagtatcgatcccgagtcctccggtcaggtcgcaaaccgtatttcctctaagaagttgctgtttatacagggcggtttgttccgatgaacactgttcggtggacaagcgggaaggatagatcaattcatcctgctcataccagaaaggaagcttatgttgaatctgacgccgggcgataatttgatcgatggcaaaacggatatcgataccgggaaagcgggaagcggccaacagtagtttgtcggtattgtcagtcagatgtgcgcgtatgaattgttttagcccggcggttagctgcatgatcttatcatttgccggcaaagatacgaatttctgttgtgtaggagctaaaaaatcaggttttgtaaataatagatgcctattccggccagaaatccggttatggcaatccagctgatatgccgcatataccaggtgaaactgattttctcgagtcccatcactactactccggcggcagagccgatgatcagaatacttccacctgttccggcacaataagctaaaagtttccagaaattcccgtcactgacaaaattcaacaaataggcagtttcggaaatacctcccgctgtggccggcgctgtgagcggatacatgcccatggcagccgctactaaaggtacattgtcgatgacagaagaaagaaatccgataatacctgtaatgatatagacattatgaatacccgaattcagtaaatcggacaactggtgtaataggcctatagcttccagggctgcgaccgccatcaggataccgaagaaaaataaaatagtagagaaatctactttggtcaggacatcgggaatccggtatttcagaccggtcaaatctgttttcttccggttatacaggcaatcggtgtaaaaccacaaaaaacctaaggtaaacagtatgccggcaaaagggggcaggtcggtcagtgatttaaagatgggaaccgctaacagacaaaggataccgatgatcaggatacttgtttgctcctgtttaccgaggtaaagggaagaaacgccggaagttggggaggaggtggttatgctgttgcttttcaatgagtaagagaccagccataccggaattgccagcgagataacactggggagaaacaggcctttcatgatgttacctgaagtaatgttatcgttgatccagagcatgattgtggtgacatccccgatcggggtccaggctcccccggcattggctgcaataatgatgatactgccgaaaatccagcgttcgcgttgttccgacaatagcttttgaatcagcatcatcatgacgatagccgaggtcatgttatccagtacggacgacataaaaaaggtgataaaagctacgagccataacagcttctttttgttttttgtttttacagaccgggtgattccgtcgaaaccctggtgaacatcgatcgtctctacaatagttaaagcgccgatcagatagaataggatttcggagatattgcctaaatgatcgataatttcccaattaagaatatattcacgtacctgggcaagcggggagagatgctcataggccggatgctggtgtatgaaattttgaaaagcggccggatccgcccctacgatgatttgcggaccggaaaagatatacatgacccataagaggatccccaacagaagagctattgccgttttattaataccggtctgatgttcgagcgcgatgaaaatatatccgatgacgaacatcacgatcattgctgttaacatgttgaaaattttagcgtttacccttgcttgtacgtttattgttccggaagtgtttatccattttttttgtaatttttgtctcagggcaatcatcctgttgaagaaatgcgtatatttgcacaaaattcgggttgatgaaacggtttgttatatgtctattgtttttgtttacagttgtgtggagttggaacacaacggtgaattattttggcccggagaatttggttgcagaaaagatgactggctctgatgacaaggtggttcaaaagttagacgaggtgatcagtgccttgatggaagcgaatcattttacgaacctttcggtacagcctacccttagctttacttctaatattgccagacggtatcggccgggtggttttactttcgacaaatttatggagtatcagcttgaagagcgggaaatgttgctgaaaaatcatttaaaaacaactttctttttctcgcaggaatatgcggccaggcaaaaatatgccggctattatatcttttccctgcgtaaaatcattatttaattgctttgtttatatactgtcggttcactgatcatttaatcgttggttcgtttgattgaccggaggatcggtattgttgtgtgcgtggatcgacaggaaacggaccgatgaataaaacaatttaaaaatgagaaaattatgggaaagttcaaaaaacttcaggaagatatagaaaatgttactaataaagaagtagtaaaacaaacccggatttccggtgtagcgactattgtgttaattatttcggtggcatgtgccatcggtggtatgagttttgaagatccgaattcttctatgccgacatttctgtttaccgcttcggctttgttgtttctaagtggagtcattaaattgttggtcgatcgtagttgctatatgttcaaaccgaccaaaagtaaactgaaaacgatgaccatgtatttcgatgtgcatgaaagtgacaatctacaggattgtatggaaatgaagcggtttgaagatctgaaaaaaatgaaacgggaaaaagataccggtgtgaaagtggaggcaatgattgctgacgatcaaaaatttgccgcagtacagatttcagagtatatcccttattcctatgaggcggtgactcctgttatgtgttattatggcgaagaagcgcggctgctggcttcctatctgaaagtatcttaatgatagacacccctctgaagagaatttcttactcgccagaggggtgaagtttatctatgtctttgtattattttttcagtttggggagtagtgcggaaagggtagtcagtaattcttgttgcattctgaatagtttttccaaatctttgtgaaggttcatatactggtcgtctctggtttggaacatcagccggatttcctctacagctgcttccacactgtttggggccggagtctttttaggggaagtttcatcatggggtgtgctgaccatattttgtcctgtccgtatccattcttcggaaattcccaaatagttacgaaataattcccacttgattccatcgggtttcgtcttgcctgtcagataattggatatagtcgaggcggagaggttcagatcgtgtgcgatccggtatttagaaatctttctggtttctaaatattcctgcaacctttcttgttgttccggcgaaagtttttccatacgaatctttttttgatatatattgaaaataattcaagatttgcttgtttttattgcagaattgtactatttttgcaaaattgaatatacacaaatataagaaaatattaccggatttttatctgttttgataattgtttggtaaaagtagtttattgtttagttttcaataaattgtgggagtgtttgctggaagcagaaagagcgggggcgttggaaaataggtccgattatagggttttgctatctgtttggaggctaaaagaggagagttactgaaatagggtgtgttacaatattggaatattgttctgctttataatgtaaaatagtgtttaacttttttttaaccgcttgccagacaggaaaatattgtaatccatattttaaattaatagttttgtaacgcttagtttgaatctaaataataatgtaaatcataaagattatggcagaagaaaatgcaattgaaagaataagatgtgtgatcatcggttcaggccctgccggctatactgcagctatttatgcagcccgtgcgaatttgaaaccggtattatatacaggcttacagatgggtggacagttgacgacaactaccgaagtcgagaattttcccggttatccggaaggagtgacgggtcctgttatgatggaagatatgcgtaaacaggcagaacgtttcgggacggatatccgtttcggtatcgttactgccgtcgatttttccgggcatcctcataaactgacgatcgacgattgcaagcaaatcgaagctgatgcagtgatcatcgctacgggtgcttcggctaaatacctggggcttcctaccgaagagaaattcagaggtctgggagtgagtgcctgtgctacttgcgacggattcttttaccggggtaaagatgtggctgtcgtcggtggtggtgatactgcttgcgaggaggcaacttatctggcgggtctgtgccggaaagtatatctgattgtccgcaaaaactatctgagagcttctaaagctatgcagcaacgggtattcaatactgaaaacatcgaagtgcttttcgaacacaatacgctggaactttacgggtcggatatgggactcgaaggtgcacgtctgttgtaccggaaaggagaaccggaagaatgtgaaaaggacattaagatcgacggattcttcctggctatcggtcatcatccgaattccgaagtattcagtaagtatgtaaaggtagatgaacaaggttatattattaccgaaggagcttcgacccgtaccaatgtgccgggtgtgttcgctgccggagatatcatggatccggtttatcgtcaggggattgccgctgcaggttctggttgccgcgctgctatcgatgccgaacggtatatcggtgagttggaaagtaaataaaaataaaacagccgtcgtgagacggctgttttattttatcgtaaccattgtcgctccgtatccatattgtttgaaagaagcatcctgatgatggtggcgtttgtattttgtctggagttcccataaaatgcgctgccgtaagataccgtctccttttccatgaataaagattattttttggcctttccgtagtttgtattcttccatggttttccggaaaatttccaattgatattccaggatgtctttattattcattccggccgttgtttcgagtaattcatggcaatgtaaatctatctcgacgatgttaccgacaatctgtttttgtggccggggagtcggggccggtgttgtgtcctttttctcgcgtatggcctgagtgagttgtttctcatcgatttcttcggtggcaggcagatgttctttatccaaagcacggatgatgcaaatcgaatcaaaccagcgggtatgtttataaataccggatttacaaagattgacggtattgatttttacttctgcttcgatcggagttctgggtgtcgtggaacctttcttgaaaaagatagcctggatatgaacggcttttataccggcatcgatatcttttaacgagtatgttcctatcggacaagtgctgtccggattacaattaccggcactgataccgctatatttttccccatggcgaaaagcgatcgaatagagacaagtttgctgtgtatcgttaaccaaaaatagttcatagcgggaatccggtaaattgttgaaattatcggggacaatagcgaaatacaacgtatcgcccgattccatcgttacccctttttgtacctgagttacggaactactatccggtttagaaggagtgaaatcagagtggatgacgaccaggtcacttgttgaagccggtatttcgaacccatagtcgtcgacaaagatattgacggttgtattgtctatgatgccggttactttaccttccattttttctgaaatgaaacgtacgatatcacctatccttatattcatagctgtgttataaaattaaaatgggaaatagcggcattatttcaacactttgaaagtcaacgggccagaatcgtgatggtccggacaatcgtggtgttgacaggcttctccggaatcggtgagtgcgccttgtaaccaggcattgactactgcttcgacactgcccgaacatccccgtatcacccggatatggtggtcttcgagcgtatgtttggctccttcgcccatattgcccgcgagcatcaattcaacacctttttcttctaataccgaggctatattggatttgcatccacatccttccggagaagcctgaatttctgtacagacaatcagtttgtcttcactgattgtaaaaatcgtataatactcacaatgtccgaaatgatcgtcgacgacattatttcttgtcggaatagctactttcataagattcgatttatagggacaaaggtagctattaatcctcacctttcccttatttttcggggagttttttcagacagaaaaaccaatcgtagcatcgggtaccactggcaggtttgtccattcgttcgtttgccgcattgaacgagcccggggtaggagcgatcacttcgtctccaggacaccagtcggccggtagggctactccatatttatcgatggtttgcaagccgataagtacccgtttcagttcgtcgaaatttcgtcacagagccagcggataatagataatggcccggatgattccttgcggatcgatgtaaaatacggcacggacagcgttggtcgagctttcccggggttggatcatgccgtataaatgggctacttccatggtcacatcggcaattaacggaaattgaacctcaacatttttctttcctttatactcgatcttttcccggatggtccgcaaccaggcaatatgactgtataaaccgtcgacagaaagtcctatcagttgacaattcagcgctttgaattcttccgtcatagctccgaaagtaacgaattcggaggtacataccggagtgaaatcggaaggatgactgaaaagaataatccatttgccgttaaagtccagaggaaaatgaatttttccttgagtagtgactgcatcgaataccggagcctgatcgccgatccggggcatcggaatagtttcgtctgtaaaatccatgatgatactgttttaagttgtttgtaatacctgaaatacgtttttttctgccgaaaggttggaaatagtcggataacctttcttttgtggttggcgtaaaatcttgataacgaaatggtttttaatgagaagaagcatgacttttaaaattgttgttttgagtttgatgttaggtatttggggcttggatgcccggtcacaaaatgaagagccggacttttcgggacaatcggaagatagtctgatgcaggctttaggaaatataccggctttcactatatataaagataattatgtggtgaccggaacgagtttcaccggtggaaaaatttcgaaatacaattcggatgctaaatttcagattagcttacgccaccggctttaccgtaagttattgccttatcggatttatttattcctgacgtatagccagaagtctttttgggatatttaccggaaatcggccccttttgcggacaataattataacccttctttagggttcggacgtaattttatcggggagggaaggattaaaggtatcgggatggtgcagttcgagcatgaatcgaacgggcgcgacagtatttggtcgaggagttggaaccggttgacttttaccggtatttatctgatgaataaaaattatacttttcaggccaaggtttggatagctatgcaggtagctaaagaaaacagacacctgaccagatatgccggaatcggacatttggcagcgacttatgccagtgataacggacgtttgtcctgttcggccttaatgataaaacggggtgggtggaattggaatgcgaattggcgtttggaggttgcctatcgattgttcagagaagataaccagtatttatttatgcaattttgtaatggatatggcgaaagtatgatcgcctacaatcagttcaggcgttacttacggtttggatttgtgatcaaaccccgctcggtgactatattttaaaggaaaggtgtgtgattaattgtgatatttttgggcgtaatcgtttgaaattattaaattagcgggtcgaaaagtaataaatattaaatatataatgagatgacattacaagaattccaacaatctatccgggaaggtattcccgcggaattgcctgcaccgaaaccttatgatccggaggtaaaccatgcaccgaaacggaaggatatcctgacgaaagaggaaaaaaaactcgctatccggaatgccttacgctatttcgaaccgcggcaccatgctgttttggcccgtgaatttgcagaagaattagaaaaatatggccggatttatatgtatcggttccggccggattatgaaatgtacgctcataatatatacgattatcctcataaatgtttgcaagcagctgctattatgctgatgatcaacaataatctggataaggctgttgcacaacatccccatgagttgattacttacggaggaaacggtgcggtattccaaaactgggcacaatatcgtctggctatgaaatatttgtcagaaatgaccgacgaacaaactctggtgatgtattccggtcatccgctgggattgtttccttcgcataaagatgctccccgggttgtggtcaccaatggtatggtcattccgaattattcgaaacaggacgattgggaaaggtttaatgctcttggtgtatcccaatacggacaaatgactgccggatcgtatatgtatatcgggccgcaaggaatcgttcatggtactaccatcacggttttaaatgccggtcgtaagatttccaaacatggtgaaggtctggcggggaagttgttcgttaccgcaggtttgggaggtatgtcgggagctcagcctaaagcaggaaatattgccggttgtgtaagtatcactgccgaaatcaatccgaaagctacccatacccgttattcacagggatgggtagatgaggtgatcgatgatctggatgtgctgatgaaacgggtgcggcaggcgaaagctgacaaacaggtcgtttccattgcttaccaagggaatgtcgtcgatttgtgggaacggctggctgaggaagatatcgtggtcgagctgggatccgaccagacttctttgcataatccctgggcaggaggatattatcctgtcggtctttctttcgaagagagtaaacaaatgatggccgaacaaccggaattatttaaagagaaagtacaggagtccttacgtcgccatgtggctgctatcaataaatgtgtcgaacggttcggaacttatttcttcgattacgggaatgcatttttattggagtcttcccgtgccggtgccgatatcctgaagccgaacggcgacttcaagtatccttcttatgttcaggatattatgggaccgatgtgtttcgattacggtttcggtcctttccgttgggtatgtaccagcggtgatccgaaggatttggcgaagaccgatgagttggctgctaaagtactggaagagctggctgctcagtctccgaaagaaattcagcaacagatgcatgacaatatacgctggatcaaagctgctgccgaaaaccatttggtggtaggttcacaggctcgcatcctttacgcagatgctgaaggaagaataaagattgcagaagcttttaacaaggcgatcgaatggggagagatctctgctcctgttgtgctgggacgtgatcaccacgatgtgtccggaacagattcaccttaccgggagacttcgaatatttacgacggatcgaagtttacggcggatatggccgtacagaatgtgatcggtgattctttcagaggggctacctgggtgtctttgcataatggtggtggtgtcggctggggagaagtgatcaacggaggtttcggtatgttgctggatggctctgccgatgctgacagacgcttgaaaaatatgctgttctgggatgtgaataacggtatttcccgccggagctgggctcggaacgaaggtgccgtatttgcgatcaaacgggctatggaggcgaatccgaatctgaaagtgactttaccgaattatgcagacgaccagttggtggaaagtttattctgatccgatagaatagtccgataagtaaagaattcttttatagttggacggtgcatatgcagtttttaactgttggcaccgttcattttttattcttgattttctttgaaggcctttcggaccggctatcaattgtcgaacccggggcgtacgaatgtcctggctttaggaaaatactcgtcggcatcgctgcgtaattgttccaatactaccaatagatgggatatttctttttgataagccggacacaaaggttgtattattttccagttttcaatcgaacgttccaccccgataagagccactttggccgatccattatagtcttctgtcgtttttgacttattggccgtatggtagtgataaccgtataatgcccttcggattttggcttgaatcaaatccggataccagccgacgacttctaaagcctcttccagaagttcgtttttttctttatcatttattatttcgtaaagctgctccagacatttatcggcccaatattcgtaaatactacaaattcggaggagatccgaagattcgagtttttggtaaacttgctctcttggagtcccttcgtaatcctcaccccaaaactcccggtcgatattttccgaagcataaatgtcctcgacatctaatccgcgttcttcagccaattcatgtaatacttcataagtagattcgaagacttctttcaggcgtgcccaaatactttcatcttcccgatggccttcccgttcaaaattgaaaccgcctttctcctcgatcttttttcccattacaaagctcatacaccgcaactgttgttcgcatttttcacaccaacgatcgcaataattataaataccagggatgaatccgacatccacaacttttttaattttctttttggacacaattatctaagattgagttttacagacttttttagtcaaactaccctaattcttcaaagattccggactattttaccagaatacagggtacaaagatagtctatatcaataaaataaaaaaaaattttgaaaacttcatcaaataatatggttaaccaggcgatatccctctgtattattcattaaaaactattattttataaccgtcggaatgctattgattactatatcgcttctctgattcggagaatacatccgattggaagatttgtatttaaggggattttactttattttcgcgccggatttctggtaaacatcctgtttatatataaatgacgctggagtagggtttcggtatcgcatgggcagggcggaaatgattgtgcgtcgattcgggcaggcggtaaatcgctttctttttttccggagaatggactgtcggagggaagcatatccgactttgtaaaattgaatagtcgacaagtttatattcgatactatgtggttgttactggcttttgtttctgctactttgttgggattgtacgatgtggtgaaaaaaatttctttagagaggaatgcagttataccggttctctttttgaatatttttttctgttgtcttctttttttaccggtggtccttttatctgccttggctcctgacatgatgcggaatacgttgttattcttaccggctatcggaagtgaagggcattttttgttatttttgaaagctgtgatcgttttggcttcctggattttcgcttatttttctttgaaacatttgcctattacgattgcttcaccgatcaaggctacccagcctattctgactttactgggagctttacttgtttttggagaacggttgaacatttggcaatgggccggagttttaactgcagtaatttctttgtttttgctttcccgttcaggtaagaaagagggaatccggtttgcgcataataagtggatttattttatgattcttgcagtcgtaaccggttctgtgagtgggttatacgataaatatctgatgacttgtctcgaccggatgaatgtgcaggtatggtataatttttaccaattggctataatgggggttattttatttacactttggtatcccggaagaaaaaaatctactccttttcaatggcgtaatactattccttttatttctattttgttggtgctggctgattttgtttatttctatgctttaagctacgaagactcgatgatttctattatttctttagtgcgcaggagtgggggggtggtttcatttattgccggagcgatctggtttaaagagaggaatttgaaagctaagtttatagacctgcttttggttttagccggtatgtatctgatttatttaggaactcgttgatgggcgggaaagtcagtcttttctaaggaaggagaaatattaaggtagacgggcggtaactcctgatactgattttggaatctagcccgaaggctccggtcagcatacagaaaaaacggctaatccggattgaaaagctgccggtctgttcaaaaaatttttggagcgacatcagcggttttacaagcccggagaagtcgctccgaagtactttgaagatcggctctttatcgaagaggttagataacttcggcaacgacaaatgtactgccaccgatgtaaatcatatcttcggaggaggcagcttgccgggctgcttcgtaagctgctgcgacagtgggataatattcgccttgcaggcctgcttgtcttgctttttgagcaagctgttgctccggcatagcccggggaatggaagctttgcagaaataatacaccgcatcctgaggaaggatatgtaatacgctgtcgatgtctttgtcactaaccataccgatgacaaaatgaagctttcgataccggcactgttttaattgttgggtgatctctgtcaggccatcgatattgtgacccgtgtcgcaaatggtcaatggctggttggaaagggtttgccagcgtccgaataaaccggtattcgtcactacccgttcgataccttgccggacttgctggtcgctgatctttaagcctgcttgttgtaaaacgggtatagtctccagtaccgtaggaatattttttcgttgatagagtcctttcaattcactggttaaatgatcgaaatgccaaccgtttttccgtgtcagctggaaacttccgtcgatgttaatcgttgtcgtccagttgtcacttgcaaattcgatcggagtttcacaggtttgagctttttgctcgaaaacaaaatcgtaggttttgtcgcgcgtaccgatgacaaccggaataccgggttttatgattcctgctttttcgcttgcaattttttcgagggtgttccccaggagtgccatatgatcgaaggaaatatttgtaataacagaggctaaaggagtgataatgttcgtggaatcgaggcgtccacccagtccgacttcgatcactgcaatatccacctggctatcggcgaaatacttgaaagccatagctaccgtcatttcgaagaaagacggttttacccgggagaataaatcggcgtgatgccggacaaaatcgatgacatattgttcactgaccatttctccgttgattttaatcctttcccggaaatcttttaaatgaggggaagtatacaggccggttttatatccggcttgctgtaatatagaagccagcatgtgggataccgatcctttgccgttcgtacctgccacatgaatcgttttgaagtttttatggggatgtctgaaatattcatccaattgtaaagtgttgtccaggtttgctttgtacgcagcctgaccttccctttggtacatcgggagctgggcaaacaaccaatttaaagtttcctgataattcatgatttgttttttcaaaatttcaaatgttattcccggacttttcatttttaggtgaaggtctgagaacaagatgcaaaagtactaaacaaatgaaattgcttgttgaaaatccgggatttattctctttgctgtgaaaaaaaaattaattttgcaggttataaatagattatttatgaaagctgatataaatgtacctatacctgtcttgagacgtatgccttcttatctttcttttgtaaagactttacaaaagcagggagagaagtacgtgtcttctacccggatagctgaatatatggaaatcgattcgactcaggtgacgaaggatctttcccataccggtatttcgggtaaaacacgggttggatacgaggtggacagttttgtgcggattctggaagattttttgggttttagccgggtggacggagcatttttggtcggagccggttcgttggggagcgctttgctgcaagataaaggattgtctgctttcgggttacagatagaggctgccttcgatacggataaaacgaagatcggtacaaaagtcaatgatatcgaaatatttcatatcgatcaattccgtgctatggctgccgaacggaaagtggtgatcggtattattaccgtccccgccgaacatgcacagaatgtagccgacttgatggtcgcctggggtattaaagccatctggaattttactcctgcccgcataaaggtccctacgcatattgtcgtgcaaaataccaccatctatatgaacctcgctatcttgttcaataaattgtacaacgataagggggaaaaaaagtaaaaggttaaaagctaaagcctatcgtctttaactttttacttttacctttttaccttttactttttttcttatctttgcaccttattaaaaataagctgcgtacgtagcgtagtaataaaataaacgactatgataaaaattaaatttccggatggaaatgtaaaagaatttgagtcaggtgtgaccggcttggatattgcccggggaattagttccaaactggctaaggaagtgttgtccatatctgtgaatggggaaatttgggatttgacacgtcctattacagcagatgctgaaattaaattatttacctgggatgatcaggaaggaaaacatgctttctggcattcttcggcccacttgatggcagaagccctgcaacaattatacccgaataccaaattcggtatcggaccggctatcgaaaacggattttactatgatatcgatccgggagaaggggtcgttttgaccgacaaagatctggaaaccatcgagaagaaaatgcttgaattggcgcgccagaaagaagagtattgccgtatcaatgtgagcaagcaagaagcactggagcatttcaacagtatcaacgaaacttataaagtggagttaatcaacgatttggaagacggtaagattacttattatcgtcagggctcctttaccgatctttgccgtggtccgcacttaccggatacttcttatattaaggctataaaactgaccggtttagccggtgcttactggagagggaacgagcataataaaatgttgacccgtatctacggtatcactttcccgaaacagaaaatgctggacgaatggctggtattgatggaagaggcgaagcaacgggatcaccggaagatcggtaaagaaatggaattgtttactttttcccaagctgtgggtgccggtttaccgatgtggttgccgaaaggagctatgttgcgcgaccgtttggagggatttttgcggaaagtacagaagaaatacggttaccagcaagtcattaccccacatatcgggaatgtgaatctgtataagacttccggacattaccagaaatacggaaaagatagttttcaggtgattacgactcctcaggaaggtgaagagtttatgttgaaaccgatgaactgtcctcaccattgcgagatttataaattcaagccccgttcttataaagatctgccactgcgttttgctgaattcggtacggtgtatcgttacgagcagagcggagagttgcatggtttgacccgggtacgtggatttacgcaggacgatgctcacttattctgtacgcccgatcagttgaaagaagagtttaaaaaagtaatcgatattatttttactatctttaaggcgctggatttcaaagattttactgctcaggtatctttacgtgatccgaagaatacagagaagtatatcggtacggatgagaactgggaaaaagcggaacgtgccatcatcgaagcggctgaagaaaaaggcctgaagacgactgtcgaattgggcgaagctgctttctacggaccgaagctcgactttatggtgaaagatgcgattggacggaaatggcaattgggtaccattcaggtcgattataatctgccggaacgttttgatctggaatataccggagctgataacctgaaacaccggccggtgatgatccatcgggcacctttcggaagtatggagcgctttgtggctgtattgatcgagcataccggaggaaaattccccttgtggttagcgccggatcaggtagttgtgatgccgatcagcgaaaaattcaatgattatgcccaaaaactttcggatttgttaaataattccgatattcgcaccgttttagatgaccggaatgaaaaaataggacgtaaaatccgggataacgaattgaaaaaaattccgtatctattgattgtcggagaaaatgagatgaacaacaacaccgtttctgttcgtcggcagggacaaggggatatgggaacgatgtctgtcgaagactttatttcgaagataaatgaagaagtaaatagtcagttacagaccatttatagttattgataaactaacttaaggaggatttaatatagcaacaagaatggaattcagaggctcaagaaatcaggttaataaagaacctcagcacagaattaatgagtcaatccgggctgctcaagtaagagtcgtcggggaaaatatcgaaccgggcgtataccctttacgtgaagctttggcgatggcagaagctgccggtatggatttggtggagatctctccgaacgccgagccaccggtgtgccggattattgattacagtaaattcctgtaccaactgaagaaaaaacagaaggaaatcaaagcgaaaagcgtgaaggtcgtcgttaaggagattcgtttcggaccccagaccgatgatcatgatttcaattttaaattgaaacatgcgaaggaatttttgcaggaaggtgcgaaggtgagggcctatgtattctttaagggacgttcgattttgtttaaagaccagggggccgatttgttgtcacgtttcatcgctgaactggaagaatacggaaaagtggaagctgctccgaaactggaaggaaagaagatgatcgtggtgttggctccgaagaaataatgctcaggatagcggtgaaagccggatagttatatttttctgaaacacaattaaattacgagaagatgccaaagatgaagacagtgagtagcgcgaagaagagatttactcttaccgctacggggaagattaaaagaaaacatgctttcaaaagtcatattttgacgaagaaaacaacaaaacagaaacgtaatcttacgcatgttactacagttgacggacataacctgaaagctgtacggaagatgcttgttatgtaagaattactaagaaattattttattaaccggaatgttatgccgtaagtttctccatagagtgaacgctgacattcgaaaaaaagaaaattatgccaagagctaaaaatgccgttgctgcaagagcacgtagaaaaaaggttttaaaacaaaccaaaggaaactttggtgccagaaaaaatgtttggacggttgccaaaaacacatatgaaaaaggtttgacatatgcgttccgtgacagacgtaaaaagaaatcagaatttagagcattgtggattcagagaattaatgcagctgtccgtctggaaggcctgtcttattctaaatttatgggtctgattcataaagctgatgtagacatgaaccgtaaagttctggccgacctggctatgaatcatccggaagctttcaaagctgtagttgcaaaagcaaaagaatttgcgaagtaatgataaacgaatatcctgagggaaggctgctgtgaagcagcctttttctgtttatagattttataagacaactgtaacttacttgaaaaataaatgttaactttgaccctataaagtctttttgctttatcgtggggtttataaattttagaaacaaatatatgcgtatagctttgttgggatatggtaagatgggaaaaatgatcgaacggattgccatagaacgcggacatgagattgtattgatagtagacgagaataaccgggcggcttgtacggatgaacaactgaagcaggctgacgtcgctattgaatttacgatgcctgctgttgccgttgaaaattataaatggtgtttcgataacggcgttccggtggtttccgggacaaccggttggctggaaagatgggatgaggtggtggcttgttgccgggaacaacaaggtggatttttctatgcctcgaatttcagtatcggggtgaatattttctttcagctcaataaatacctggctaagatgatgaacggatttaacgactataaggtatttatcgaagaaacgcatcatatacataaactggatgcccctagcggtacagcgattacaatcgccgaaggaattttaggtaaccacgacggttatcgttcctggcaattgaacgaagggagacaaatgccggcagatgtattgcctgtaacggccaggcgtatcggtgaagtgcccgggattcatgctgtaacttataaatcggaggtcgacgaaatagaaatccggcattcggctgtatcacgtgaaggttttgcccggggagctgtgctggctgctgaatttctgaaagggaaaaacggtgtgttgggaatggaagatatgttgaaattttaatggggaaaataattatcatatgaaaaatattttgacgaataaatggtttaaattcagccttgtcctgattatctacctgttgtgggcttattgggttgggagctggtggttgttgatcctggtgccggtgattttcgatatctacatcacaaagaaagtacattgggcgttttggaaaaagaaaggcgtagagaaacaaaccaaaacggttgaatggatcgatgctttgatttttgcggtcgtggcagctaccttgatccgtatgttcttttttgaagcctatacgattccgacttcctctatggagaagagtatgttggtgggtgattacctgtttgtcagcaaagtagcctacggacctaagttgcctaatacccctttagccgttcctttcacacaccatacgctgccttttacccaaaagacaaaagcttattcggaagccattcaatggccctacaaacggattgcggggacgactgaaatcaaacgaaacgatattatcgtatttaattttccggccggagataccttgatcgtaggatctgaaaatcccgattattatagccagattcgtacgaatgcccggatttttcaggcacaggatcccggattatcccgggaacaggccgagaagctggtgagagaaaaaatgtgggaacgatttgagatcactacccgccctgtcgataagcgggagaattatatcaaacggggcgtcggaatgcccggggatattctggagttgaaagacgctcagttgtatgtcaatggaaaaatgtccgataatcctgaaaacttgcagtacaggtatgaggtgagaaccaatggtacccccttgaatcggatgaaacttcaggatatcggattgtcgctggaagatatcggtattccttctacagtgaactatttcccgttgaccttggaaatggtggagaaattgaaaaaattccccaatgtggtcgaaattaaccgaaccaaagaggtgagccctaatccggatatttttcctttcgataccttgaattatccttggaatgtagataatttcggacctttgtatgtgcctaaaaaaggagataaagtggagttgaatatgaagaccttgcctttgtatgcaaggatcatcggtacttacgaagaaaacgatttacaggtaaaagattctgttatttatatcaacggtgaggtagcggatagttatacctttaagatgaattattactggatgatgggagataaccggcatagttcggcagattcccgctactggggattcgtgccggaagatcacgtagtcggaaaagcttatttcatttggttatccttggataaagataaatcatttttcgacaagatccggtggaagcggatgttccggtttattcattgacggaaagaaaatgaatgaaacagtaacaatcgatcaaacttttttgcgcatatgaaattagaatttatcgattgttactgttttttgttgtcacagttgcaatgggaaaaattgattctttttcaaaaagaaaataggcaggaaaaagaatgtaaagttaattaagatgaattctgataaaaggaatcgtaaaaaatcagattgaaaggatatttatgtatttttattcgtatcttaccataaatttctaaattcatacaacaatgactgcaaacgaaaaaaagacatttgtgttggatacgaacgttattctgcacgattaccgttctatttataattttaccaataatgatatcgtcatccccatagtagttttggaagaactggataaattcaagaaagggaatgacctgatcaattttcatgcccgtgaatttgcccgtgagttggataaaatttccgaaaaggatttttttgataaaggggcagctttagggaaaggacggggaagactatttattcagccgggagtgaaattttctcaaaaaatgaaggattccttcagtgatgatactccggatcaccgtatactcgctgtaacagagtatatcagtgaaaaaatgaagggacaaaaggtgattctggtgactaaagatatgaatctgaggatgaaagcccgttcgttgggattgcaggccgaagattataaaacggatcaggtggaggatctggattttgcaatcaaccgtagtgtccgggaaatcgaagggatagatacagaagtgatcaacaggatttatgaaaatgcaaatggggtagaggtggaacaagtgtttccgaagcaagagctcaaaggcaataattattacgttttgaagaatgggaatgcttcggttctggcttgttatgatccggtaagaagagtgatccggaaagtggaaaaaccgaatgtgttcggtatttatcccaaaaatgcagagcaggcttttgcggtagatgctttattgaatcctaacatacaattggtggcgatcagtggaaaggcaggtaccggaaaaactttattggccctggcttcggctttacagcagaataaacagtatgaatttatttatttagcccgtccgatcgtcgctttatcgagtaaagacctgggctttctccccggtgatgtcaacgaaaaggtagatccgtatatgcagcctctatatgataatctgggttttatcaagcggcggtttaatatccatggggctgaaaatcgcctgatcgaagagatgcagaaggaacagaaactgatgatttctgctttggcttatattcggggacggagtttgtcggatgtttattttattgtcgatgaggctcagaatcttactccccatgaagtaaaaacgattattacccgggcaggcgaaggtacgaaaatggtatttaccggagatatcgatcagatcgattcaccttatctggataagaagtcgaacggactgtcgcatttgttcgataaaatgcagggacaggatatttttgcccatgtacatctggaaaagggagaacgcagtaaactggctgatctggcgagcgatcttttataggaaatagagcgctggagcttggctttaccgttatccctgaaagagacgtttaaattttgacattggaactgctttttccctatagaaaaattcggtaaaaattgctatctttatccccactaacgagaataaagatgagcaagaaaatgcagttcgaccgggaagattatctgaaagtaaaccgaaagctatcccgggaagaagagatcaaaacacatggacgtccggttcggatcggaggagtccacaagtcgaaaaaggtctacgaccgcaagcggagtaaggcagagatgaaaaaggctctgccttattttttacttgttattcaactgtcgatttctgcttcggggataggaagacggtaaggttccggtacatttatttatacgtgtatgagaaggggataggttgagattggcggtaagtaatttttttgtaaatttgagaaacttattcgtataataaaataattagcttatgaatgtatcctatctttttttggctccgggtttcgaggaaatggaagctattgctgttgtcgatatactccgtagaggaggactagatgtacggacagtatctgtcggtggaggtaatgaagtgaccggtgcccatcagattactatccgtgcggatttgtcattggaacaaattcgaccggaagaggctgaatgcctgattttccccgggggaatgccgggagcccagcacctgagtgaatgtgaaaaattgatgacgatcctgcaacatcattacgatcaggaacgaacggttgcagcaatttgtgccgcacctgctttagtattgagtcatttgaaaacaaacagaaaactccgggtgacctgttatcctggatttgaaaaatatctacctgatttcgaagtcgtgacagatggagtagtcgttgatggaaaaatgattaccggaaaggggcccggatttgctatcccattcggattagccgttctcgaacagctccgttcggctcaggttgctggtgacgttgctgacgggatgttgttgttataacgtgatttattacgtggaacaactcctatttatctcctatatatcccttatttccgacgttattatataggaatgaggggataattcctagcctgaagctttttataccggtagatcatccacaaaaataagaaagccaactaattcgcaatactttaagtatgaattagttggctgatgttttattatttactgaatatccctttttagggtatactagtccggatttttagccggtttataaatctttttaccgtttgtaacacatgctgacgcaattgccgcatacattttcatatagggtggtacgttcttccactgtgccgttgtctgcaagtttcagtatatgaatacttccctttttacctgtagctccgttttctgatgatacgacatacaaagtgttattataatcttcgtttggaaaataactggcataaccatcgtaatgaggaacatattccatgtaaatccgttcaatagtggtttgtactgtattcccgttgattttgaccgtatctgtatcgtaaatagggaaacaacgattactgttcagatcatattgataaatttggcttccttttgtaaaatacaggaaaggtcttgcgacggacatggcatatccggcagattgttcgatgccttccgcttcaggagtaaggttgacccgggaaagcagacgcatgggagaattgctatagaaatcattgaagttgcttaaagtgaattccagtttttccaattgtccgtttgtatttttaaaaataccgcatccccgtttggtgttatttcctgtcggagctgcttcggccatataaaccaactgcaaaccgaggttggaaggatcaaagttttccgaatccgactcaatagaagaaaaggtattgtccaaactcatcatatttcccttgatattcagaaaacgtcctttttggttgtcgtagaaaagatagtttcttccattgacaaccgcatagggcgagagttcataatcacccggaacagctggattgaattgcaggccgtatcccaacatgtctgcagctcccagtaaacgcccatgcagtttaccgttattgatgataaaatcggccattgttccataaccagcaggatatactcctttgtaataggcttgtggattaataacttgcggtgtaatataaaacaaatcttcaaaagttgaggaaacggtcaaatccgcattattcagcgtcacccctcccgaggttccgttgagtatgagcatatcttttaatttcatgatttgagttgtcgaggcgtcggcgactataaccggatgggtacccaattcatgtccgttgtccgctccgtatacttccactaagttgccggctgtatttaggaataccagattcggagttccgtcgacttctcccagtaccataagccccttatcgaatttgcctgttactgacagagtgaaattagatttactgctcagaccggtttctttatccgttacctttaggtagatggtgtaatttccaaccgataaattgacgttgtaaaccaatttttcttctaacgataaagtatctacttccagatcattgttcgtgtacctgtaccagcaatattccaaaggagtttctttcccggaaaagctgattttaggttcgacttccaattgatggtaaatctcgatcgtccggtttttcaaggtatcgatagtgatttcatggagtgggttataatcataagtccctaaatcatccatacaggaaatgcctaaaaagggaaatagacagagatataataattttttcataatcattctatttaattcatccaaggttcgattctttgtccgtgttcgtcatagatttcattttctgcaaagaaattattcatttgcattccataggctgttttttgagtacgattcagattactccattccatataatcttcaaatttcacaaaggtgttcaattttaattcagaaaggatatatcggtgtttcacccggctgtaggggccgaaataactgctgtaatacccgtcccaatacggaatggggggtaatcggttagagctgacgatagttgcttcttgccggtaagaaatcccggtggacatatacgctgcaggttctaattgtaataccaattttaccgataatgaatcgagttcgggactgtaattcagcgttatgggtacattaagcgagtattcgtctttttttatttcatagaattcttctaaaggctgatagtgtttgttgacaatagcagtggtttgactggagtctgcttttaaacggaaacgataattttgaccggcataaccgttaagttcaaccggaagatttacagtgatgtaactttccgaagtattcagaaatgaacaggcgatactgtccaattcgttgtcagataaagcaaaatgcatcgtagtactcccggaaaacaacttctgttggtcgtcgttacagctacctgctatgtagagcagaaacaataatatggtaaatatatacagtgttttcatgactttattattttgtaatcaggttgccaaattctttttcatcatcaggtaatgggaaacagaagattttccggggattttcgatattcaatgcacccggaatatcggtgtagtctttccgtttcagaaagaaaaatagttgtccttcggccagaaacgacttccggtattctttgaacaattcctcttcaaatacacaattctctttcgtcaggtcgaaagctgccggtatgccgtattcatgccggactgtattcaggtaatccagcccttttgccggctctgactggcattctgcacaaatgtattgtatctcagtcattcggagtaaaggtatgccttgattcatcggaccgttttggttgtatttgctgacgaaatagcgtccggtattcgcatcgctttcgatagtattcggattcaatatgagccaggaagggatacgtttgtcggatgattcgtatttttctgtttcataaaattctttccgttgattctgagacagggataattgtgaattgttttcagaatttgctgtaaaatagtcatccgacattgttggtatcttatcggagtatagccggaacaatatccggtttgtacccaataacggatgggctattaattcattggctatatttccggcctttggggtttgtccggcccatagatatacccgggccatcagggcttttaccgcataatagttcattctttcctcccggttccggagaaattcgtcttccggttccgtattatcggctgccggtccgaatggatcgctgacttccagtaagctcagggcttcttcacagtcttgcagaattttttctgtaacggccatattggtcagctgggggaaaggagtgcgcgtaacccggtctacataggggatagccgcagcatttgcacctacggtaaaagacggtgcaaacatgcgtagcagatcgaaatgcagataggctcgcaggcctagagtctctccccggatcagttcatagttatgcccactgaaaagctcctgacggccctccatgttttccagcagattgttgcagttcataatggttttgtacatcgttttccaaatggcatcgaacttagattttaccgtagaggcttcgtaattatatatcgaagcattgtaaaaattgtggtaattgtcgtttattgtatagtattgggccaggacatccagcaaactcattgtcagctcctggccgtaaagtgccggagtggccattgtggtatatataccgaatagggctgttttgtatccgttttcgttttcaaacaggatatcgtttttcacctgacttttgggatttacgtcgaaccagttttcacaactcatgaaaaattgtgaacaactgattaagaggctgaggattaatatctttttcatgagattgattttaaaagattacacgtaaagaagttctgaaagctctcgcaaacgggtagtcgattcctcgttcggctttgatggaagaagcccggaatacatcgttcatagaaaacgaaatacggatattttccatccgccatttgcgggtgaggggtgtcggaaagtcatacgataggtttaatgcacttaattgcaaataattataatcttctacgaaccgggaagtcggtcttgtctggctttcatccttaacatccttgaagaaagtgatgtctccgggttgctgccatctttgttccaaaacccttcggtccgtattatagcgtttatcggcattttccaccctgtctaccagggtgtaattgtaattttggccgccgattcgataagtgaaataaagattcagttgcaagcctttccagccggcattgagtcccagattaccttccaggtcgggatctgtacaaccgataacccgttggtcctttgcctgccaacgatctgtcagacttccgtcggctgccaggtaggtctcttttccgttggccggattgatccccagagaaggcatacctcagatggaattgatcgattcgccttcaatataccgtactttgggtacattaagattttcatcacttttatcccaggcttgattccaggcttcgaggctattggagattttcttcaggatgttggtattgtgtatgccggatgctgtcagattgagccaaagatcttttttcttcagtatacccaggcgtacttccaattcataccctttattttcgatttctcctaaattttcccgataggtaccgtatcccagagagggaggcagggttacgtccgtcaacaagtttttcgatctgttttgataatagttggcggagagggctaaccggtcaccgagcacggaaatgtccgtgccgatattcagctggttggtttgttgccatttcaaatccgggttacccaatctcatcatcatagctccgatattataccggtaacggttttgggtataatattcgtacatgataatcgattgatagggttcaaaggcttgtgaaccggtcataccgtaagaggcccgtatttttaacatattggcccaggtccagttttcggcaaatttttctttgtggatattccatcccagaccgacagaccagaaggtcgcccatcgtccgtccgatccgaacttggaagaaccgtcgaatcggatagaggcatccagcaggtaacaatcgcggtaagtataaccggcatttccgacgaatcccatcagacgggaaatataatcttcgcctgtcggcaggtattcttttgcattttgggctgcaaaagtgataaaatccagtttttcatccggaaaaccttctgctctgacagtatagacttcgccttcattgccttgaatattccaggctatattcgcattcagggtatgattctgtatttgcttgaagtaactgagcacgacgttgccgtcatagaaaaattcttttcctgaggtagcctgataatatccccgtctgtaatagttgtcatcggaataattgacgaaatctgtatgatccgccggtttgaatacagtaccgtcgtttttttttgtgacggatggcaaaattaccctttagcctcagattggcattgatataccagtcgatcccgaaattattggcgaattcactgtaagaagtctcgtcgatcacattcagggtggtattgtacagcggattaatcacgcttttccgtcccaatatatccgagttggtttccagttctttgaggtagttcccgttttcatcttggtaagggtaatagggattcagggtggcgtattctctgaaactaccgtatgggctattggtcgatttgacattgtcgtaagtcatgttgttacggaaagtcaggtttttaaaacggtatagaagcatggttcccattcccattcgttgcctgccggattctttcatcacgccgggaacattttcataggtcagatctaaagaatagcgcatggctttttcgccgccttcaacagacagggtgtgtttatggccgatagctacttccaggggtttatccagccaataggtgttatatccctgttgcaccagccccagtcggtagttgtaatctctttcccgggcttctgtctggtctattgttccgaatggatcaaaatatccggcagcttttcccaattgtaatttttctgttgcattcagtaaatcgtaatcagtcagatccggaatattgaatgaaacgtcgagattgtaaagtaaccggagtttaccggcttccggttgtttggtattgataacgaccacaccgttagaagcccgggaaccgtagattgcagttgctgccgcatccttcagtatggtcatcgattctatgcgcatcggatcgagatcgaataccttttcagctgtcacttcaaatccatccatgataaaagtaggcatattcggactgccgacgaaggaacttgtcaattcgttggtcgaaggcatactggccgttccccggatttgaaaatcaggaatgacattcgggttggaaccgtccaggttgttttctatcattttgaacgaagggtcgaggatggaaagggcagagagtaaatttaccggatttacttgtttcagttcttcggccgtataacttttttttcataattttgtaatacttaagtttataaaatgcttgttgtcgcaagctttatttaaagtgggaatgttgtcgcattcccgctttttaataagtcgatacggtcactgttcttcctttaattgtaaagcgtactttttccagtatttccagtttacagagaaaatcctggattcggtcgtaccgtttgagttcgcctgtaaaatgtatgtcttttaaattttcatttgtataaaaaatgtcgatgttataccagcgggctaaggtgttcaggatattttccaacggttggtcctggaatataaaaattcctttgtgccaggctgtaaataaggtagtattgacttttgcaacagtcaggttgccgcctttcaggcaggattgttctcccggggttagaatcacttcttgtcccttggaatgtatattgacttttccggtttcgagagtagtcagaacgacagattcgtttgcataggcccggatagcaaaagaggttcctagtactctcaggttttgttgttctgttttcacgataaacggatgtaaagaatcaggagccacttcgaagtaagcttctccctttaagaaaacttgtcgctgtttttctgtaaaaacaaccggatattccagttctgtttcagaattgagccatacccgggtgccatcggctaacctcagtatatattcccctccccggggaatagtgattttatggtatgcaggagcggttgtggtatcggttttagggtataccagagtattcccttcgagtgttgctgttgtagcttcaagtttgtttttttctgtaatcggagacaagaaaatatcttgaccattcgacagtgtcaggacggcctgatatgttccgggaataatctccgtagattgaatggaggtatttttctgctctgatttgagatacaggctgatggaaaggacgaaaggaaggagtatggctgctgccgcatatcctattcgtctccatttccgaagtttcctttttcttatgtgggaacgaaaagcttgatatttctgccggtaattgtgttctgacgcttgttggcagaagtggtcgaatccttttcctgcgatgactttctgataaaagacttggttactttcttgggaggtgatccattcccgaagtgtcgtctcttcctcaagtgtcagttctttgctccattgtcgaatgatcaggtctgcgatcttccaggggattggtgtgtccataaattatttagcctttttt

SEQ ID NO: 5991 - DNA, 241 bp, Unknown
  gut microbiota DNA sequence
cttgcatgtgttaagcctgtcgctagcgttcatcctgagccaggatcaaactcttcatagtaataaaaactttaaaaattatctctttcgctcagtcattatatccgttgaatctcttctcggactcgcacttgctgtttgttttcaaacctttcaatatctttaagaactctttttgcttctcttttacccgccccacttaggaggcgaaagcggatgcaaagataaatacttttacata

SEQ ID NO: 5992 - DNA, 937 bp, Unknown
  gut microbiota DNA sequence
attttcacgccattgatttcattcgggatgtagatttcccgtgcgccttccggggagtcgggattgtagcgggtgtaggacgggcggcctgtcgcctcgtcgagtttcacgtaggaggagaacagttccccgtccttgcgcttcatgccctccacgaagatggccttgccctcgttcaggtcgtcaatctgcttcttggtcagttcgacgcctcccaaagactgccggttgaagagcttgtcgttctcgaagatgaattccacgcccctgcgctcggcgttgacctggaggtgggcgtcgaacgggttgcccgatctggctgtcattccttcgacgaatatcttcttgccttcccgcaggtcgttctgctcctgctcggtcagttcaactccgctgatttcacgcggtatgaagacattctcggctttcatcgccaccacctcgttggtcagcttgtcgatgctgacgaaagaggggacatactcgccgttgcggttcttcagttccacgacacgccccatgttgcccgtctcaagcaaatttttcttgtcctcgtccgagaagatgtgcccgaagtagggacggtcgaggtcgggtttctgccggataccgtggatgcccagcacgatgtctccggagcgggactgctggaacgagagcctcgcgtcggtgcgtagcacggcggagccgaagttcatgctgatgggcacgacctggttggtcttgtagcccctgagcatctggtcgagcagcccccgttcctggagttcttcacgggagagcccgaagttcttcagctgctcccagttgatcatggactcgttgtagcggtactggggctgctgctgcgtgccgtcaccttgggcggcctgctgctgtgtttcgtttttctttgccatttcttcttgattttgatggttgatactttggttttcct

SEQ ID NO: 5993 - DNA, 4715 bp, Unknown
  gut microbiota DNA sequence
cgagcagttttacttccggatgattaccggcgatagctgctgctgccctttcgcaggattggcggcgtttgttatagggtgaatcgaccagttcgtgtttggtgacagaatcgatcaatactaatttatagccttgtggatcgaaagggatatattcatattccatcgtactgcaatccagacggatcaggttgcctgctttaccgaaaaccgatgcaaattgatccatgataccacaatttaccccgcaataatggtgttctgttttttgtccgatcagtaccaattcttttttatcgaatccggccttgtaaatctcattcagagcaaaagcaaaagtactctcgagggctgccgatgatgaaagaccggctccaagaggtacatcacctgaaaaaacggtatcgaaacctttgatttgtgccccccgtttcagcatttcgcggcatactccgaagatgtaatgtgcccaggaagcttcgggtttatcttcttcgttcaggccgaattcggcataagcttgcaggtctgccgaataggcccggactttgtctgtcccattgggtttgatttctgctaagatgcctttatcgatggcacctggaagaacacatcctccattgtaatctgtatgttcgccgatgaggttgatacgaccgggcgagaaatacaacattccttcggttccgaatttttctttgaatagatttcttacgatacgagtatccatgatttctttattgttataaatttattaatggtgtgtcttaatctgttgcctgttgctttcgaaaaaagttatcgtttgcgtcaggcttcttgctttatcataaaggagcgcaatttatgtaaaaaaagcagattttacaaatgttcatcgggatctgaatttatcgtacttttaataataaggagtacgacgatggcgtcggtgatatccgggtttttatttaaaaatagtctaaattacttttggtaatcagtagatatacagtgatttattgaaaatatttcaaagaaagttgtaaaaaatgtttttaaagtgttttgtatacactatatttgaagtgttttttaaacacttatatgggcgtttcaaaagtgaatagtcctgaaaatttgaacatactaaaatgaaatctaaatcataaattatagcaaagattatgaaaacgtttgtattgggtttggtggttgttgcaggaatcatgagttcttgttccccaaaagcgaaggaagagacaactctttccggactgaatccgaagaagtttcaggcagagatcgatgggaaacaggccggtctctatactttgaagaattcggccggaatggaagtttgtatcactaatttcggtggccgtatcgtgtctgttttggttccggataaacatggcaataggaaagatgtggtattggggttcgatagtttggcagattatcggaatatacccagtgattttggcgcctctatcggtcggtatgctaaccggattgcacagggaagaatcgaaatcgatggcgaaactattcaattgccgcagaataactatggacattgtttacacggggggccggaaggttggcaatatcagatgtatgaagctaatcagatcgatggtacgactctcgaactgacccgtttttctccggatggcgatcagaatttccctggaaatgtacgggcgaaagtgcgctttcatcttacagatgataatgctatcgatattcagtacgaggctgtgacagataagaaaacggtgatcaatatgacgaatcactcttatttcaatttgtcgggtaatccggctgttgccgctacggatcatttgttgtatgtgaatgcggatgggtatactccggtcgacagtacctttatgacaacgggtgagatcgttccggtggccggaacgcctatggacttcattcaaccgaaagaaatcggacgggagatagaccgttatgattttgttcagttgaaaaatggaaacggttacgaccataattttgtattgaacactaaaggagatctttctactgtcgctgcccgtttgtcttcgcctgagtccggtatagtactcgaggtatatacggatgagcccggtattcaggtgtataccggtaacttcctcgatggaactgtgaaagggaaaaaaggggtcgtttataaccaacgggcttctgtttgcctggaaacacaacattttcccgattctccgaacaaaccccgatggccgtctgtttacctggaaccgggccagacttattccagtcattgtatctataaattttctgtagagaaataaagtgtatcgctaaatattcatttttaaatatcattattgtgggaacattagattatatcgtaattgccctttttgcgattgccatgattggaatcgttgtctgggttttcaaacaaaaacagaaaagttccggcgacttttttctggccggacgtgatgcaacctggttggctatcggggcctcgatttttgcctcgaatatcggttctgagcacttgatcggtttagccggtgccggtgcttcgagtggaatggctatggcacattgggaaattcagggctggatgatcctgattctcggttgggtgttcgtgcctttttattccagaagtatggtgcttacgatgcccgaattccttgaaagacgttataataaagaatcccggacgattttatcggtaatctctttggtcagttatgtcttgactaaagtagccgtgacggtatatgccggaggtttggttttcaaagaagtgttcggtattcaggaactatggggaatcgatttcttctggatcgctgcgatcggattggtgctgttgactgctttgtatacggtgatcggtggtatgaaatcggtgctttatacttctgtgcttcaaactccgattttgctgatcggttctttggtgattctggtgttgagtttgaaagctgtcggtggctgggatcaggtgttggaagcttgtcgggtgactccggtaaatgaatatggtgattcgatgatcaatctgatccggagtaaccgggatgccaatttcccttggctaggggtgttcatcgggtcttctgttatcggtttctggtattggtgtaccgaccagtttatcgtacagcgtgtattgtcgggtaaagatgaaactcaggctcggcggggggctatattcggtgcttatctgaaactgacgcctgtcttcttattcctgattccgggaatggttgcttttgctatgcaaaaacacggtattaccgtgaatggggaaacatttacgatgagttccgccgatgctgcattcccgactttggtagctaaattattgcctgccggttttaaggggttggtcgtatgcggtattttggcagccttgatgagttcgctggcttctttattcaactcttccgctatgttatttacaatcgatttctataaaaaatacagaccgaaggcttccgaaaagactttgctttatgtcggacgtgtcgctacggtagtggtagtcgtgttaggtattctttggattccggtaatgaaaagtgtaggatcggtgttgtataactatttgcaggatgtacaatctgtactggcaccgggtattgcagcggctttcttattgggtatttgctcgaaaaaagcaactccgaaaggcggtatgtggggcttgatcgccggatttattatcggtatcacccgtttgggggctaaagtgtattatacctcgggagcgactttcagcgattcctggtttaaatatctgttttacgatacgaactggttgttcttctgtggaggtatgttattgttctgtatgctggtgattgtggttgttagccgtttcacaacaccggcacctgcagaacagatcgtcggcctgacattcggttcgacgacagacgaacaaaaggcggttacccgtgctagctggaacaaatgggatgtcatccattccgctatcattatcctgattaccgttgtgttctattggtatttctggtaataaattaaaatagtagttatgttagaagcattgaaaaaagaggtttgtgaggcgaatctggaattggtgaagcatggcctggttatttttacctgggggaatgtcagtgctatcgaccggacatcgggcctggtggtgatcaaaccttccggtgtagcttatgaacagatgaaaccggaagatatggtagtagtggatttagacgggcatatcgtagaggggagtttgaaaccttcttcggatactccgacccatctggtgttgtacaaggctttcccggcgatcggaggagtggtgcatacccattctacgtatgctacgtcatgggctcaggccggtatcgatctaccgaatatcggcaccacacatgcggattatttcagtgggccgattccttgtacccgggatatgtctcaggcggaagtcgaaggagcctacgaggaggaaaccgggaatgtgattgtggaacgtttccggaagttgaacccggaatatatccccggagtactggtcaaaaaccatggtcctttttcctggggaaaagatgcacacgaagcggtacaccatgctgtggtgatggaacaagtggctaagatggcttttgtggcatttacggttaacccccgtttatctatgaatccttatctgattcagaagcatttcttccgtaaacacggtccgaatgcttattacg

SEQ ID NO: 5994 - DNA, 12204 bp, Unknown
  gut microbiota DNA sequence
attacaacggtattttaattcgtttagtttagtttagtttagctaaaagggggatatacccccttttttatcgggcttctgtttcgtccagtaatccccgtccggcttttacaatttcattcgtgtctttgagtaaagccactgctttgtccaatactccgttgataaatgctccgctcttcggcgagctataggttttagagatttcgatatattcatccaaagtcactttcaccggaatggaaggaaaatgttttaattcggaaatcgcacatgacatgatcagtttgtccatttccgagatacggtccaactcccaattataggtaaacttatcgatgatctccatattggcgttatattcataaaatgctttacgcatcaatgtccttgcatattcgaaatcttcgtcttttttataaatcgggtataaaatatcgtcttcttctctcattttttcctgaagatgccagagtgttttatatacaatgctgagtaccagttcaaaatcatcgttccagaagatactcttttcttccatcgtttgataaaacatctcgtcctgtatgatcagttctgaaaataaatcgagtacgatctgtttgtgctgctcgaaagagggcgatttctggtgcatgtatttctgatatttggaccactcgatcagtttattgtagaaatacaataccgtttcctgattatcgttccaactaatcaggttgtttgtaatatagtactggaattttttgttattttccaagatattgaaaaccggattatcgatgaagcgggtattcggattcagatcgacattagaagcgaaccggcggttacgtgctgtatctattttttgaaaagcttttcggcggacttcagtgattagtaacaaagtttcgtagtacaaatctgtacttttagacatacttttcagtagatcgcgttcaatctcggcgagagtagcactttcttttttgctgtaagcgtagagcagttgcaatacttttattcggatcaatcttctgcttgtcatttttatgaagaactataaatattatgtcgattttgacggcgcaaaagtatgaaataaaatgaagaatgaaaaatcgggaatgaaaaattattagtatcgggagaaaactttatatttgtactatgatatcattctatttatgttaaaacaacgtctcttctatttctgtttatttattcttatgagctattttgttacggctcaagagttaagatgtaatatttccgtttcttcgcaaaaaatacaagggacgaaccgggagctttttaccaatatgcagcgggatatgtacgaattcctgaataataaacgttggtcggaaaatatttttcaatacgatgaacgaatcgaatgcagtatacagatcaccctggatgaacagatagggagcgaccagttccggggatcgatgcaagtacgggtgagccggccggtgtacaactcttcctatagtacggtgttattgaatttcagggataacgacatcgattacatataccgggaattcgagccactggagtatagtgagaccggacaaaattccaatctggtgaacctgctggctttttatgccaatatcattttggggattgactatgatagtttttcgctgatgggaggaaacgacttttttaaccgggcagagaccattgtcgcccgctgtcagaatgccaaggaatccggctggaagtcttttgaaaaccgtcgcaatcgctattggttgatcaataatttgcaggaccgcagttatgcttctgtccgggaatgtatttataagtatcatcggttggggctggatgtgatgtcggataacctgaccgacggacgtttggctattctggaagctctgggtttgttacagaaggcccatcggataaaacccaattcctacttgatgcaggtgtttttcgatgccaaagccgatgaaatcgtgcatattttcaagcctgcttttaccgatgagaggaaaagaatttttaatattgtctcagaagtaaatcctgcaaatagttcgaagtataatgctttgattcaggaaaaaacgaattgatagtaaataaaaaacgatgattgaaaatatcagtataaataattatgccctgatcgatcacacgcatatcgaattggaaaaaggattttcggtgatcaccggtgagactggtgccggaaagtctattctattgggagcaatcggtctgaccttggggcagagggccgattcgtcggctatcatggataaaaccaaaaagtgtattgtagagatagaatacaatattgccggatatgctttaaaagaatggttcgacgagaacgacctcgactattcagaacaggttatggtcaggagggagttgactgcagaaggaaaatcacgttgttttatcaacgataccccggtaaataataagttgttgaaagatttcggtacttatatgatagatatccattcccaacatcagtctttgttgttgggacatcctgaatatcagaccgatatattggatgcattttgtggtaatcgtgaactgtcggaactttaccaggcagacttcagggagcgtcaacaattgaaatctgctttgaagcagttgaaagacagggctgccgatgccgaaaaggaaagtgattatctgcaatttcagtttaatcagttggagagtgcacgcttacagctaggggagaaggaagcacttgaagaagagttggaattactgactcatgcagaaaatatcaaatcggccttaagtgggttatcctggaatctgcgggataccgagcagtctgtcattcaagtattgaaaggaagccgcaatgccatctccgcactagagaatgcttttaaggaagccggcgaataccgggagcggctggattctgtgattatcgagttgaacgatctggccgacgaggccgaacgcagagcagaaagtgtggaatataatgccgggcgtatcgagaaaatcaatcagcgtttgaataccatttacgatttgttgttcaaatataaagccgagtcggtagaagagctcgtaacattgagggaacaaatccgggaaaaattgaaaaaggtagaaggagggtcggaagaaatagagcgacaggaaaagaaactacaggagactgaaaaacgaatgttgcagctggccggtaaaatccacgaaatgcgggtgagtatggaggggaagttgtgtgcgactatgaaaaaactactggtcggactgggaatcaaacatgccgagtttcaggtcgggatcacggcggtagatgagtttacccggacaggccgggatgaagtaaagtttttgttctcggccaataagaaccaacagccgggagaaattgcccgggtcgcttccggaggagaaatttccagggtaatgctggcattgaaatatgtgctttccggagcaaaacaattaccggtgattattctggatgaaatagataccggattgtccggggaagtagcccaccggatgtcgttgattatgcgcgagatggccgggcgaatgcaggtgatcagtatttcccatctgcctcagatcgcggctgccggcaattgtcattttaaagtatataaagaagatcgcggtgaaacgacgatctctggaatcaggaaattgacaccagaggaacgggtacaggagattgccggcatgatcagcgggcaggaaattacaccggcagccatagaaacagctaaaattctgctctcggcaaaagcaggcaattgagcttcggaaattttttgtatttttgcaggccggttctgaacgtattttatatgttcggagtttactatttatgaagaatatcgtaaataggaagattattcattaaaataaaaagaatggcttacaatttattaaaaggaaagaagggaattattttcggtgccctgaatgagatgtctattgcctggcaagtggcggagaaatgtatagaagaaggggctgaaatcgtattgacgaatactccgctatcgattcggatgggagatatacaggattttgcggcgaaacatcagatcccgctcattccggcggatgctacgagcgtggaggatttgacccatctttttcaggaatcgatgacacatttcggtgggaaggtggattttatcttacattcgatcggtatgtctttgaatgtaagaaaaaaacgtccttatgacgatctggattacgattttttgcaaaagacgttggatatatccgcaatttctttccataaagtgctgcaaacggccaaaaaactggacgccatcaatgagtggggatcggtggtcgctttgtcttatgtggcagctcagcgtacgatgttcgaatacaacgacatggccgatgcaaaagctatgctggaatcgatagcccgtagcttcggatatatttatggacgggaaaaacgcatccgggtgaatacgatttcccagtcaccgacaatgactacagcggggagcggaatcaaaggtttcgattcgctggtagactttgccgaccggatgtcgccccttggaaatgctactgcagaagaatgtgccaattattgcgtttgcctgttttccgaccttacccggaagattacgatgcagaatctttaccacgatggaggattttcgagtatgggtatgagttatagggctatgcaccagtataataagagttttgataacgaagataaaaaataggggaactttttgcagtttgtcttaaaaaagggtaattttccgtcttcaatttaaaaatccggaatatgtatttattctttgacacagagacgacaggattacctaaacggtggaatgcacctgtaacagacttggaaaattggcccagattagtacaattggcctggatcatgtacgatgaccggggaaacatgctcgagagccgggatgtcatagtaaagcccgaaggatttactattcctccggaagcttcgcgggtgcatgggatcacgactttggtggcacgtgaaaagggggaacctttacaagaagtgatggagcaatttgcccgaaagatcgatgaagcgacagctttggttgggcataatatcagcttcgacgaatgtattgtcggggctgaattcgagcgtttgcgaatgatgacgaccctgttcctgaagccgaaatattgtacgatgaaactttctacagattattgtaagcttcccgggaaaaaaggattcaaatctccccggttggcggaattacaccaagtattgttcggcagtggttttgacaatgcgcataatgcattggcagatgtggaggctacagcccgttgcttttgggaactgaaaaatagaaaagtcatcaagtagacagaaccggaaaaatgaagcggtcagtaaaagagagatagaggttgaattattgattatggcaaaaaaatcggattttaatacgagtagaagcgtaaaagatttgcaggcggaatatgggaaaatgcccccacaggccgtcgatttggaagaagcagtattgggagccctgatgttggaacgggatgctttttctatcgtcggggatttattggaaccggatgctttttataaggatgcgcatcaaaagatattccgggccattcataagttgttcctgaacgatgacccggtggatttgctcacggtgagcgaggcattgaagcaaagtggggaactggaacaggtcggggggtattattatttgtcccagctgacgacccgggtagcttcggccgcccacatcgaattccatgcaaagatcattgttcagaaatatttgcagcgtaaactgatcggggtctgtacagaattgcaggagatggcctatgatgaagcgaccgatgtttctgatttgatggataaggctcagaaagctgtattcgatattgccgacggtaatattaaaaaagatacggccgagatagctccgatcatcgacgaagcgataaaaggtattcaggctgctgccgaaaagccggacgggatcagtggacttccttcgggctttaatgctttggatgcggtgacttccggttggcagccttcggatttagtgatcattgccgcccgtcctgctatgggtaagacggcttttgtgctttctatggcccggaatatggcggtgaaacaccaccaggctgtcgctattttctctttggaaatgtcggccgtgcagttggtgaatcgtttgatcgccagtgagaccgaattgagtgccgagaaattgaaaacagggcgtctcaccgacgaagaatggcagcaattgcacagccggatcaaggctttggtggaggctcccatcctggtggacgataccccggctttgtctatcttcgaattgcgggccaagtgccggcgattgaaacagaaatatggaataaaagtattgattatcgactatctgcagttgatgaccgccggtgccgatatgcggggaaaccgggaacaggaagtgagtttgatttcaaggcagctgaaaattattgccaaggaattgagtattcctgttatggctttgtcccagttgaaccgtggggtagaatcccggccggataaaaaaccgatgttgtccgatctgcgtgaatccggatctatcgagcaggatgcggatatggttatgtttatccatcgtcctgaaaaatatgggataaccgtcgataatgaaggaaactctctgttggggattgcgacgattattattgccaagcaccgtagtggtgctgtcggcgaggtgaatttgcgtttccgggccgaattgacacaattctgtgacctcgatacgacttcgccttttgcttcaagtacttcgaccggagagatcgttacccaaacgttcagttcgaagatgaacgatgaacctgtgcctgcattggatcagggattcgaaggtatgagggatagtttcgataataatgctcctttttaaatcggatcatgaagaggctgctgcttatcggttgtttttgcctgatgggatggatcagtctggcgaatcatattctgattccgatggataatacacagagcaatcatttgaaagcttatggagttgtttatcatacgctgaaaaaaggattggaagtgcagtggttgctcaattaccggggaggaagttttatactgccttttgatgcggacggacgaacggaatgtctgttgaaaggagtgggcttcgaagtgattcctccggcaaggctgaatgcgatcctggctgagatagcttcaccggaggtaaatgcagatgcggttaaactggagaaagcgccgaagattgccgtttactccccgaaggaaaagaaaccctgggatgatgcggtgactttggctttaacctatgcagaaattccttatgatgtcgtttatgattcggaaatactggacggatgtctgaaagagtacgattggttgcacctgcatcatgaagattttacagggcagatgggaaaattctaccggaattatcggcatatggattggtataaagccgaagaaacaactaataaacaaacggcccgtaaatatggtttttcaaaaatttccgaattgaagaaagcggttgtccggacgatccgcgattatgtgtctgccggagggtttatgtttgcgatgtgttcggctaccgatactttcgatattgctttggctgcgatggaggtagatatttgtgatgtcatgttcgacggtgatccggtagagcccggcgcacaggaaaagctcgattattcgaagacatttgccttcaaagattttaaattgcagttgaatccgaatatttatgaatactcggatatcgatgtcacagacacccgaaaagtaaccgaacgggatgattatttcctgttgtttgaattttctgccaagtgggatcctgtgccgacgatgttgtgccaaaatcatatgaacatgattaaagggtttatgggacagactaccgcatataaccggaaactgatcaaatcgaatgtcctgattatgggagaaaataaggctgccggagaagtcaggtatatccatggggaatacgggaaaggtacctggtcatttttgggcggacatgatcccgaagattatcaacactttgtaggtgatcctgtaaccgaattggatttacatcgacagtctgccggatatcggttgattttgaataatatattgtttcccgctgcccgtaaaaaacaacataagacataagagcgggtaaccgtttaagaaataacgagatgatgaaagcaaaattgatttttttactgaagtattacttgttttgggtcgttatatccattgtggcaaaaatcatgtttttattctatcaatggtccgatacgactcatttgtccgctgctgacttttggcatattttagccggaggaatccgtttggatttatctttgagcggttatatcctgatgctttcttcagtaatcctgatttgttcggtcttcgtcggggaaaagattatccgggccgtatttgccggtttgacgctgtcgttacttctctttttttggggagttgttgtggtcgatctggaattatttaagaactggggattccacatcgatacgactccgctgatgtatctgaaaaccccgaaagaagcgatggcttctacgcctttgtggctgaacttatgtcttaccttgcttatgctgggatgtgtcgttttatccttttgggtattccgtcgttatgttttgaaagggttgcgatataaaaggggaaattattgggggattcccgtatttctgctgatcggtggtgctatgattttaccggtaagagggggagtgaacctggctccgttgaatagtagtgctgtgttttatcatgctgagaatatgtatgccaatcaggctgctgtaaatgcggtttggaattttatttacgagctgatgcacatgaaaaatctggataaaaaatataattatttgccggaacaggaggtggcacaagtggtagatagcctgatgcatacaggaaccgattatcctcgtttgctgaaaacagaacgtccgaatatcgtatttttacttttggagagttttacggcgaatgcagtcgaagttttaggggggattcccggagtgacgccgaatttgaatcagctggccaaagagggagtactgtttacgaatatttatgctacggggtcgcgttccgaccgcggaatggtcgctgcaatcagtgccgttccttcacatcctgccgttgctatgatcaagtatcccaataaaatcatggaacgtccgaggtttccgaaagatctcgaagaagccgggtattcgacccgttattattatgccggggatatcgatttcggtagtttccgttctttagtcaccatgagctttcaggggatggtgaccgaagatgacttttccggtgaagctatggccaatcgtttcaaatggggggtacacgatcaatatatgttcgaacgactttatgaggatattgccaaggcccggcaacctttcatgtacatggcttttaatatgagcagccacgaacctttcaatgtccccggcgaagttgcgatacccggcgacgacacagagcataaattcctcaatgccattcattatagcgatgcttgcatcggagaatttatccggaaatgtaaagcttcggggttatgggacaatacgcttttcatcctgatggcagaccatgggacacgtcatatccggcatgtggatccttctactccggcagcttatcacatccccctgatattgtcaggaggggcattgaatgtgcaggataccgtggtgacgaccatcgggtcacaaacagatatggtggctacggttttggcccaattgggtatggatcattccggatacaagttcagccgtaatttattggccgatcaggtgattccttttgctttcttttcttatcccaatggagccggtgtagtgaccgaaaaagggtctacttatttcagtttacagagccagacttttgtcgagaaagacagtgtaaaagaagatggccgcttgctgaaagcctatctgcaagcgatcaatgaggattttaaccgccagtagatcatttgcttcccggaatccctttgtatttgatcgccagtaaggtgaggtcgtccgattgattgccctgaccgatgtggctatggatatcctcgagaagtgcctgaatgataaaagcaggtgttttcactgtttgtgcttccacacatctgatcattttatcctgaccgtagaactgtcccgactgattttccgtatcggtgatgccatcggtataaaataacaaggttgtatttttattgaaagtatagatatgttctgaaaattcatgttcctcgagtacaccgatcggaacatcggggtatttattcagaaaactggtctgtccattgtgatgtatgatcaatggataaggatgaccggcattggtaaatgtcatgattccggtattgatatctataatcccgataaagatcgtggtgtatatatcgtcgtcggcatcgtcacacatatgtttgttgatcagattgcagatttgtgctgtagaagtgttattgctggcgatatagcggaatagtttactgatggaggccatgtataaggcggccggagtgcctttgcccgctacatctccgatggcaaagtaaagttggttgcccagctgaaaatattcgtaaaagtctccgcctacttcacggcattgccgtaagtctgctgccaattcgatattaggaggaagaaggatagggcggggaagaaaacgttgttgaatacggcgagccagacgcatctcagaattgtactgttctttctcggccgtagtgattttcagccgttctatatagttcaccaggttttgttgcagataatgaaaagaatcgtataagtcataaatttctttacaagatttcggggtaggaagtacgatatcgaactgtccttccgcaacacgacgggtggaataagccaactcgagtaaaggagaggataaacgcttgacaatgttaacgataccgataaacaggcagagtaatcccaaccccatagaaaggaataacatgaaataaagtttaccggatgaatataagatctcgttatagggacagatgatacctatttgccaatccataggagaaaaaggggtgtaatagaggtagtgtttttgtttgtccaattccacggtggtcgcacaggtttcccctctcgatatactccggtggataaagctggctttgggacctgtgaggtggctgatcagattttgtttcccactcggcgatggagccggatgagcaatgtaatttccttcccgatcgacgacaaataaatttccggatctgaacaacttatagctgccgatcagagcattcagattcttcaagggaaagtctactttcaaaataccacagggctgatgctggctgttgtggatcagatggcataaagcgatggtcttgcagtggtttacttcggaataaatccaatatccgttattgggtgccgacttgatgattttagctgagtccggatgacaatagttgcaacaaggatcgggttgagtgaaatggattttctcatctgctgtacggtaagcattgatatgaatgaaatcggctacttccggatttttcagatcgtaatggaccgaacttccgatgagtgtcttataacttctcagaattcggatgggtaaatcagggatatttttataattcagttctccctgcatatcggttacattttgcggaatgctttcgattcttgcaatttcacgttcgaagatgatcaaggcattattggcgattgcttttgcctggctgtaagcattgttgttgataaattgttccagtgaattgaccagagccagagagattaagaaaaatacgacgaataaaacaaggattaagtaaataatcaattgttttgaaaaactgatgttctgacttattttcatagatgataaagaggcacttagggagaagttagctagcggtttgggtgcaggatgaattcggtgatcacaggtctcaaaccgattctaccgggaaacccaagataaccttgtccgcgactgacatataaatattgattttgatgccggtataatccgtcgtattccggataaatatattgtgccggactccattcgttttttccgatcttgattccgaattgcatagcatgggtatgacc

SEQ ID NO: 5995 - DNA, 42763 bp, Unknown
  gut microbiota DNA sequence
aaggatgatgcaagcttgcccggggagagaatctatagcgacatccaatttcccgtaacggggaaaagggggattgccccaattctcgacccccacaagccaaagcgtgtccctgccttcgacgatgggaatacggtcattgttcaacatatgaaatcccatcgacttcatattttcaaaaaattggttcaggttgttccgtttgtccgtttcagtaggccaacgggtataatcgccgtaatcatgattcccggtaatggcatatttaccgtaagaagctttcatttcttgaaatagagtgatccagggggacatttctgctgcgaaattattgaccatatctcctgtaaatacaatgatgtccggttgtaaacgattgacttccccgactaatttccgcataccggggtaactttctccgaaacttcccaagtggatatccgaaagttgtacaatcttgaaatgatcgaattcggccggcaaattttccaaagtcagatttacggtttcaattttataattataacgccctagagtaagactatatagtagaatcaggaaaagtgctcctgccaggatacccgaaaataaacggatcagtttggatatcctctgacaacatctccgtaataacagaccgattccgttgaaaacggtataaatgagtttcggtgtatagaataaaaataacagaccgatcagtttttctatccaaaaataactgtcgggaccttttaagcgggatacgctgtactgaaaaagaattaaggtacagatgaaaaagagagtatgtaatccatataatagaatttgccactttttattcaaatattgtttcaattgaatccagaatatggtatctgtcaatagaataaaaatgaggcctgctataaatattaaattactactccgcatataatttttaaattataatatcataaatatgatataatgtttaatggctaagacatacatttatgtcaggaatgattatacgcattcctgacaaaatagtaaaccttagaagtttttaaaataaaccggtgatatgaccttgttcgtcgatatcgatattctcggcagccggtttctcgggaagtcccggcattcgcatgatttcccctgtaatcggtatgacaaaacctgctccggcggcaatttctatttggcggacggtaacgacaaaatctttcggccgacctagtaatttaggattatcggacagtgatttttgtgttttggctatacaaaccgggagtttatccaatcccagagcgatgatttttttcaaatcgcttttggcttgtgctgtataatcgatagctgcagctccatagatttctttggcgatggtttctattttcttttcgatatcccagctccattcgtagagcggttttagtttgcatacgcattgttcggctactttggctgccaggattgccagtttctcagctccttcacctcccttggcccaaacttccgctacttccatgggcacgcccagttctttgcatttgtctgcaacaatttgtatctcagcatctgtatcggtgacaaatttgttcaaagcaacgatggggcaaatattgaatttcttcatattttcaacatgcttttccaaattttcgattccttttctcaatgctgccgtattctcttctttcagattttcgactttcacgcctccatggtatttcagcgcccggatcgtggcgaccagaacgacggcgctcggattcagaccggctttgacacacttgatatcgaagaatttttctgcacccaggtcaaaaccgaaaccagcctccgtgacgacaaaatctgaaagcgaaagtcccatcttcgttgccagtacggaattcgttccctgagcaatattggcaaacggacctccatgaatgatggcgggattcccttcgatggtttgcaccagattgggtttgatcgcgtctttcaataaagcggccatcgctccatgagctttcaggtcacgggcatataaaggacgtttatcataggtataaccgatgaaaatatttcccaaccgttctttcagatccatgaaactttccgataagcaaaggatcgccataatctctgacgctgccgtaatatcgaaaccggtctcccgtgggataccggatgatgtacctcccaaaccgacgataatgtgccgcagagaacgatcgttcatatccattacccgtttccaggtcacagtccggggatctaaccccagggaagaagttttactttggatgttattatcgatcagggctgccaacaagttatgggctttctcgatggcattgaagtcacctgtaaaatggagattgatatcttccatcggtaacacctgtgagtaaccgcctcctgttgcaccacctttgataccgaatacaggtcctaaagaaggttcacgcaaaacaaccgttgtctttttaccgatccggttcagcccttcggtcaatccgatcgatatggtcgttttcccctcgccggccggagtcggggagatggccgataccaaaatcagatgcttgccttgcatccgggcgggctgaatcaggtcgagggggagtttggctttatatttaccatatagttctatcacttccggatctatgcctaatttttttgcagtttccgtgatcggtttcagttttacggtacttgcaatctctatgtctgtcatgtttttaattgtttgttggttattggttggttttatattagttaagcgtaaattctgtactccctatcagttcgttgtcgctgaataattctgcaacgtattttcctttgaccagacttccgtcgttaggccagtatatcgccatttcgagccggtcaccttcataattgatttcccgtttggcggagtaggtcagagaaacattctgatatttaaagaatgatttttcgctaaaggcgatcactttgtcatccggacgtttcagacgcagataaatcacccggtcgccccgtttggccgttacatttttcgtgatcacaaattccgctttcaggttgtaacattttttccagttcgtttccttatctcttttatttacgggatatacgacgaagttttctgtccggagggcactggcctgggcgatcacttctttcatgtccttttgctgattttcaagtttctgattccgttccctgacccaattcatttgtttgcgtacttccgtattttcttttgccagtttttgattcagctgattgagagaatctatctgtaccacataacttctcaatacattttttaatgtaccgatttcttttttataacgattgatttctgcataagagttatcgcggaatttcttcatctgatccattaaggtaaggatcttttcctgttctaattgcagtttttcattcagggtatcgttactggttttcagatcatcgtaattatggctcagatcggtaagctcctgttccaataattgcttttcctcatgaatggcggcgatatgttttttattttcggatctttcaactaaaaagaaaatgaataataaaataagaactaccgacaaacaaccgataacgatcattaacattttgtctttcttgtccttgatgatagaattttcttccataatttaatacattattgtttttattcgtttttatctcctgacttccgcaaaggtaggaaaaataaaagtaaaaggagaaatgttaaaactaaaagcatggcgataaggagagcataaatttggattttacaattttttaacgtattattgtatagtcctaaatcatcagcatatgcgagaagaatttttacattatctctgggcgaatgctttgttcagaagtaatgagtttgtaaccatttccggtcatgctgtggaggtattgaaagtcgggctgttgaaccgggatgcagggccggattttttcaatgccagaatccggttggatggagtagagtggggcggtaatgtcgaggtacatttgcgtaatagcgattggaacaggcatggtcatcaagtggacgcagcttacgacaacgtgattctgtctgttgtcctggaggccgatgtccgtatttataacagcaagggacgcgaaatcgatacgatagttctggattatgccgatcgattgtatgaggagtatctttatatgctgggcggacaactgaaacccggctgccggcggaaaatagaaaaaatcgacaagagtagcttttatctgatgttgccggcactggctatcgagcggttgatgagaaaatgccgggaaatcgagggaatacttgaattgacccggaatgattgggaagaatgcctctttcgcctgatctgtaagtattggaccggtaatgtcaatgcagagcccttttatcaattgtcgcttcgcttgccttatcggatattactcaggtatgcggataaacaaaccgttttagaggctttattgttgggatgtgccgggctgttggaagatggtgcggaagatgaatatgtggctgtattgaaaaaggaattcctgtattaccggaataaacacgatttacaatccatgccttccggacaatggaagtttatgcggatccggccggatgtttttccgactgtccgtttagctttgctggcttcgttgatccgtgattacaggactttggcctcccgtattttagatgcgacttcattgaaggaactgatggggctattcgaagtaaatgtttctgcttactggaaccggcattatcgtccgggtattatcgctcccgaacgacctaaaaaattgggagaacaggtgcggaaaacactggttattaatgcagtgatcccttttgttttttggtatggaaaacaaagagaggaaagaaaatataccgaaaaagcgctgagatggctggaagaatgttcccctgaaaacaattatatcgtgagggcctggcaagaattgggatttcgcttcgattcagctttacaaacacaggccattatagaactaacccgggaatattgcgagtgccatcgttgtctgcaatgcaaattagggcgggaaattttaaagatatgctgatctgaaatcctgtcaggggattaactcgatcgcttcctgacgcaggattaaggggagattgatttctcttttttccaggctgatcagccattcttctacttcttccggacgaagggtgtaaagaatatccctgaatacttcgatctgttcgtcggtataggcttccggagcaatttgccggtaaacatccagttcttcatcatcgaagtaatctatttggggactggcttttttcaatcctttttcacatatcgcatgagctccgcagcaatctgccggaggagcgacaatggtctccgggtcttcactatggcggcgtttatgaataaaagtaaacagggcgactaaaatcagcagccctgttaatcccgatagaatatagatcattgtgtagatctgttattttaatagttctttttttaataagttcacctgattggtcagttttttgatttctgcgtcggcgtcggcttttgtttttctgatccaattcagtttttttgtcatttcctcgttgtctgctttcagtttttcaacttctccgttttgagcttgcaggttattggtagcactttccagctgtgctttgattttctgattctcaaattccagattggtttgtacttcggtcagctgacgacgcaactgatcccgttcattgctcactttttgcagactgctttccaatgacgatatttgctcgctggtagattgagtagtagttttgatctgatcggcaacattactcaattcggatttcaactccacttgtttgctttccaaagagcgtaatttggtatacagttggtcgatcgttttatcttttacagcattattttcagtcagtttgtaccgaatggtattgaaatcgtcctttgctagttgcaattgatcttccaactgttttttatcgcgcttcagatcgagcagattccgatcgacttctctttttgctctggctaattcttcgaatttcttcttagagacgcaagacacggataaagatgaaataatcataaatccactcaggtataaaatcgtttttctcatatgaagtgactctaattatttattgacacattttggttttaagcattataattgcttactttggggcaaatatataaaataaaatagaaacgtaacgtaaaataagcttgaattactaaatgtactgatgattatggccaggaaatttcttttattattgctattgatatgtggaggcttgtgtatggggcaggctcaggaagatggaaaaattgtattgaagggagtggtacaggatgcccggactaacgaacctataccttttgtcaacatcggtttgttgggaacggtagcaggggttgcttcggatgtagacggacgattcgaattggtcatcccggatcggtatgcaacccatgtcctgcgtctctcggctatcggttatgcttcaaaggatatcaaagtatatgaaatacaaaataaacccgacctcaaaatcctgttgcagccgaaaacttatgggatcggggaggtagatgtatacggacaattgctgatttataagaaaatgctgcaaaatgtcgtttccaacatcaacaagaattatatttctaaaccttataattacgaaggttactttaaatatagccggcaggtcgacggacaggaaaaagtaaaagaggcgacggtaacgatctatgatgctcagggataccatcgggaagatgttgcctcggcttttaaagaattgaattataaattcaatcaggtccgtagaaattccgaagtgacttcggtgtgggacggcctgacctatttcgatgatattctgacagcagatatcgtcaggaatacccgtaatgtattggatatcgtcaattcccgtgattataaactgaaaagtaaaggtaagctggtctatgaaggtgattcggttcaggtgatcagctaccaggctactcatccttctatttcaacaaccggtgatccggcagtgcagacctatagcggagagatttatgtcaatctgaaagatctggcggtcttaaagaatgtcgtcaacctgacttcccgcgattttaatggattaggccggaatctggttacgatcaatgaaaaaccgaaaagcgacgtgaaaatgacaatcaccacaacctataagaaattgaaatcggtttactttctaagtggtgttcaggtggaatattcctataaagaagaggggaaagaggtgaaagggacgatggagtatatcactacccgtgtaaacaggacttctcctacagttattgaaggccggatttattacgaggatatcgaggctaacgaagaattttggaatcgctattcggtctattttgaagaataaaatggagagaaaataaaacgtgccttcgtgttcgggggcccggtcgcttctgtcggtcgtctggctttttctgaacgaccgatcggtggtgtctgacggaaacgtagcgtaaagttttttgcgctacgaggagttccgccggtcagtgaaggaaaaccttaccggaccggtctgacggtacaaaacccggaatcggaatagaaatagaaagaaaaaataaaatctacgttaaagccagactgatctttttaatcggaattttttattcggatccacaactttatttgttaaagatatcttctttgctgcggggttgtttgtcttgatgccattcaaaatctttgagaaagcgatctttcggatcgacaatgatcagcggattcaaagttccttcgggtttggtaataaaaacaatccggtttacccttttttcttttaaatgaattttaatagcggaactgatagtcttattcaaaccgataattactcctttgtcatccgggtagtatatcgattcgccgttcccatcgacctccaccagataaagttcattgtgccggatataaccggtcatattccgtcctttgatttgattgaacttggccgtatccagctggttgacgataaatgctttgttatttaaatggaacaggtcgacttcattgttcttgaggtgcatatcgatcgttgtccccgttagctgattaccactggcccagacaataggagtaccgaaaagatatacggtagaatccgctaccgggaaaatcattgaatcgcatattccttgcagatcgggattgaaaaatttcgtgttgtaataggccttcaggacgttgttacctaacgaatctttactacttgaaagggtatctccatggacaaagagggaatcggttttaccgaccagaatcaattgagcacgctcggttacataagcataatcgttgtttttcgtgacctcgccatagtttccctctacaatcacattatttactgtatcgtacaaatggatgttttgatgcatgatagccttaccggacaggctgtctacaattaaagtatcggcccttcctaaatattcgttgtaggtaaggtgattgtttttatataattcggcatgtgaagtcagtgagttataccagccgttctccgaatagagggttcggttgtcgccatagatattggtcggtcccaatatcgtaatgacttttgtttccgtttgatatttcaaagtatccgaatacatcgtatattcgggagtgtataccttgacactatccttaaaaaacatttcattaatcgggaggtaatagtagccgatgtcgctgatcagggtgttgatactgtcttttatcgtccctttattgaagtaatagccgacccggttggccgcatcgtaatccagaaaatcggtggtcagggtaattttcgggtctttcatgatcacgttatccctgactttggcaaattccgtattgccattgtatagcataaaatctccccacagattcaaggtatcgttctgaatcacgtggacattaccgaaagcttccacataattactatcccgatggttgtataatttatcgcaaaacatcagcatatttttatgcttcagcctgacatttccaagtaagctatcgatattactcttcatattcacggcataggtgtcggcatgaagaatatcgataacatctttttgctgggcaaatgaggggcatattgtgccggcaaaacatatagacaataggaggattttcaagtacattttatatcgaccgtttattttataaattcccggatcagatcttcgacccggatatgttcagcctctgctttatagtttttaaagatccgatgccgcaaaatagcttccgctacatattttacgtcttctatatccggagcatatttcccttgtaaagctgcatgtgttttagctcctgaaattaaaaattgagaagctcgcggtccggcgccccagttgaggtattgctctgccagcggatgtgccccagaacgtccgggacgagtccgggcaactagttttacggcatattcggtgatatgtttcgataccggcatcaggcggattgcagattggaatttcagaatttcttcccctgtaacgatacggttcaatttttccgttttctgtccggtagtgctttctacgatagcgatttcttcttccagagtcggataatcgagtatcaaactgaacatgaaccggtctaattgagcttccggcagcggataggttccttcctgttctatcgggttctgagtagccagcacaaaaaaaggctgttccaatttccgggttgtaccggccgcagtgatttcttgctcttgcatcgcccccagtaaagcactctgtgtcttgggaggagtacggttgatctcgtcagccaggataatattggcaaatagaggcccctcgataaatctgaattccttctgattgtctaagatttcagtaccgataatatcggaaggcattaaatccggcgtaaactgtatccgcttgtattttaagtctaaggtttcggatatagcggttaccatcaaggtcttggccaaaccggggacaccgatgagcaggcaatgtccgttactgaaaatagctaccagtattttatcgatgatttcttcctgaccgacaattttgcgggcgatctctttttttaatgtttcatatttaatcttcaactgatcgatcctttttaccaaatcttccatgatcatttgcttttagcacgactttcaatccctgtttctgtttatttaatccatccgtcgtaccggaatttggtatctttaaaactttcatcgatatgaatataggtatccgcttgtttttctttgatccatttttccaatttctccatttgtttttcccgtttcagcatcaattcgaaattttgccagtcatcatccaaattcgctttatgacggggataaaattctttaatcttcacaatcttgtattcttcttggccgttggtatgactgatgaacggctgagagatttcgccgggtttcattttatttacttctcgagccatatcgccgggaatatcaggacgggcaatgcgggcttccgaagtctggggatcggcgaacaacccaccgttattccgggttttcttatcggtagagaaataataggcagcttcttcgaaagtcattttcccatcggtgatgtattgccggatggtatccagacgatttaaagcttcctgtttttccgtatcggaaaccttcggttgaaggataatgtgacggacattgattttttctccctgacggtcgatcagctgaataatatggaaaccgtattccgattctatgattttagaaatttttccgggttttaagctgaaagctgcttctgcaaaagccggatccagttctttcttggatttataacccagttctccgccacggggagcagaagcatcttctgaatacaatacggctaaagtattgaacgtcttttcccctttcaggatctggtcccggaaagagcgcaattgttcccgtatccgttctttctcggcttcactgacatccggttttaaaacgatctgttgtaattcgtaacggtcgggcatatccggaaggctgtctttggggatctttttgaaataacttcttacttccgaaggagtaatacgtattttttcaacgatcttttgctgcatttgctccgtaatcaattgctccttaatcggatttctcatgtcgtctttgatttcctggatggatttaccgaaatatttctccagacgttcctgagaaccgatattactgataaaaaattcgatctgactggaaacggcattttcaacttcttcgtccgatacgatgatactatctatttgagcttgggccataagtagtttctgtaccaattgttgttccagaatttctgctttataatcaggtgacgaggagatgatcccctggccctgttgttgtaaaaaggcattttcaatatcggattgcaaaattatttcatctcctacaatagcgactattttatctataacatttttttgtgcaaaaataaagctgaaagagaaagataaaacaagtaataataaaacctttttcatgtgtattaatttgttattatatagtcaaaatttgagacctctaaactactatttttattcaaaacagcgaagaacagtagaaagtttagtaaatttttacatactttttacgaactccttcttcattgatctgtttttccaggtcgttttcgaattgaagtttcttcttatttttcagaataagggtaatttcatctctgacataatctaagggagctaacgtttgttcatgacgcatctccttgatttttagaaaatagtagttgtcgtcatcttctttttcgatatttttaaccaccagaatttctttttctaatgtgttgaaatctccgggaatcagatttaatatatatttcacttcaatccatttattgttgaatttatcgtattttttagcatgggtcaggcaataatcttccagactttcctgatcgtttgctttatccgatttgaaccatttcttcacttcttttaaattaggtgcatttttaggaagaataaagaataccgctttaatgatcggagtgggcagaataaagtttttttcgtttttattataataggtttcgatgtcttcttcgctgatctcgtccataaggcgttgggcgatcagtttttgtttgtattggtaaatcaacaaagaagtgcggtaatcttcaacctgtttttgtatattcatttcttcgttggataggttctcgatcgctttatgtaaaagtaatttttgcgtcacccaattgcggatatagttctgagccatgagcagactatcttcactggaggtgccgttcggaataaaatcgatgatctcggagcgggataaggtactctcgaacacttgtgccacaggcggctcctgcgttctttggggctcacaggaacaaatgatcaggaccagcataaacaatagggtgaatctcatttttagcttcttgttttaagacacgggcgaaagtagtaaataattttcaattttccctatctttgtccgaaagaagagagatgcataacaggattcacgaaatattgaaacaatactggggatacgatgaattccgtagtctgcaggaggagattattctctcggtattggaggggaaggatacgctggctttgatgccgaccggtggaggaaagtcgattacctaccaggtacctgccttggtgttggaggggatatgcctggtggtgacgcccttgatcgctttaatgaaagatcaggttgaagaattgcaaaagcggggaattgtggcggaggcgatttataccggtatggggaaagaacagatagaatcgaccctgaataaagcgattgccggaaaaatcaaattcctgtatgtttctcccgaacgattagcttcggaacagtttcgcgcacgtctgaaacaaatgcatttgtccatgctggcagtcgacgaagcccattgtatttcgcaatggggctatgatttccggccttcatatctgcggatcgctgaaatccgggagaatttccggcagattccggtattggcattgacagctaccgctactccccgggtagccgaagatatccagcaacagttaaaatttgagattccccatgttttatcgaaaagtttccggagggataatatcgcttatgtagtccggaaagcgaacgataagttgggagaattattgcatattttatccagtctgaaagccagcgcaatcgtgtatgtgcgcaaaagagcgggagcggaagagttggcccgttttttgaaagcgaagggaatagaagctgatttttatcatgccggactgacttcttttcaaagagaacaaaaacaggaggcgtggaaaaaaggtgaagtcccggtgattgtcgcaacgaatgctttcggtatgggaatcgacaaaccggatgttcggattgtcgttcatttcgatattccggatagtcccgaggcctatttccaggaagccgggagagcaggacgggacggtaagaaggcttatgcggtattgttatacaacgaagctgctttgacagccctgaaaaaaagagtcactcagggatttcccgataaaaattatatccgtcaggtgtatcgcctgttgggggattttttcggattggaggaagggttagggcatggactggcttttgagttcgatcctgaacattttgtgaagacttataagctggagctgaccactaccttgtcggcgataaaagtattgcaggtagccggttatttggaatgtaccaccgaagtacatgcccgttcgcgtatcagtttcctggttttgagagatcaattgtataaaatagagttgggggaccttttattggaacgattggtggaatatatacttcggaattatccggggatttttgtgcaatatgcttatatcgatgaagaaatactggccgggaagttaggggtgaaaagacaacaggtctatgaaagtctgttgttattagcccgtcgcaggatcatcggttatattcccggtaatgaccggccttatatcgtttatcaccagccccgggttccggctcattacctgcatatcggtcccgaggcctatgaggacaggaaacaagcttatgctgtaaaagtcgggcatatggccggatacatcgaattaaccgattcctgtcgtcaattgtatttgatggcttatttcggacaacgggaaaaagaggtttgcggtatttgtgacctttgtctcgaacagaagaaacgaccgggaaataccaaccggaaaaccgaggagaagatccttgagctgctgaaacaaaaagattatgagatcagggaactgatctatgaatcggcgggttcccgacagcaagcgacggcttgtatccgcaaacttttggatgcaggtgaaatttattataaaactccgacactactggctttacgtcattaatcatactcctgccttatccccgaataacgagatatgcaatctgtcacaatatcgccaaccgttccgaatacaatactctaaagtttttcgcatattccttcgcatgatttccggtgtccctcctaaaggcattaacaggatgtcgtcatttttccaggcttgaagaacagataaaagttgctggatttcgtctatatcttcatcgcaagcatatacgaatttcaattggaaatctttctggtattgccgggcagaggatatatattgctgtatgcattccggattcaaccgttgaatggaaagcggactcgctccggtataggaactgcttagcttgggagataaactgaataaatcgatgtatcgggccaattcaggatcgaataaggtggcattggtttctaaagtcaaatggaatcgatagtcggactttaacttttgacataaggcttttaattcctttacctgaagtaaaggttcaccaccggtaaggacgatatgccggatgggaccggcattttgcaagagggttgtataaatggcttccacagatacttgccgggtatcttttaattgatatgcagcataagcagagtcacaaggtgacgacagaccgtcggaggtttgccagtgacattgcagattacatccggccaatctgacaaatagagaagggataccgcacaattttccttctccctgaacggtacctgcaaactgaaaaccggatgccggcaaatccgggagcaaatgtccgtctttatctttaacgatcggaaagattccgtctttggctaatcgcatatttacgcctctaacagtttatcccaccagtcggtagatttccactctgcaacgatcccttcggagaaatggatgtctttcagttggaatctggccagttttaaatcttcctgaaaagcttcggcataacctgtagccgtttcatgtacccggacagcatgaagctgaatatttccttccccgttgacacgttccgtatgccggaggattttgtcgatgacataggtaaacagtaaggcataaccttcggcagaaggagagaccgggatttctgcaactctccggttataacggtatacgaatgtttttaaatcgggcgattcattttgccacagggagtaagagtgatcgaaactttcgataaattctttcactttatccaaacggcagaaatccataaccatataaccgtcgtcgagtttgtccgaggtgataaaaacttcgacgatataggaatgtccgtgaatattttcccggcaccgttgagaggaacaattacggacaatatgcgccccttcgaatttgaattgttttctaatcagcatactaaaggatctatttcgtttgcttcggcaaaagccttggctctcaataaacaactgtcacaaacgccacacggatgttcacctccccggtaacaggtccaggtcagtccgaaatcgacccccagactgacgcctaatttgacctcttcggctttggtcagatgcatgaaaggagcgtggatggtaattctctgtttcttttcggctcccaatacggttcccaggttgatcgcgttttccatcgcttttataaattcttcccggcaatcgacataaccggaatagtcgacttcactcactccgataaagatgtccgtgatatctaatgcatcggcccacgaagcggctaccgacagaaataccatattccgggcaggtacgtaagtggaaggaatatcctggcgttcgatatggccgtcttctacctccatgtccggatcggtaagtgcgcatccgctccattggttcaaaagtaaattaactattttatgttcttttacgccggctgcttttgcaatggctatagcactttttaattctttgtcgtgcttctgaccgtattcgaaagtgatggcataaatctcatcgaatccctggctttgggccagataaagagctgttgaagaatccagcccgccggataataaaacaatggcctttttcataactatttattcttattttcgggtgcgaagttacaattattacccataaattgggtgtggtatcccgaattttgattaccttgcggccgaatatgaaaataaatacctgtataccggaagccgtactttacttttcccagtggagcgggaaaggatatgctgtttttgctgctttgggccggcaagtacagattgcaggattagctttgcatatttgtttgtgtgctatgctcaaatctgcccggaaaggcttaattgtaagtggggttttagcctgggaggaaaatgagggagaaatagcggaacaattgaaacgggaaatggaaggggtctgtttacatgagggagaagtatgccccggtctgaaagtgatgttaaagtaaataaggaaagggtgtgctgtaagcatgccctttttattttgaataaagagaagtatgattacacaattaaaagaaaaagtgttgaacggtggacagatcacccgcgaagaggcgatcttattgagtaatgcggtggataagcaagctttataccgggccgcaggcgaaatcagagataaacgggtgggccgtcggttcgatacttgctcgattataaatgcccgttccggaagatgttcggagaattgtaaatggtgtgcccaatcggctttgtttaaaacgaatatagaagagtacgaactggtagatgagaagacttgtctcgatttagcccgttcgaatgccgattatggagtggataaattttcgtttgtgaccagcggtagggccttgtccgataaaaatatagaccggatctgtacttttgccgttaaaatcaaatcccagtcggaccttcaattgtgtgcttccatgggattactgaaaaaggcgcagttacaaaaattgatggatgccggtattacacgttatcattgtaatctggaatcttcggccgattacttcggtaccttatgtacctcgcatacccctgccgataaaatagagactatccgtgcagctcaggaaatcggtatggaagtgtgctccggaggaattatcggaatgggagagagcatggaggatcggatcgatctggccttgatgttaagggaattgggaataaaatctattccgataaatattctgaatccgatccccggtactcctctcgaaggtacagctcggttggaagatgaagagatcctgactaccattgcgctctttcgttttattcagcccgatgcctacctgcgttttgccggagggagaatgctgatatcccatttagagacagaggcgatccaggccgggataaatgctgcgatagtaggtgatttattgaccactttgggatcgaaagtaaaagaagatatggaaaaggtgaaggcgctgggtttcgaaacagaaggaaaatctaaaaatctaaaaatatgaatacagcagaattacttcaatacgacagggagcacatctggcatccctatacttcgacgatagatccgctgccggtatatcctgtaaagagggcggaaggggtatatatcgaactcgaagacggacgcagattgatcgacggtatgtcttcctggtggtgtgaagtacacggttataatcatccggtattgaatgccgcccttgaaaaacaaatgaaagaaatgtcccatgtgatgttcgggggatttacccatcggcctgccgttgaactggcagaacggcttctttctattgctcccgggggattggataaaattttcttttgtgattcgggatcggtatctgtagaggtggctatgaagatggctttacaatactggtatgcagctgaacgcacagaaaaaagacattttctgactatcaccaaaggatatcacggcgatacctggaatgccatgtctgtatgtgatccggtaacgggtatgcacggtatttttcatggtaccctccctatacagtattttattcatcgtccggaatgtcgtttcggagctccttgccgggaggaagatatccgggaactgaaagactgcctggaagaacatcatgccggtatagctgctgttattcttgaacctattgttcagggagcaggtggaatgtggttttattcagcagattacctgaaacaggtcagggaattgtgtgatcggtacgaagtgttgttgatctgtgatgaaatagcaacaggattcggacgtaccgggaagttatgggcggttgaacatgcggggatttctccggatattatgtgtatcggaaaagcgattaccggaggttacatgagctttgccgcaacgatggctaccgaacgggtagcgactcggatctgctcccgggatccttttgtatttatgcacgggcccacctttatgggaaatcccctggcttgtgctgtcgccaatgcttcggtcggattgattcaggagtatgatctggaaaagacggtaggggctatcgaacgccaattgaaacaggaattgcagcctgctgcattatttccgaatgtggcggatgtccgggtattgggggccatcggggtaatcgaaatgaaagaaccggtgaatatggctgtccttcaagccaagttcgttgaagaaggtatatgggtgagaccgttcggtaaactggtatacattatgccgccattcatcatccggcccgaagaactgagccgtttgactcaaggtttattgaaagtgatcgctcaataatcggttaaaagcatacaaaatgaataaagagcgttattatcacaaattagaaaccataaaagaatccggtaattaccggatcctgagggaaatcgaacacaacggttttctgatccacgacgacggacgtgagatgctgaatctgtcttcgaacgattatctgggcttatcgtctaatccacgcctgattgaagaattccgtgaagagacagatgttatggctttaccatacagtgctgtatcttccagattattatccggaaatcatccttattacaaaatgctcgaggacgatttagccgatctttacgataaagaggcagccttggtattcaattcgggttatcatgccaatatcggaattttgcctgctttaaccaataagcgggatctgatcgttgcagataaattggtgcatgccagtattatcgacggattgcggttgagtgaggctcagatgatcagatacaaacatttggattacgaacatttgcgaagtatactgacccagcaccgggaggaatatgataatgtattcatcgttacggagtccatttttagtatggatggagatacgtcggatttacaacaattgtgtgaaataaagaaggaattcgacgcctttttgtatgtagacgaggcacatgccgtaggagtaagggggacgaatgggttaggttgttgtgaagaacaagcttgtatggaagatatcgattttatcgtcggtacttttggaaaagcttttgcttcgatgggagcttttgtcgtgtgtgaacaagtatttcgcgattatttgatcaatacgcaaagaagcctgatttttacaacggctttgcctcctgtaaatgtggcgtggacgcggtttattctcaaccggatgcccgatttttacgatcttcggatcaaattggccgaaattgcttcgaagttacggcaggtattggtcgaaaaaggattcgaaacccggggcgactctcatatcgtacctatggtatgtggttctaatgagagtagtgtagaaatgtcggaattacttcgggataacggattttttgttttgccggtgcggtatccgaccgtacccaaaaatgaagcccgtatccgtttctccctgaatgcttctattccaaccgaagattatggttgtttatttgaatttttggagtgtctggtatgcgaatagagtggttgaaccaaaaaggttccggtcgggtgatcgttttcttccatggttggggaatggatgctgccggtgtatctcatctgcaaatggaagatgatgtgctgatgtgttatgattaccgttcgttagattttgcttttccggatttagggtattaccgctgcatttatgtggtcgcctggtcgatgggagtgtgggccgcagatcgggtaatctccaggcttgaaatgaaaccggagcgatgtgtcgcattgaatggaactacacgtccggtcgacgatgaatatggaattccggtcaaaatttatgagcttacagaaaaaggaatgaatgagagaggacgggaaaagttctttctgaggatgctcgatggggctgacgaatgccggaaattcagcggacaaaaaccgaatcgtggaatcgaagaagtatgcgaagagttgtgtcgtatacgggagttatgctctggtgtaaaaggaaaactgaattgggataaaagttacatttcggaaaaagactcggtatttcctgcacagaatcaattgaactggtgtaagaaagaagggattcctgccgtttctttacccggcggacattatccgttttatcggtttcggagttggagagaaattttagaaaaatagcaaagtatgatcgataagactgaaatagaatgccgtttccgacggagcgtcgatagctatgaagataatgcaaccgttcagaaatggattgtacagcgcctggtagaattattacaggaatatgtaccttattcttcccggaccttggaaatcgggtgtggcaccggactcttatccgaaaaaatcaaccggctttgggaggatcagcaattttgggtgaatgatttggtcgagcagatgtgccggaaaacgatagacagatgccagttgcctgtctcacacgggctgaacggggatatcgaacaaatacctttgaccgggaaattcgatttgatcgtttctgcttcgacttttcaatggctggctcatccccgggctacttttgctaaattagcagctcatcttaatacaaacggatggttgattttcagtactttcgggaagaataattttaaagaattgaaagctgtaaccggacaaggactggaatatcgttctataggggaattaagtgcctggttgtcttcagaatacgatatattgtataccgaagagcagatacatacgctaaaattttccgatcccctggatattcttcggcatgtaaagaaaaccggagtgaatgcaaccagtctaccgacagcctggaccaaaggacgtcttcacgagttttgtgaagactacaaaatccgtttcctgacagacgggtattgtccgctgagctatcatcccctttatctggtatgccggaaaaaataaatctggcattgcaattcggctacagccccaattgcaatgctaaaatagccttacagctttcctaaatgattgaaagtattggttttcattaattgctctaattctgcaataatcattgcagtggctccccaaataaaattctctccgatcttatatcccggtgcaataattttatgatcgtgtcgtacaaaagagtgtgtggttttattccggtcatcgaaaagatcccttaattttactaaaatgactttttccacttcatcctgggataagataaaatcaggtaattgtaatgttgtcccgacaatcggagtaatattgaaattgctcaaaggaatatagatatcgctcaatactcccaggatagacactttttcttcgggtactcctatttcttcgtgacattcccgtaaagctgtctgtaaagcatcggcatcttctttttccatctttccaccgggaaaagcaatttgtccgccatgatattttccccggtttacccgtttgatgagaggaagggccaattcgttttcaaaaggaacgattaaggcaaggatggcactattgacaggaggacagggatgtacgccttcgattccttcgatatacttcgggcggggagccatgagagcatgtgctttttctccgggaaggacattatataaagcagttctgatttttctggttttcatatttctattactgatttgacaaagataagaaataaagatataagataagaaacatgtgttttaaattggacaaactatccgaaaatacaaaattataaataaaaataatggcgatttaaataaaaaagacttatctttaacctgttaaacgatagcttggtgaaataaatatgaaaattattccaattttatatggatataatgaaaaattgtcctatctttgtaatgccaatatattttacaaagcagtttaggactgttgattaacgtagcaggcattcggttgcctgctgctttaaatattcggttcttggctgatggggcaggtgaaaaacctggtaattttttgtaaaatattattggcaccccatcagttcaagggccgattttttatgtgtatatattccggatttggatgatatagagatttgacggggtaattgtaaaatttctctaattaaaaacttaacggttatgaagacaattccaatggtaccagcttgtcagaacatggaagaactccacaagctaacagatcttatttgtgagtatattcatcctcagatggttattttgttcggttattatgcaggtatggactttcataacgctttgaaagggtatgaaatgcttgttatcatggaggaaaaaccgacgctgacggttagggagttggtcggatatttaaagactcattatccgcttgataaccggaaggagaagaatctgtcccttcatatttttacagctgaatttattcatcatcgcacttctttaagttattttttctatgcaattagaaaagaggggatcttgttgtatgagagtgaaaattgtattttaaaagagtctgtcgcttataaaccgacccgttcttatcagcaaattgtcggcctttccgatcagtgtctggccttaggaagagcttttctgcaagatgcacagcgacatatcgacggtggtattccccgtttagccgcttattatttgtatcaggctgtcgtccaatttcttcgggccggaaatatggtacattatggctttctggccgaagggagagaagatttggtgacgacttacctgaaaatcagatactgtacgaaagaaattgctgccttgtggtatggagacggacaattgaccgaatggactttattcggacgcttgcaatcttttagttataaaacccgcttcagctatccgtataccgtcaactccgatctgttgacccgctgtctgacttttacctgcaaaacagagaaagtaatcaaaaaattttgtaaggaaaggatcaaattcttagagaccttatcgaaatcccgcgagaattcccaggaagagaaaagtgacttatcgaaggagtgaagacttgatcgggacgataagatttagtttataaatcatttgaactgaggtcctggcggattggcggattttcggttctgactttcaatcctgaacctggttccgccaatcagcaaggcactcgtcggttaaccgaaggttagccttatctttttctggctttgccagaaaatggacttatgactcattgtttcttcatcaatctgaggatttcaccgatccacagtaccagcgaagtcaaaccgacaatgatcccccagtctttccaacttaaaggaacggtacggaatacctctcctccgaattgtacaatcaaatactgcccgatgggaatgataaacataacgatcaggaaaccggtactgtcctttaaattcttgaatgcagagccatgagaaagaaaagctttcgcattgaacatattccagaactgtagcatcacaaaagttgtgaaaaatacagacagatcgtgtcgggacatgactccgtcgtttatggtaaaccaatacatcaggccgagcagcaataccgtaaacgaaagtcctatccccaggatgtaattccgcatcttgggactgatgataaaatctgtcgatttgcggggcatttcattcattactttggggttgggagggagagaagccagggcagctgctgcgaatgtatcaatgatcatgttcacccataacatttgagttacagtcaagggtaattcccggccgaacatcgaaccgatcagtacaatcagcaaagccgataagttgatcgtcagctgaaacagtataaaacgttggatattgtgataaagcgaacgtccccacattacggctgtagcaatactgttgaacgaatcatccaataaagtaatatcactggcttccttagccaccgaggttccggagcccatggaaagtcccacatcggcatgattcaatgccggtgcatcgtttgtaccgtccccggttacagctacgactgctcccgattgtttcagcagttcgaccagacgttgtttgtcggtagggcgggcacgacacattattttgagtttcaaaacccgtttcgccgcttcttcgtccggcaatttttcaaagtcgactccggtgataatctgttcctccgaatcttcggatttccaaataccgatctgccgtccgatttcccgggcggttgccggagtatctccggtgacaatctttacatcgattcccgcattcaaacatttggctactgcagcggggacatccgaacgtaccggatcggaaatcgccgcaattcctaaaaagataaaatcttcctgagcgatagcttcgatctcgccttctgaagcagaatctactagcttataggcaaatcccaatgtacgcatcgcctgattctgaaagtccagcaattctttttctacagtagcatgatattcttgtgcaggaactaaacctgcgggggtttctacctgtttacatttggcgaatacaatttcgggagctcccttcagatagagaataagctttccctccagcacggagcggaccagggttgccatgtatttccgttcggtagaaaaggtcaattgttccaaaatttcagtattatcccggtaatccatataattgaccttctgctgatgcagccaaagtaataaagcggcttcggtcggatttcccaaggtcttgatctgatcgttaccgtattccagataggccgttgaattgatggaaatcccttccttgatcaatacctgaaggcgattatcctgttgcagttcttggtccggcaaaccgtaaaaccgggtttgataaacctgcatttgattttgagtcagggttcctgtcttatctgtacagataacggttgtggctcccatcgtttcgcaggcatgcatcttacgtaccaaattgttcgtctttagcattttacgcatgcttaatgcaagacttagtgtaacactcatcggtaagccttccgggacggatacaacgataagagtgactgcaaccatgaaatatttcaaaatccttcctgccgtttctaaagtgaagatcgtatcggcagtgaaaattccggctataatatcttttgtaagtaatccgacaaaagtaaccccggcaactgtaaaaccgataatactgataaacttggccaggccttccagttgtttgctgagcggagttttatcgtgattgatctctgtagatttttgggccacttttccgaattctgtagcgtcacctactttttctactttgtagacacaatgcccgttgactatagtggtacccctcatgattttgttggaagggtaggtagcctccggatcgaaatcggcaggatcggtagtcttatcgatgaccggttcgcccgttagggtagattcgttcacttgcaaagaaatagcttcgatcaattctccgtcagcgggaatttcttctccggtctcgagtacgacaatatcgccgactacaatttcacgtttaggtatttcgtgtatgtttccattgcgaagaacctttatgtgtatatcatcattgacctggttcaataattcgaattttttattggcatccatttcgaaccagaaaccgactccggtagccagaaatatagcgaagaaaataccgatcgtctctgcatattcattgtgcatgatagaaataatcagcgacaagacggctgctaccaacaatatacggataatcggatctttaaatttctcaaggaaaagtttccacaaaggagtatgtggaggtggagtgatgatattttctccaaattgtttgcggctttgctgcacttctgaatcgttcaagccggaataatgttttgtttccattttagctgtgtgtagtatattttaattcttccattcgtaaataatctttttgattgcattggctgacttcaaattctataaacgcataaaaaagaacgcaatatgggaatagggcagaaacgtgtaaaaactattttcctttctcccgcaggagaaaagcaagttgaaaaatgatatttttcagcaacagagtgtaatagatttttccggttgcgcgaactggatggacagatacaattttcgtcgtcctccccatacagggtataatctgcaataaattcagtctcgattccgggatactggccggcaaaagagatcggttcctgatcggctccttgctggaaaacagtaaggataacgaccagtatccccccaaagaagtaccttttccaatgacaacagtcacaacggttaatttctgaaacccttgttatccctgaaatctctctaactattaaattctgctttgtcatacgtacgcaaagataaagcaaaacccccgatattttatcctgctatccggaaaaatcgatcgaaagtaagaaagtctgtgataaaaaaagcaaatcgtttaaccggtggcccggctaaacgattttatataacatagcaatagatcgggaacttagatttttgaatttacaatcttcaaaatttcagcttccagttcattggctttttccacgatagcttcaccttcgcgtatgatttgagctgcaaattccttatcttccaatccggctgcattgatttttacattcagaaatgctcccatgactccggcgcgtgctgccaatgcacctacgccggcatccgttacggaattcgggttacctatttcagccatagctttggctacagacatacattcgtaacattgtttcatcgttttgaacggtacttcggtagcatagcgggtagcatcctgaacagctttctgccgggcagctttttcttcttcggattttttaggcaaactgaaagcatccatgatcttattgaaagcattggtgtcttcgtccaccagtttgatcaattcagtctgatatacttttcctttttcagcccaatcgctaaattcttcccaacggtcgtcccatccccgtttgtgtgaggagaggttggcgaccatcgaaccgagagcggcacccaaggcccccatataggcagagatcgaccccccaccgggagccggagattcagaagccgtttcgtcggcaaaatcggttaaagtcatgtctaccagttttttcttacctttcgaagcttcttcctcgagaatatattcgatgatcttctttttcggatcgaaaggatataattcgtccaatcccaatgatttgacggctattttgatcagctctttgtcggatacccccgtagaacgttgttgtttacgcaggaaataccgaccggcgtccaacatcgcttttaacggaagtacaccgacaagttcggaaccggtaacccgaatgccccggtcggcagccttacggcaaacttcgtcgaaggcttcatgcatggaagtcacggaaatatccgtcaggttcatagagatctgagctattccatattcttctataaaccagccgatcgcttttacagatttcaggctccccggaatcatcaccggctttcctttttcatccaatacttttttaccggtgatcgggttgccttcccgtttcacccttccgcgttcgcgtacatcgaaagcgatcgagttggcccggcgagtagaggtggtattcaggttaacattataagcgaccagaaaattacgggcaccgactgctgtagctccggtcttggcagtccagctattcagttcacggggaccgaaatccggatgccactgttcactggaaagacgttctcccaaagcttcatattctccggcccgacaagtagctaaatttctccgttccggaacaaaagcagcactttcgtaacaatataccgggatattcagctctttgccgatacgctcggctaatttccgggcgtattccacggtttcttccatcgtgatattggaaaccggcaccaatggacatacatcggttgctccgaagcggggatgagctcccttgtgtttggtcatatcgattaattcggcggctttcttgactgcccggaaagctgcttcacaaatcggttcgggttctccaaccatagtcaccacagtacgattggtcgccttaccgggatcgacatcgataacactgattccttcaacggttttcatggcatcggtgatctgatcgatgatatgcatgtcgtttccttcgctaaaattaggcacgcattcaattaattttttcatggtatataaactttaattttaagtatgtttcagtcgatttcaattaatattgttctccttttaagaaaatcgcttctattaaatcagccgtataggcatagggtaagtattcgatgcccgaaataggagtcgttatataaaagttggcaagtttaccgacagcgatactccctgcttcttcttcaactcccatcgcataggccgaatttaaagtcgtcgcattgatcacttcttcaggtaacattttgtaattgatacatcctaaggacataatgaatttcatattaccggaaggagaagaacccggattataatcggaagccaaagctaccggtaaaccggcctgaatcatcttacggacgggagaataaggcatattcaggaaaaaagcggctccgggcaatacggtcggcatagtttcgctttccaataaacaggcgatttcttcttctcccatacattccaggtggtcgacagaaattgcattgtatttcacaccgacttgcacaccacccgagtagtcgagttcattggcatgtatcttcgcacgtaatccgtatttcattccggcattcagcatccggtcggtatcttcgacagtgaagaaacctttgtcacaaaatacgtcgatgtaatcggccaattcttcggcagcgaccattgggatcatttcgttgataataagatctacatattctgtttgtctgcccttatattccaaaggtacggcatgtgcccctaaaaaagtcgatttaatcaataggggagtttcggctttcaaacggcggatcaccctcaacatttttaattcgctttcggtatccagcccataaccactttttatttcgactgcacctgtaccgaaaccggcgatttcctgaatccggtcataggctgcatcgaaaagctcttcttcagaagctttacgtatcctttcgcatgaattgagaataccgcctccgcgtttggctatttcttcgtaagaaagaccacggattttatcgatatactcgatttcacggcttccggcataaaccagatgagtatgagagtcacaataagagggcatgaccaaacggccggttgcatcgatttccttgacgatatccccgccggcatagacagcctcccggtctaaatcctccatttttccgaatccggcaattttatcttcttcaacaagtaaataagcattttccaggatacctaaccgggccatatctttacctgcaacccatttgcggggagatagttccgtttgtaccagctgttttatgttcagaatgagtgttttcatctttcgtactttttaatgtttatagccgcacgaaaatattaaaaaaaacgaataaaaacgcgctttaagatatatttaaaacgtttgtgcccgaagattttacccggcagatgttcgccgcttaactgaatacctgaaggcggttggcatccagacgtaaaaagataaagatcaaaatagtaaatgcccaaagggaagaacctccgtagctgaaaaaaggcagggggatgccgatgacgggagccattccgatcgtcattcctatattgatcgccacatgaaagaataaaatgctggctaccccgtatccatagatgcgggaaaaatccgaacgctgacgttccgccaggtaaataattcttaaaataaaggccataagtagtccgatcagtatggccgaaccgacaaaaccccattcttcgccgactgtacagaatataaaatcggtactttgttcgggaacaaaattgaatttggtctgggtaccctgtagaaatccttttcctaataagcctcctgaacctattgcaattttagattgattgacgttataaccggctccggtcaaatcggtttctatccccaataaattattgatccggtctttctggtggggctgtaatttttcgaaagcatagtcgacacctaccgtcgctccgatacaaacccaggaagccagtaaaacgagcagtatatgcttcatcttacgcttatatataaaataaataccgatcaaaccggtcgataaataagcgtacaataataatctttcatttccgatattgaattcaaataaccacttcaaaaataataaaaataggaagcagcttaccaggaaaataatgatccgataaaattcctgtttattctgacggtaatacaggaaggctatcaacgtccctgcaataatcagagataatacgacgatggggggatagatcagggtgaatataaaaatagctatagctataaaacataataatagaagtgaaccatgtaaaccttctctatacattacaaggataaacgaactgtataccagtgcagaaccggtatcgttctgcaagacaatcaaaccggccggaatagccaataacaaaccgatcaatgccaggcttgaaaagcgcatgattttaaaaccatgcctgctcattacattcgcaatagccagacaagtagcgaattttccgaattcggccggttgtatccggatacctccgatttcaaaccacgaacgggctccatgggattctaccccgaagaccagtacggcggccaaaagtccgaccgtcagtccatagatcacaaaagaaaaagcggtaaaaaatttactgtcggtaagtaagataaaaatacccaatacgaaggcagccccgatccacaacaattgttttccgtatttcaggtcgatatccaaaatattgctgtggctttcatcgtatacagccgcatagatattcagccatcccataaaaaccaggagggtatataagaaaatggagagccagtctatatttttcaaaagttctgattgcctgttcataattccaagattaatcttcttcgttttgcttttcttctgctgtcttcaaatgctgttctttcttcggagtttccgggataatcagattagagttcaacattctttcctcaattgcttttttgcggggagcgatcttgcccttgaggtatttctccataatcagtcctccgataggtactgcatattgggcaccgaatcctccgttttcaatatagatagcgatcacaattttagggttgtctttaggagcgaaggccatgaaaatggagtgatcctctccatgcggattctgagctgtcccggttttaccgcatatgactaccgaatcgatagaagccccgcgggccgttccgctgctggctgccatcgccataccttctacgacgatatcgaagtatttccggtcacagtcgaccgtatgtttctcgacctgattgttcgccccttcgatcggacgtacgatatgaggagtcatataatacccccggttagccaatacacaggccatattggctatctgcaaaggagtaagctccaactctccctgtccgatagaaagagacataatataactccagcgccaatcctgagtccggaatttgcgatcgaatagcggaggagtgggaattgaaccactgatctcattggagaaatcaggacatatcttcgcacctaaaccgaaggaacaaataaaatctctccattcgatgtaagcatcccgaacactatcgtatttccggttttccagtatccttcgccacacatttacaaaatagggattacaagactgctgaatagcctggtacagattcaggggagaattgtgattgtggcatcccatccggatccctccgatagctgtcttagctttcccgtaacattcgaaacaagtttcaggggtaatgacttcttcctttaaaccatacagtgcttgcagtgttttaaaagtagaaccgggaggataagctcctgaaacggtacggtcgaacagaggcttattgggatcctgattcaattttttataatttttacctctttccaggccgatcatcagttggggatcgtaaccggggctggaaactttcagtaggatttcacctgtcgagggttccatagcaatgattccgcctctcttatttcgcatgagctggtaagcatattcctgtaagtcgatgtccagcgtagtcgtgagattttgtcctacgatagcgggtttatcatatagaccgttttggtaagagccttttacacgattataattgtcaaccagtaggatttgttcccctttcgtacctctcagcagattttcataacttttttcgagtccgttgactccgatatagtcaccgggagcgtaggtgctgtcctgttcgaccaaagtttggctgacttctccgatatatccgaagacatcggcagaatgggaaacgttatactttcgtaatgttcgggtctgcatgaaaaatcccggatatttgtgtaatttttcctgcaatacggcatatttgttggccgtgatctgagagatcaggacagaagccttgaaaggagagtatttccggcatttgaccatatttttaatcagcatatctttatctatacccaaaatagtgatcagctcggttgtatcgaaatctttcacctgacggggaatcaccatgaggtcgtatgccggctggttttctaccaataatttaccgttccggtcaaaaatcaatcctctggccggatattgagtcgcaattcgttgagagttcatcatggcttttatctggaatgaatcgtctatcacctgcatataaaataagcggatgatataaatacaacaaacacagataatgatagccgagataactgttttccgatgtgtgtatttgttcataacaatctaaccgggaatttgaaaattcaatatgctcgaattcaattctattggttctgttttttcttcaaagctataaaataatatagcaagatgaaaaaagtagaagctaaagtgctgaataaaatacgcaggccggtgatcacgaaattgtggacactgaacgtttcacaaaggatcagcacggtgttgaaaatcgcagtactgataaagacatatttgaaaaaccaaccgaaatcactgattttctgttttccctgaatatcgtcgatctgttcccggtttgaagtcagcatcaacaaacggggacgaatataggccaataaagtcgttgccgcagcatgaatacccatggtgtggttggccagatcgacaaataaacctaaaaagaaaccgaaaaacaaaatcgttgcattacgtaaacggtaaggcagaatgtatatggccagaatataaatgttgatatagacgtaggagtgaagctgaatattatccaatatggtcaattggagtaatagcaacacgaagagatgtataacaaatttgatattactcatgattttccctccctaaagcctgttgttcttcttttctggtattagcgataatgtatacatccgagatgcgtttaaaatcagttgcaagttttacttttatcgtcagaaaattagccgtttccttatttaccgattctacgaagccgatcatctcaccttccgggaaaatactggaaaatcctgaagtcacaatcgtatcgcccacttctgtatctacatgaaagggtatgtcgttcagataagaataccgataatcgtctccgtcccattgaagtgaaccgtagtaaccgttttttttgattttcgctgagatccgaagattggtattgatcaagggtaatacccgcgcataacgattgcttactttctcgataataccgaccactccttcactcgaacaaacggccatttcgggtttgatcccctcagttgcgcctttgtcgataacaatataatttttagtcttgttaaaactggaattgatcatttcagctgttttgtatacataatcgacatcggcagaatcggtaggggcccataatgtatccgcattactgatccgattgagaagtttcagtttttcaatttcatttctcaattcggtattctctgcaactaatttttcgttggttactttcagatagaaataatcgtctacccgggtaaccacggaagatatggttccgaaaaatgatgctgtatagcctgaaaacacagttctctgatagttattgtgtaaaactatcagagaaaaggagaggacttccaacaaaataaaaattatagtaaaatgatattttaatatcagttttataatttctttcacagcctaatgggtttacctgatcaggaaagagaacttatcgacattctttaaagcaatacctgttccccgggcaacagctctcaacggatcttctgcaatatggaaagggatattgagcttatcggtcagacgtttgtccaaacctctcaataaagcaccacctcctgccaaataaattcctttattgacgatatctgcatatagttcggggggagtttgttccaaagctcctagaatagcgatttcaattttcgatatagatttctccagacagtgagcgatctcctgataagataccggtacttcgacaggtaacgaagtcatctgattcggtccctgtacgataaaatcggcaggcggttcatccagttcggacagcgcagaacctacatgtattttgatttgctcggcagttctttccccgatccgaatattgtgctgatgacgcatatactcctgaatgtcgtcggtcaaatcgtcaccggcaatccggatagatttgttgctaactataccacctaaagaaataacggcaatttcggttgtaccaccacctatatctacgatcatatttccttcgggagcttctacatccaagccgatccccaaagcagccgccatcggctcataaatcatatatacatctcttcctcctgcatgttctgaagagtcgcggacagcccggacttcaacttccgtacttcccgacgggatacaaacgacgatccgcaaagagggagagaagaacttactatttacacttgccattttaatcataccgcgcaacatttgttcggcagcgttaaagtcggcaataaccccatcccgtaaaggccggatggttttgatattatcatgtgtctttccctgcatctgccgggctttttctccgatagcgataaccttttcggtcttccggtcgatagcgacaatggaaggttcgtttaccaccattttatcgttacagatgataatcgtattcgctgttcctaaatcgacagctatatcttgtgttagaaatgaaaataatcccattttaaatgaacgttaataatttatgagcgtcaacctcaatggattgtttaatgcttaaaatgtctcatgccggtgaaaatcatagcgataccgtatttgttcgcagcatcgatagactcctggtctctgaccgatcctccaggctgtatgatagctgtaatacctgcttggtgagcagcttctacacaatcggagaaagggaaaaaggcatccgatgccatcacacttcccgcaatacgatcgcttccctgacggatagcgttttctaaggcccaaatccggctgacctgtcccgggccgacacccgttgtacacaaatctttagcgatagcgataccgttcgatttggtatgtttcactactttccaggcgaagagcagatctctcatttcagcttcggtcggttgccgttttgtgacgactttcaattccgattcatgaagtagctgggtatccgaatcctgaatcaataagccgccaagcactgttttcgctttgctggctttccggtttttctgatcgatatggtcgagttgtaataaacgtaaatttttctttttagtcaatatttccaatgcctctttagagaaagaaggagctacgatcacttccaggaaaatcttggccatttcggttgccgtggctgcatctatttcccggtttgccgccacgattccaccgaagatagaaaccggatcggcttcataggctctccggtaggcttctgccaatgtttctgcactcccgaccccacatggattagcgtgtttggctgcaactatagtcggttcgtcgaattcttttaaggtttcgagtgctccgtcggtatctccgatattgttgtaagaaagctctttaccatgcaattggacagctccggtaagtgtgccttgcgtccctagtacagaagcataaaaagcagcactttgatggggattttcgccgtaccgaagatcttgctttttctcgtaggtgagagtcagtgttttcgggtatttgatattcagacgttcggaaaaatatcctgcaatcagagcatcgtagtgggcggtgtggataaatactttcgctgccagcatttctttggtttcggctgtcgtatctccgttgtttttcaactcatcgattaccagtcgatagtcttcgggatcggtgatgaccgtaacgaatttgtagtttttagcagcggcccggatcatagtgggcccgccgatatctatattttcaatgatttctgcatgggataccccttctttcagaatggtttgtttaaaagggtaaaggttacaaaccacaatatcgatcggttctactcccagttctgccatctgtttccgatgcttttcgttgtcacggatcgccagaataccaccttctacattgggatgcagggtcttcactctgccgtcaaaacattcggggaacttagtcagatctgaaatatcctgaactttaatgccttcttctttcagttttttagaggtcccgccggttgaaatgatctcccagcccatagaatccagtgatttagcgaactcaacaatacctgtcttatcaaatacactaattaatgctctcttcatccggattatatttttttagttatcatccgagctatcggattttattcattttatacaaatcgtatttcgttgcaaaggtaaaaaaaaagaagattatttttatataaaatcgcagatagtgcattttttttatggatacacctattcgctgtgttttaataattgacaatgagtttattacctacttttgaaatgggatatcctttcaaggggtaaatttcataagtcagattgaaaggggttccgtaacgaagtgaaaattgagtgtgacaaaccggacaaacagccagttctccgtccaaatcttctttcgtaaaatgggaagtcagttcctggcagttggtacaggtggcatcccagcaagcatattcggtatcgttcaaacggatgacgacgattccttggccattatatcccaatgatttggcgtccggctgggaactggtcaggtaaataggctggccgggaacctgaagattactttcgcctcctattcctaaattaatctgtgtatataccgggacataaggaatgaggtgtttatccctgagtttttcgttgaatttatccccgcaaccgatatttattcccaaagtgatggaaactaataaaaaaaatactatttttgatttcatgaataagaaatttgcgacacaaatataataaatatgaatatctctacagcagaattcgattggatttccctgatattggtcataggggctggacttatcggttggataaaaagtaataatgcaaagaaaacccaagtcccgcctgttttcgaacagcccggtcagatcggggaagaagaagagattctgcccaatgtagaagagtatacaataactgaaaataaagatgtttcagatggaccggttatacaggaaatcgttgctgattattacagagatccgaaagtcatgattgacgacagggatgaattaccggccgaagaaaatgaagaggaagaacacgtacagttcgacatccggcaggctattatcagcagtgaaattttaaaacggcctcaatattaaaaccggataccgatacctgtagagaaggtgaataaataaggtttgaaatcgatgtcgtcattccgacttaaagattgcagaaaatatttgaagcccggctcgatcataattctgatgttagacgtgaccggatattccatccccaatccgatatccgtacttatattgaaattacggatatcttctgtacttccgatatattctttgtctcttccattccttaagaataccttgttatttacgataaaattgccgcttactcctcccgatacggcaaacaatactttattattattcagtaaataccgcacatgaagaggaatttcgagcgtaccgaaagtttgttcgatggtttcactgctgctactgttcaaactactgagcaaaatagcttccggactacggtaggcgacaccttgggtacgggttttaatatttcccaacggagtggcgatcatccggtcactatgttggagcgaagggagcatcatcgcccggactcccgagcctgctccggaagttttctgtcccatacgggaatagaataatcctgtttgtacggaaaatcttttattggcagagacagataattttaatccacctccgacattcatcaagccgtccatctggttactggaataactcactcccctggaattttttaacgaagaggaataactaccggatgaataggccggaacaaagtggccgctgaccatcactttgatttttcttttttcatccgttgtcaaggaagtgggcgtattcagtaatttctgatattctttttgattttgataggcttctttactggttaaaggaataaaattgcgttgaagcttccgggtagaaattgcatagtccggtgctgtctgctcgataaatccggcttcaccggctcgatgcatttgaatcggttctaattcagtcctcttgttttgtgctatcaaaaccggtacttccgtcaccgtctccttcgttacatattgaacggtcttttcttcttgtatagaatcggagaaggtatccggcaaattcgtggaatcttttgtttttaatatttctgtaccggtaataccggcaacttctatttcgggtgattcgacggaatagaacaaccaaattccgataaaagcggcgaccactgctgctgcagctgcagtgcgccaccaccacaacgccactttgtgtttgtttttgttcagctgtcgttctatatttccccagatatagggaggaggctcacaacttttatcctgaagggcctttttaaaaagatgatctaaattattgttcatggtctaaatattccttcacttttctttttaatatttccctggctctggccagattggatttcgacgtaccctcgttaataccgagtaaggctgcgatatccttatgggacatttcttcgatcacatagaggttgaaaaccattttgtaccgttccggaagttgatttacaaaatcagccaacacttcttccggaatgctgacctcttcgtctatgtcctcgttatcttcgatttcaggtaactcctctacaatttgcaatggggaatttttcctgaatttctccattgccgtattgatcatgatccgtttcatccatccctcaaatgaaccttttccggtatattgcccgatagaagtgaaaattttgataaatccatcctgcaacgtatcttcggcatctgcccggtctttggaaaaacggagacataatgcaaacatttttgcagaaaatatctgatagattttctctgctgcctgtctgtcaccctgtttgcatttatctattattcggtccaaattacacatcaatatctgttatagagatgtaagaaatttaaaaaggttgcgtccctgataaaaagaaaatcagaaaaaatgaaatgatttaccaatgttcacaattccattatgaacattggtaaatatgagtagaatagaagccggatcatagtaccggtttggtcttttcagccagccattgagcttcctcgggagtcagataaggtgcagttttttcacagactgttttgtgatagtcgttcagccattttttttcatcttcacttaacaaatcaagtaatagagctgaagtatcgaagtagcagagtgttaatgtctcaaatccataccattccccgaattcatttttactgaccgggatacataaaatcatattttcatgccgaataccgtgcgaaccttcccgatacagaccaggttcgtcggaggttaccataccgggaaccacatcctggtttttcaattcctggcggatagcctgaggaccttcatgtacatttaagaaaaagccgatcccatgccccgtaccatgtccatagttccggcaagtttgccaaagaggctgacgagcgatagcgtctatattacaacctttggtacctttcggaaaaatgcatctgctcagtgcaatcattccttttaatacggtggtgtaatcttctttttccaagcgagttagttctccaagtggaactgtccgtgtaatatcggtcgtaccatgtgtatattggcccccggaatcgatcagataaaatccacgtggctgcagttctgcatcttctcccggaatagccgaatagtgaggcagtgctgcattggcaccataagctgaaatgttggcaaaactatcttctgcatatccgtcattttgggctctgaaagccgaaagttgttcggaaacagagatttccgtcaaatggttgccgatattacgttccacccaataaaagaatttcgtcagggctacactgtcttttatacaagcttttctgaacccttcaacttctatcggatttttgatggcttttgccaaaacaataggtgactcttgttcttttacctgaaattctgtaaagagtttatgatagacagcataatttaaggtggccgaatccacggtaaacaccgaatttttgtctagttcttccaggaataaaaacaaatgatgataatcccggatttctataccttcctgacttaattgacttgcgatttcgcgagagactttggtattttttataaacaaccaggctttggctttaccgacaactgcataactgatggcaacaggattgtaaatgatatcgttgcatcttacattatataaccaggcgatttcatccaggcaactgaaaagcatataatctgcatgtgcagcttgtaacttttcccggatcatggttatcttttcattagccgattttccggcagtagcggcaggtactaaaaagagttgggcatcgggtaaggaaggacgatccagccatatctctcctaatagatctgttttttctacaacagtaatctgtttgggggttagggtctcttgcagatttttcatgtcacagacagaaatacagaaactatccaaaccgacccgacttccttccggtaagttggttgccagccattccggataatcgaccgcttccggcactctcaatttatgcatctgtattcccgaatccttcagttgtttttccgcctgtataaaataacgggtatctgtccaaagtccggcttcatttttcaagacgacaaccgtaccgaaagatcctgtgaaaccggaaatccattgtctttgtttccaggctgccggtaaatattcactattgtgcggatcggttccggatataatatatgcatccagtgattcgcgttccataatggctcttaaagctgaaagtttttccttgatcgtcataatccagattttaaatttcaccaaatataataagaaaaattaaaattctagcagcggttgtcatcgagtagtgctattttctaataaaagaatagaaatgtcatacattacaattgtaatacatggggattttacaggaattaaaggttcttgtattacaaatgtaatcaaattccaaaacaacagaagtgaattacaatcttaactcaggggatttggaatattttacattttttatattttaagatatataataatgattatcagtattatatatcatattttgaataaattacttt

SEQ ID NO: 5996 - DNA, 1665 bp, Unknown
  gut microbiota DNA sequence
caactaattcgcaatattttatgtatgaattagttggctaattttatagtatttactgaatgtccctaaatagaaaaagggatcgggtacggtatcattcgtctgaccgatggaataaaccgccgatttgtccaaaacttcgggcaagtcagcggttttctctatattcttgtgtagttgagcggtattatttttcccaccagactttggtgttgatatcgtcaggtcctcccagcgattttactgcggcctcgtaattggttttattggtttgttggagggtggccggatagttgaaccgtacggggaccattttgttgttatccatgcctgctccgggtttcatttccgggagacctgtacggcggtattcgaaccaggcctgataatcacagaagaaagcggccagatgtttttgaagtagtatccgttcgagtgtcccgtcgtatgtggctttggggttgtcgaaatagtctccggggactacccctccccattgttcgattatcgcttctacggctttccggtagtggggggctgcctggtctgtgatcagtccccgccaggccatttcagctttgatgaattcaacttcggcataagtcataaaaagcactttcatcggtgccgtacctaatgttgcattaatattggaagcattgtaatcgaatcgttcggtggcagcaaatccgctcggataacctttataaccgatcttctcctggctaccgtcgtttttggtggcttcatccataaaaataggaagacgcggatcgttcaactccaccagtgtatttacaaaaaaggaagccatcgctttattggaacgaaaatcttcgagccggctaatgggtgagtcgtacggcgagataccggatatcggcaataaagctccgtctgcattgttttcaaataccggatactttaccggatttccgatcatctccgctaatttggccagactgttcatctccgaacgtttcgaaagcctcagtaaacttcgcatgtgcagcgaattggcgaattttctccatttcctgacatccccgtcgtataataaatcggtagaagataaactttcggattcatcgaaaagtgaatttgccgtttccagatcacttaatacctgttcgtagactttttgctgggtatcgaacttcggagttaagattccttcgtctccccggcaagcttcagtcatcggaacatctccgaagcagtcggtcagattggcatatacccaggctctcaaggtcaaggctaccgcctgataatttttactttctgcaccgacggccaattcatacatttctttgatattggtcagctggagataataagtattccaggtagaatttccggcattctgtaaatccgcataacgatgtactccgccggtagtactggtggtgaccataaactgcatcaaatgatgggtaaaactatgggcccggttataattgaaattggctaaatcgtaaagggtgggcgtcatcagagtcgaagggtcgattttttccagtcggttgggatcggtattgatctcgtcgaagttttgggtacaagcagtccatccggttgccaatagcaataggcctattattttttttcgtaacataaatctatttttaaaatattaacgaacgatgatcagaatttcagtgt

SEQ ID NO: 5997 - DNA, 35395 bp, Unknown
  gut microbiota DNA sequence
cccatggttcgggtagaaggtaattgtcccatttccgaacccggaacgatggtaccgttattcagggttgcgacttccggatcgtataccgggaaatcttttgtccacatggccagattacgcccgtacaaggcgagggtcaggcgttcgataccgatcttattcaaccccgccgagggaatcgtatattcgatacgggcttcccggagcttcaggaaagaagcgtcgaaagagttggtctctacattggcacgcctccaataatcggcgtagtatttggatacagagatcggtacattgttgggtacatactgcccccgttcatccagcatcacaccttcaccgacgacttcaaaattggggttttcccggtatttcagggtatgtttcaatgttccgtgttcggtcattttatggtgagtctgggaataaacgatacctccccattgaccgtcgaacaatatgcttacccggaaatttttgtaagaaaactcgttcgagaaaccggctttccaggcgggataggcattccctacatattcgaattcggttgtccgggccgtgatcccgtctttccaaacaacttgtccgtcaggggcccgttttagtttataaccgtaaatatcaccgatagaaccacctacttttgcaatcagggcacaattagtacctcctgtataagcaatggtctgtccatcggtcaaaccggctgccagggacaataccttgttgtaatttttcgcccaggtaaaagttgaattctaggtgaaattttttgtttttaccggggttccgtccagttgtagttcgataccgcggttacgcactttcccggagttcatcgttgctttggtataaccggtcgtttgatccatcggtacgtcgagaatctgattccgggtgatattgttataaaaagccagatccagtccgaaacgctgcttgaacatccgccaatccagtccgacctctatgctattggagatttcaggtttgaatctggcattgtaaagcgtgggagatacggaagccgatcccggaaaggcagaggtattataatatttggctgttttatagggatcggtatcatttcctacctgtgcccaggaagctctcaacttggcaaacgatatttgttcgggtaggcggagtaggtctgaaagtataaaactcgtactcacagaaggatagaaaaaagagttgttgccggaggggagtgtactcgaccagtcgttccgtccggttacatccagaaagatcttattggcataagataaggtggctgtgccgtacacactatttacccgtttgtttctttccgtaaaggtggtgatcggggcagcgactccgttactcagtttataaactcccggagtgatcaggtcttttacgtaagcctgttgcattttgtatttattgtccatccggttggctcctaccgatacactcagattgaaactgttgctcaattggttccggtaggtaagtagaacgtccgtattgttttcgtagctgaatacatcttgttgctggtaatatcctttggggaaattcttcagaccataaggacggatcatttcgcgggtatcgaaactcaggtcgataccggaacggatcatcaattcccatttcggtgaaaattcatagatgatcgaaccggttgcgacaacaccgtgtttttccatcggattcagacattcgtaggcgataacgtaaggattgtccaaccagggactgaacggacgcaatatttcccgtccttctttccctttcacccagcgttgttggtaccagcgtacatcgacgctcggattggtcaggatcataaaataagggatagaggagttgttatatcccgttgccggcagattatcgctttgccgtttgacataattgaccttggcggaaactcttaacttatcggttacctggttttggaaggagcccgatacggcgatccggttaaaacccgtgttcggcatgatccactcatttttggtataagtaagcgataggcgaacggcacttttttccgacgaaccgtcgatcgcaatactgttgacgagtgtataacctgtttgccagaatgctttacgatgatttctcttcacccatggggtacggaccgtacccatctgctgggtttcggggtcgtattgataatagagcgaaccgtccagtttaggcccgaacgaaagagctacattgcctgaagcggctccgtcttcggaatctccgtaagagtaatacagtttgcccgaagcattggtctttaaatcaccttgaccgtattcttcctgaaattcaggccagtgtaatacccggtcgaaactggagttggaattaaaagtcactcccaggtattttttctttttattcacgcctgatttcgtcgtcacgagcatcactccattggctgcccggcttccgtataaagcagctgcggtagctcctttcagcacctggatactggcgatgtcatccggattgatatcggctatgccattcccgtaatctaccggtacgtcaccaccacctccggctccgtaggagttcgagccatcacctgtcatctgactgtttaaaggcactccgtccaatacgatcaaggcattgttgccgtcgatattcagagaagcatccccgcgtaaagtaatccgggcggaggagatcggaccggaagaagtcgacaggatatttgctccggctacttttccgaccaatgcagaagcccagttggtcggtgtcgcatcggacatcatcttttcagtaacggtttgggtggaatagcccaggcctttttcttctctcttaatccctaaagctgtgactactacgccttccagttcttgccgttcttcttccagggtaacatcgatcactgttttgccgttccatttcaattcctgtgttttaaagcctaaaaagctgaaaacgagcactgcatctttatctgcttgccccataaataaagaataagttccgtcattttgtgttaccactcccagcgttgttccttttatcaggacggccaccccgggcatcggacttccctgtacatctttgacggtgcccgataacaccatatcttgcccgaaacctaacttacaggcaagacataagacccataaagtcgtaaaaattcgttttgtcatactgattttacacctacttttcatagtaattttaattattttttacaggtgtaaaagtatattcaagaaaaaacggaatcattacaaaaaagtgaagattccgttaacccgtcacgactcaactattttttatcctctcattgatcagatcgcggtattcccagtaagcttgttccaataacggcattttttcagcgaagaaagcatatattttatcccaatccgcgggatggtatagattgacatctttcaattcgaaataaatcacacttaacgggcgttcgcccatgccgaggtaatcttcgtcccaatgcagatcctccccgcaatccgctgccatgagtttccggtaagactgaaagcattcgtagatttcgtatcttctcaaatcgtttttatggtcgatttggaacaataccagagctttttgttcatcggcataaaatttgagttgggtagacttgattttaactcctgtcaacacccatttccggtaaatcttatgtttggaacaatagcgtttaaatccgttccaaaaattgattttaagctcttttgcttcctccttcgaccacataatcgttgaaaattgaatataaaaaaatgaaaataattatctttgcaaagatagaattaattgggcgaaagtttataacgtctatgccttagtttaattgcttatgttagaactaaaatacgattatcacagtatagaggccggatgtgacgaagccgggaggggatgtctggcaggtcctgtttttgctgctgccgtaatcctgccggataatttttccgacgaattgctcaatgactctaagcagctttcggaaaaacaacgggccgggctccgtccggtcatcgaacgggaagctttggcttgggctgtggctagtgtcgataatcacgaaatcgacaagatcaatattctgaatgcttctattctggcgatgcaccgggctttagaccaattgaaagtacgccccggacacatcattgtcgacggtaaccgttttaaaaaatacagagatattcctcacctttgtattgttaaaggtgacggtaaatatatgtccatagcagcggcttccgtgcttgcaaaaactcaccgggacgaatatatggaaaaccttcatgctctttttcccgtttacaattggaaaaaaaacaaggggtatccgacacaggaacaccggaaaggaatcgaacaggctggagttacggaatttcatcgtaccagttttactttattggactcacagttaaaaattcaattttaaaataagaacctatgcattaaaacttgctcccttcttttgtatttagtttattgcttttagcctttaccttttaaacttttactttttatatggctttcatcaattcgatattaagtattttcacccagaaacggttggcacagattgactttttcaaggccaatccgataaaagtacaacgggatacgttacaggaattattaactctggcagcaaacaccgaatatggtcggaaatatcacttcaacactattttgactgccgaacaataccgggaacgtttgccgatcgtccattatgaagacatccgggatctggtcctgcggactatggaagggcagaataatttgctttggcccgaagagatcaaatggttcgccaagtcgtcggggactaccgatgccaaaagtaagttcatcccggtaagtccttctgtacttgaaaattgtcatttcagagggggaaaagatgtcatcgctatttttaacaggctctatccggaagcacaggtatttagtggaaagactctggctttgggggggagtagcgaggtttctaaaagtaatagccattgccagtacggtgatttgtcggccattatgatttctaatacccctttttgggccaatatgatgaaaacccccgattcatctatcatgctgatgagtaattgggaggagaaaatcgagaagatatgtgagacgacgatcaaagaagatgtccgttgcctggcaggagttccttcctggtttctgacggtcattcataaaattttagaaaaaacaggaaaaagcaacctgcatgaagtgtggcctaacctggagttgtttattcatggtgggattagttttattccttaccgggaacaatacaaacgtcttctgcctgatcctaagatgaagtatctggaaacctacaacgcttcggaaggtttcttcggtttacaggatgatccggaagatgcttctatgttgctgatgttggactatggggtttactatgaatttcttcctatgagtgagctcggtaaaaccaaaccccggactttattattggaagaagtggaaaccggggtcaattatgcgcttatcattacgaccaatggagggttatggcgttatatgatcggagataccattcaatttacttcggttaaaccgtataagttcaggattaccggtcgcacaaaattgtttatcaatgcttttggagaggaactgatcatcgataatgcaacagaagcgctcaaacgggcatgtgcagagaccggcgcagatgtttacgaatttactgcggctcctgtctttatggaagaagggaaaaaaggcgctcacgaatggttgatcgagttcaatacacctcctgccgatccggagtattttgccggtatcctggatcaggaacttcaaaaattaaattccgattatgaagccaaacggttgttatctctggagcgtttacgcctgcatatcgcccgtcccggacttttcaacgactggcttaaagagaaaggtaaactgggaggacaacacaaagtgccccggctttggaatgaccggacacatcttgaagagttattgctgctggaccggaaataaaattcggacagggacagggcctccggaggggcttatagattgtaggcctgcagcttttaaagccggaccggtagctttgttgtgaaaattggaggggaagtgatagcttccccaaactgtatccggcggctttgtgccggtcagacaacggtttttccagaccatcccctgttctgttttccggctgttttattgttgaatgagttataccggaggctgtgggagtataccggtttcatggccggaaggtttatttatcggggaggagtaccactttttgccggggaaaaatatgtccgaaacggtcggtgacttcgatctcgatttcccgggctttttcagatggagtagcttcaaaataaaagaaagattcctggggttgggtatatttctcggtcttcaatcggccgacatattccagataatcgggatcatagccgttaaaacgttgcattgcccctttagcggctccgtcttcataccatttcacctgccattttttatcccagttccagaccttggcaatgacgctgttcggtttttctttcacagttccccggggaaatactttaaattgccagttgcgctcatggcctacggatttataaaaccattctatttccgagcctgtaatttcgaaaacatcataaccgttaggggtaccgtcacgattttcatcggctgtccaccaggttccgcagatggctcctatattgtgttcgataataccgggtttgatttcatggttggaattcaggtgggtatgccctgagatcagactgactgggtggtttttcaaaataccgaacaattcttctccgccggggatgataccccggtcagcataataaaaaggggaatgggtggcgatgaggattggagcattttccggaaggtactttaaaagttggcctacccattgaatttgttcctccgtcagggcttcggtatattttttatttccctcgtagaggatgttgtcgagtacaatgcaatagacttttcctaattgaaaagcgtaataagccggaccgaaatatttttcgtaggtgtgggcagaagctttgtccgacaagatttccttatcatgatcatgattaccgataacgggatagaaaggtatctttagtcgggccatttcttttttgtagaccgggaagtgttcgaaatgatcccagacgatatctcccagactgattccggtgaccggtgtagccgggggataacttgcaatcatctcttgcaggtcgggaatactttgggtctggaaacgctggaactgttcatccgttttggtttgtacgtccgcgatggctagcaggatatgatgactcctttttcctgtctcggtcagctggaagatataatcttctttttccggatccaaaggcagataaaattcaggagttcccgatcggtaatcggccacatatccatccggggtcaggaggtaaacgaaacgggcttcctggtcggtgtcgagtaggaaattcccttttgtgtctgtctgggtgaaatttattccgtcggtgatgacgacatgggataatcctttatttcctgcttttacctgtccacggataggcatacagaaagcagcatgactgagaatcagaaatgctgccgataaacaaattgtcaggttcatgatttattctttgattaagatagaattgaaaacagttaatatttcttcaggagatttggcctttttcagggctttttcgagctctccggtttcttcctcatagtaagcgacaaaggctgcatccaggcatttcgacagttctgccgtagctgtttgttcgttgatttcctgccggcggactgcttttttgaaataactgtccagcttcataaccgagttataaatcgcgggtttatagatttccatcgtgttatcggtgaatcctaccgttgctgtatgccggcggacatatactttctgagtagcatacagtttgcgggcaatccgatccccgaggaagtgctggggatattctttcaggtctgcatgattcaggtcgatcccataattggtgaatacaaattgaggagttttcgccggtataggagtactggctgaagctgcagtcgttccatgtgtcttgttatcggccagagccatccgttgagcttttaccgagaaccctaatgcgataagtgctaaaaataaaattgtaattttcatattctttttttattcaatgtgattttccttatttttcaatgcaaagtaagaacagagaaattacagcctggtgaataaattatttcgattcggttaaatttggggtaccgtaggtttggataagaaagttagttacatgtttgttttttcccttcggtttcctatttttgtttcggaaacatggactttttttcccgacatattattattatatttgttcaggtattttcagtaattctatgacagaggaagcgatgttattccggcgggtgcaggagggatgttgggaggctttcgatgtgctgtttcatacttatgcggaacagctgtttttttatgcgatggggtttgtgaataaccgggaggaagccagggatattgtgcagggaacgtttattactttgtgggaacagcgggggaagattcagtgtacgggggctatttatccttatttgttacgtttggtgaaaaatgcttgtcttaattatcaggtgcatgagaaagtgaaggaacgttatttgttggaaaaacgaatgacggaggaggaaggggaagaagtgccggcagatgaggaggaggagtttgaggtgcaatatgcccgtttgcggaaagtggtggatggtttgccggagaaatgcagggaaatttttattttgggatgcgtagatgggttgagttataaagaagtgtcggagaaaatgggagtgtcggtgaatacggtgaagacacagattaagttggcgtacaggaagttgaaattagaattaggagggcaaaattttgtgtgggagtggactgctgggggagtattgtttatattgatgcaaaaataattttcaaaaaaagtatttttcttttcaccctgatcggctatcttcttgtttagaagataggaaaagatagttaaagcctttataaaaaatggacttatggtagaacaagaggaaaagagatggttgcgtgctttgttggagggtgaggttgagccgggaagtgaggagtgggagcaagtctgtacggattctgcttttacgcgggtgagggagaaggtcggtgctgttgccagactggattttacacagcaggaagatgaggtggaggggatgtggagagtgttggtggaccggaggaagaaggggttggagcggcgggcccgggggcggaaacgtttattgcggtggatatccgggacggctgcggtggtggcgttgggaatcggaggatggttgtcgatccggggagtggaaagagaacaggtggttgtggtaggcggaagaacggtagagggtaggacagagttggtgttgccgaatggagagaggcgggtattgggggacgataaggtaagggtggtgtcggacagttgcggagagatgcggacggagaatagaacgctgattgtagagttgggagggcaggagacgaagaaagcggagtattatacgctgaatgttccttatggggaaaaatatagtattgtattgccggacgggaccaaggtatttttgaatgcggggacgacgttgaggtatccggatcattttgaaggagggagccgggaagtgtatttgaatggggaagcttatctggaagtgacaaaggatgcggaacatccctttgtggtgaaaacggaggaggtggaggtgaaggttttggggaccgtattcaatgtgaatgcttatccggaaggggagtgggtcaggacaactttggtagaggggaaggtagaagcggtttgcggaggtcggttgtttgtgctggaaccgggaatgcaggtggcttattcgaagggaacgggtgagactgagtataaaaaggtggacacacatttgtttacctcgtggaaagacgggtattatgaatttgaggagatggagttgggggaattgatgccgttgctgggacggtggtatgctgtaggagtggattttgaagaaccggaattgaaacggttaaagttcagtgggcgcttgcagcgctatgagacggtggcggatttggtgaaaatgttggaatacacgggggatgtcgtatttgaggtgaagaatgaccggattttggtccggaagagataaaagaaaaagcaggcagtggatctgatcaatcctctgcctgccggagttcaagatacctccggaaatccttgcaagaaacggaggtattcaattttaatttaaacacagcaaatttatgaaaaaaatgcaggacacagcatcgccagggcattttgtgtgcagacggatgctaatcttaaaaacttttctggtaatcctgttgtggagtacctgtctcgtttctggttacaggggacatgctcaggagagaacgacggttacggtgaacatgacggatgtcacgctgaatgaggtgataaccgagttgaaaaagcaaacgaagtatgattttttttataacagcgagctggtgaaatcgaagggtagagtgagtgtgcgggcacgtaatttagatctgcgggaggtgttggaacaggtattgacgccggtagggctggaatatgctattcagcaggatttgattacgattcgtgagagacgggtacagcaggaggtggcgaagatagagatgattacggtgagtggcaaggtgacggataaggatggtaatccagtggttggggctacagttgtgattcatggaacgacacaaggtgtggcgacggatgtcgacggtaaatattctttgatgacccgtccggacgatgtgttgacgatatcttttatcggttataaaacagaagtggtgccggtgaaggagaataaacatttgaacgtgattttgagcccggcgtcggaggatttggaagaggtgacggtggtggctttcggacaacagaaaaaagagagtgtcgtgtcggcaattacgacagtacgtccgatggacctgaagtcgtcaaacagtgacttgacaagcagttttgccggtaagatcgccggtatggtaggctggcagacagggggattgccggcggctttaacggaagatgaaatgaatacgaaattttatatccgtggtattacgtcgtttcagacaggggcgaatgtggaccccttgattttgttggatggcgtagagtcgtcgaagctggatttggcacgtatagctccggaagatatcgaaacattcagtgtgatgaaggatgcttcggctacggcgatgtacggtgcacgtggtgcgaacggagtgattttggtgacgacgaaaaaaggacaggaggggagtgtgtatgcgacagcacgttacgagacggtgttttcaatgccgacaaagcgtatcgatgtggtggatccggtggattatatgaaaatgtataaccgggcgcttttgacccgggatccgttggcaacgccgaaatatagtgtggaacgtatcaaccggacccgctcgggaaagtatccgtcttgggtttatccggcgaatgactggtataagattttattcaaaaactataatgtgaaccaccatgcaggtttgaatatccggggaggttcgaaggtaattcagtactatgcttcggtgaattacaaccgtgatcaggggatgttgaagacagataagttgaatgacttcgattgtaatattacgaataatcaaacggcttttcgtgtgaatttgacgattgatttgaaagccggtattaaattattgattaattcgtcgacaactatagataaataccacggtcctttgactagtgtcaatcaggcgtatgagttagcgtttaatgcttcgccggtagattttgcacctttatatccgggagatgagaattatgggtggccgcatctgcgtttcggtacgacagaggccaatcaggagaatccttatatgatgattcagaaaggatatctggaacggactcgctattctacgaccaatcgggcggagtatatccataacttatcgagcctggtaaaggggttggagttgcgggggagtgtggctgtgtcacaggcaggatattatacgactggttttacaaccaatcctttcaaatattctttgttgaattatgattttgaaacaggcaaacaccggttgcaggatttgtctccttttggtgccagttatgccttgtctatagatcccacagccaaggcttcgacgacagagacgcgtgttacgtatgaggcacgtgctttgcatacggcagcatggaaagagcatcagacctcactgacaggggtgttccaggctcaggattatacgtttacgccggtgtctaatgtcttgacaggtatgccacaacggaacatgatgttttcaatgcgtggaacgtatgggtttaaagaccgttattttgtagaggcaagttttggttataacgcatcggaacgttttgcaaagagtaaccgttgggggttattcccggcaggtggcctggcgtatgtgatatcgagcgaaccctttatgaacgggacagctcattggctgaactttttgaagctgcgggtttcgtatggcaaggtaggcaacgacggagtgattaaggttccccgctttttgtttttgcagacgatgggtaccttgacgaatgtattgaatccggaaccgggaggcagaccaacgatttacaggattgtacagggatatgcgaatccgaatttgaagtgggaagtggcggagcaggtgaatttcggtttggagaccaagttgttcaaaggggttgttgagtttaatctggatgcttaccaggagatccgtcataatatcattggctaccgtgcctctgttccggcacatgcgggtattgctcttccacaattggataatatgggtaaggcccggtcgaggggtatagacttttcgggtaagatccagcatgcttttaacaaagatttgtgggtgattctgaacggtactttgacttataataaggttgtgtataaagaaatcgaggaagcgatgaataagccggcatggcaaagaatggtggggaaagagatttcgcagaaaatcggttatatttcggacggactcttccaggatcaggcggaaatcgaaaatgctccggtacaggcaggatcgcctcagccaggagatatccgttaccgggatttgaataacgacggaaagattgatgtgaatgatgtgacttatatcggttttccggagactccgcgtgtgacctatggcttttcaggttttgtcaattacagtaattttgagttcagttttgcttttcaggggtcggggaaacgttctttctttatggacccgagcgaattgtctccttttgtggatgaccatgcgatgttgacagctatttataaggatcactggtcggaagataatatgatccggaaacctttctggcctcgtttatcgacccaaaatttgattgaacattcgccggaggaggattggtataataaaaatgcaacagaggttcgcaagagtacttatttcatgcgggaatgccgtttcctgagatgtacttcgttggagttggcgtacaatatgccaaagaaattgatggaacgttggggactgcaaaatatgaagttttttgtgcgggcgaacaatcctttcctgatttccaatttcaagctttgggatgtcgagttgggtgaggatgcgtttaactatccgatacaaaagacttataccgttgggttaaactttagtttctaatataaatataaggtggttatctatgaaatatgtaaatatattattgattggtttggtcttgttatttccggggtgtacatttttggatgttgtaccggagggaaatattgaaagtatcgagagtaactttgagaaacgggaccaaacggagaattggttcaagtattgtcatttctgggtcagtccgtttaccacttccgtaatttcgaatccggcttatatggggacggatgaagtggttgcaggaacttatttgcgggagagcggttttaactggagtggtttgtatatcgcggatggtctgcagcgtacgttcgatccatactgtaatatgtggcgtcgggatgctgtgtataacagtatccgttattgtaatacttttcttgaaaaagtgtggggagtttataatatgacggatgctgaaaagaagttgtgggtagctgaaatcaaggctttgaaagcctattattattttgagcttttgcgtcattacggaccttttgttgtgatggacgagaatatcgatccgggtgttccggtcgaggatatgaaaaaggaaagaagtccggtggatgtttgtgttgaagagattgtaagccttttggatgaagcgatgaaagatttgcctttgatgaaagataaagagagaagccggtgggcttaccatagcctggagtcggctgcagccttgaaggcgatgaccttgttttatgcagcttcgcctttgttcaacggtaacccggcttatagcggttttgtgaatagtaagggcgagaagttgttcagccagcagaaagatccggaaaagtggagatatgcagcggaggctgtcgattcggccttacttatttgtaaccggggaggaaaatatctgatttcgagtgagagcgacaagattacggaccggataaaagatattgaagcatcggctatagccttgaattttgagaatgcagaggcgatttatatgttccgctatgagtcttttgtaaatggaggctggccgaaatggacccgtccttatttcaatagtacggatgaggattataatatggaaatgaaaggatgtgtggctccgagtctgaaaatggtggaaatgtattatacggaacacggtttgccgatagaagaggataaggcgtggtggaagtatgaagagcgttacacgatgggaacggaagacgacaagaggtataaggatgtggtggctatggacgagaaagtactgaaattgcatttaaaaagagaaccgcggttttatgcgcatattgctgccgaccgttgttattaccagctcggtaaaaagaatgtactggtagaggcttaccgtggtgagcgttttggtacgcgggaggcttccattacaaattctgttccgcaaaatttgaccggctattggatgaagaagggttcggattccgaagtttctaatgtaggttataataatgcttttacgaatgattatccttgtgtattgattcgcttggcagatctttatttgatgaaagcggaggcatggaatgaatatctggcggttccggatgaagaacatgtatatgcgcctttgaacgaagtgcgtcggcgtgccggtattccggatgtgaaagaagcttgggaaacttatgccaagaaccctggaaaagtggcgacgaaggaaggaatgcgtaagattatccaccgggagtgggatattgagtttgcttttgaaggaagacgtttttggaatctgcgtcgctggttgaccgcagtggatgaattgaatgaggaacaatacggatggaatattgtcgggcagaatgccagagagttttataataactttagagaacctgtcagggtttgggcaaaacggaagtttatctcgccacgcgattatctgtttccgcttcagagcgaagaggtgatgatatccggttgtgtacagaatccgggatggtaatattaatgatttaataggaataattatgaaaagattggtttatatatggcttgttgcctgggtcttgtggggttgtcagaaagaagaagcatatttcgatgttttggttccggcagatggcttgacgttttctccggtggagggcggtgcagtgatgcactatcgtttaccggcggatgagaaggtgtacagtatccgggtacgctaccaggacgggtttgggaaggatatgatccggaccggtagttatgcctgcgattcattgcttatcacaggttttaatgaggcgcggaaaggggtgaaggcttatgtgactttgtgcgataggaacgatgtggagtcggaggcgttagaagtcacctttgatacccgggattccggaccggtcgcttttatcaacaacttagaggtcgttccgggttggggtaatggttttgttttgtcttatgacttggaagagaatttgaaaggtatggctcacctgttttatgtgggggaagatccgaataccaaactgccggacacccttttatttaaaagttttgtgccgaaaaaaggtaatacggtgatacgggatactttcaaacagcaacgggacagttatgattttgtggtacgcgtagaggatttccgggggaatatggtaaaagaaagggtatggaaagacattgtgcctttggcgatagaacagttgcctgtcagtctgaataatctttctgatccggaggaactttcccaggaagatcccactgcgaagttaggcaagcaatatttgttggacggggataaaaaaggagatcaaagctttggtattgaatcgtggacgagtttttatacctacttggccggtccgatggcggtatctacaccggagaaacccgggaaagccctgtttattattgatatgatggaagaaaagttaccggcagaggtccgcctgtacggaatgttggcagtccggaccagttggccctatggccccggccaatatgaaacttttccgaaatggggagatgtgtggacgatgtgttatgcgagcaagttaccgagcagtgtgactctttacgcatcccaaacgaaagatgacgatgcctcgtgggtagagatttcacatttcgaacaagaccggagaattgataataaggaacgttggtgtgaacgttgtaacgagaatggggattatctcattgtttctcgggatgccttggatttggcttcaccttgttttattaccttgacttgcccggcagaaggagagaaataccgctatctgaaagtggtggtgaacgaggtcttttttgcgcctataggttttgagaatgcttttatgggtggaaatgaccagaaatatgtgacggtgcatgaattggaagtttatacagcaaaagattgatattatgaagaaaatatatttatggctcttgctccctttgtcgattttcgggggctgtgaaagtttggaagatacgtataaagattatgcaggtgatggcccgattcgctatttggtgaaatgtgacgacctggatgtcaaagccggttggaatcgtttggtagtttcgtggaaatctgtggatgacccgattatcgataaagtaaaagtttcttggacggtagatgggatcggacgggatactttgttggaaagaggtacgtttgcgtgcagcctgccttgtgacggaaatcttacttaccaggtgtcggtagccaatatggataaaaacggtaatacttctttagctgtaacccaggtaggaagaccttattcgcctgaacatgagcaagtattgattttcccgactatggtgaacaaacatttttatgtacaagatcgtttggcgctggtcctggatgagtggggaaatcagatagatagcattgccttcgtatatacttctgccggacagggcaagagaacggttatgaaaagcgcaccggagagtctttattatttactgaaagataaaattgatgcagagacaacattaacagtacacagttacggccacctggaaggatgtgtagatgcgattgtagtatcgactgaattggaacgtgccagagtgtatacagatggctttaaagcgctgatgttaacaagatacggtattgctgagctgacggaagaggctgttgccggtttggaaacccttgaaattgattacgacatcgatagctttgaggatattatgaatatgccgggattgaagaagttggtattgggcaagaaccgctatttgagtgaggaagtattgggagaggaggttagtgccagtaaaatcactgaccttgaaataagtaaatttgcgatggaagtgatggcggaacttgtttctgactttaaggtagaacgctacaataagcattatttcccggaaacttatgattttgttgaagaaaaaggaaatccggtactgcctgatttgacttatctgaataacgagacatggacttatgagtgtgttgtaactccgaaagaaggggattattattccaaaggctatgagagattgtttgacctaaatgcgacagcctgggcaacatttaatcattatgattttttaaaatatgaaataacagttgatatgcaagagacaaagcgggtaaatggttttgcaatagaacaagttgcctctgatattgcaacttctccaagaaaacgggcttttatggcacgaaaagtacaggtccagttttctgtcgatggaagtgtctggactgaggcaatagattatacgttgggtacaacccttggagaaatcgaccttttgtcaatagctgctcctacaaatgcacggtatttgaaattcgtgttgaccgaccaaaattacagaaacgtatattcaatttcactacaaaaaatcagaattttctaactgggataccctaaaaagggattgtttgataagttctattcagttttttgttattggagataaggctttctttctgattatcagattgaaagcctttgttttatccggcttgctttcgtacggtcaatgattttcgtggcatgcattttataactatttgcgtgtctaagaaatgtttctatctgcatttactattaacattttgcgtttttcaaattatcatcaaaaaaatctgttacgaatggaatcattccaaataatagaatacagaaaaaaatctgtataaaatatgtcatatttgattttaaattctataaatttgacatgctagatcgaattagtttaattttaaacaaaaccatatacttatgaagaagcttatttcagtggaagaggcagtagcaaaggtaaaagatgggatgacggttatgattggcgggtttctttctaacgggacacctaacgcaatcgttaacgctttggctcaatcggaagtgaaaaatctgattctcatcgtgaacgacaccgcctatccggataaaggatgcggacagttgatcgctaacaagcaggtgaagaaagtgatcgtgtcgcatatcggtacgaatccatgtacgagtgaacaaatgaacagtggtgaactggagatcgaattcagtccgcagggtactttagccgaacggatccgttccggtggtgccggtttggggggagtattgactccgacaggtatcggaaccctggtagcagaaggtaaacaagtactgaatatcgacggtaaagattatttgctggaaaaaccgttgcgggcggatgtggctttgatcggtgctagtgtaggggatgagtccggaaatttagtctataaaggtacgactcagaatttcaatccactgatggcgacggctgccgatttggttattgcggaagtgcaggagttggtagaaaccggagatttgtatcccgagctgataaagactcccggaatattcgtggattttttagtgaaagggtagggggataagctaaaggcgaagaggcaaaaagcggggaaggtaaaaaagaggtgtaatcgaaagggatgggtgtagatctgttccggttaatttaaaaatatggaaaaatcaatgataagacttcggatgagcgctaaagatgctcattatggcggaaatttggtggatggagctcatatggtgcatttattcggcgatgttgcgaccgaactgctgattatgcatgacggagatgaaggtctttttgtggcctatgacaatgtggagtttttggctccggtatatgccggcgactatatcgaagctgtcggtgaaatcgtgaaagtaggaaatacttcccgcaaaatggttttcgaagcccgtaaggtggtcgctgcccgtccggatatttcagcttcggctgcggatgtcctggctgaaccgattgtggtttgccgggccagtggaacctgtgtggtgaaaaaagaggatcagcggaaaggataatgtaagttaatagtcttgataattatggaaaaattgattataacagctgcgatctgcggggcagaggtaacgaaagaacaaaatcccgccgttccttatactgtagaagaaatcgtcagagaagcaaaatctgctgtagatgcaggtgctgctatcgttcatcttcacgtacgtgaagacgacggtacgccgactcagagcaaagcacgtttcaaaacgtgtatagacgctatatatgaagtatgcccggatgtgattctgatcccttcgaccggaggggctgtaggaatgacagcggaagaacgtctgcagccgaccgaacttttcccggaaatggctaccctggattgtggcacctgtaatttcggagatgaggtatttgaaaataccatgcctatgatgagggatttcggtaaaagaatgctggaaaaccggatcaaaccggaatacgaatgtttcgagatgggacatctcgaaaccgtattgaatatggcaaagaaaggtcaggtaccgggagctcccatgcagtttaattttgtactcggtgtccccgggtgtacgcctgcaacagttcctaatctttgctggcttgtaaatgctattccggcaggttctacctggactgcaaccggtatcggacgccatgcctttactttggctgctcctgctatcgctatgggaggaaatgtcagagtggggttcgaagataatctgtatctcgaaaaaggggtgttggcaaaatccaatggcgagttggtagctaaggtcgttcgtatcgctaaggaattgggacgcgaaatcgctacctcggccgaagcacggaagatattgaatttgaaagctaaaggctgaaaagctataggctataagtcgaaaggtataaagtgaaaaaattaaagtaaatattaaaaaataaaacgttatgaaaaaaggaaataaatacggaacgcatagagtaatttcaccgaaaggagtattaccacaaccggctgacaaactggataacaatatggacgaaatctatgataacgagattttgatcgatgtgcaaactctgaatatcgattcggctagttttactcagattgaagaacaagccggaggggataaagctaaaattgccgaaatcatgctgggaattgtagagaaacaaggaaaacaccgtaatccggtgaccggttccggtggtatgttactgggaacggtggaaaaaatcggagatgctttagttggaaagaccgatctgaaagtgggagataaaatcgcaactttggtgtctttgtcgctgactccgcttcgtatcgataaaattaaagaaatccgggcagatgtcgaccaggtggatatcgatggtaaagctattttgtttgaaagtggtatttatgcgaagattccggcagatctgccggaaaagttggctttgtcggctctcgatgtagccggtgctccggctcagactgctaaattggtgaaaccgggagatacggtattgattatcggtgccggtggtaaatcgggtatgttgtgttgctatgaagcaaagaaacgtgctggtgttaccggtaaagtaatcggtttgtgccatagccagagaagtaccgaacggcttcagaaattaggcttctgtgattatgtattctcggccgatgcaactcagccggttccggttatggagaaaattgccgaactgacgaatggtgaaatgtgtgatattacgatcaataatgtgaatattacggatactgagatgaccagcatcttgtgtactaaaaatgacggattggtctatttcttctctatggcgaccagttttacgaaggctgctttgggagcggaaggtgtcggcagcgatgtgactatgatcgttggaaatgggtataccaaaggacatgctgagattacactgcaggaacttcgtgaaagcgaggcattacggaagatatttacagagttgtatgcctgaatggtcgggattttataatcccgacgaattaaaaatatgtttttatggctagcagaagaaaagagtttttccctgaagtgaccgatgaacaatggaacgattggcattggcaggtgaagaacaggattgaaactttggatcagctgaagaaatacatccggctgacaccagatgaggaagagggtatccgtgagtcgctgaagacattgcggatggcgatcacaccttattatctgagtctgatcgatcccgataatccttattgtccgatccgtaaacaatcggtgccgaccattgaagaattacaccggtcaccggctgatctggaagatcccttgcatgaagacggtgattcacccgtaccgggactgacccaccgttatcctgaccgggtgttgttcctgatcaccgatatgtgttcgatgtattgccggcattgtacccggcgccgctttgccggacatcacgattgtgccactccattggaaagaatcgataaatgtatcgaatatatcgctaataccccccaggtgagagatgtcctcctatcgggaggggatgccttattggtcagtgacgaacgattggaatatatcatcaaacggctgcgtggaatccctcatgtcgagattatccgtatcgggtcgagaacaccggtggtgttaccccagcgcattacgccggaattggtaaatatgcttcggaaatatcatccgatttggctgaatactcatttcaaccatccgaacgaaattaccgaagagtcggcggctgcttgtgcccggctggccgatgcgggtatacctctgggaaatcagtctgtcctgctccgcgggatcaacgattgtacacatgtcatgaaaaaattggtgcacgagttggtcaagatccgggtacgtccctattacatctatatctgtgatctttctgtgggtatcggtcatttccgtacccctgtatcgaagggaatcgagattatcgagaacctgcggggacatacttccggttatgccgtgcctactttcgtcgtggatgctcccggtggaggcggaaaaattccggtgatgccgacctatctgatttctcagggccccaatcgggtggtgttgcgtaattttgaaggcgtggtgactacgtataccgaaccgacggattacagagacgaatgccactgtgaagagtgtgagaagcgccgtaaaacagaaggagtggctgagttgctgagcggagaacgcttgtctctcgaaccggcgaatctggatcgtaagacacgtaatctattggcgaaaggataaattatttgtgattttggatttaccgtttcattcgattgaaaggataaatccggaatcataaatgaaaatgctgaacagatgggttttgttgatgacatatccgattacaggagtctggcaattgtcggattggagaaaaatacagggaaaacagaatgcctgaattacatccttcgcaggataaaagattcggcagatcggttcgctctgacttcgatcggaattgacggagaaaaccgggatcaggtatgtcaaaccccgaaacccgagattatcgtgccggaaggaatgatattcgttacttcggagaaacattaccgggagaggaggttggtggctgaaatcatggaaatcgatgatcatcggactgctttgggacggttggttatcgccagggctaaaacttcgggaaaagtattgctttcagggcctgcggatactgccgggttgaaaagtctgatccggcatatgaaagatttcggggtacgaacgaccttggtcgacggggctttgtcccgtttaagcctggcgtctcccatcgttacggaggcgatggtcttagcgacgggggctgctgtttccgggaatattcgggaattggtgagacgtacccgttatgtttgtgatttgatcgatctggaagaggtggacgaagttttacaagagaggttggatgctattcaacaaggtgtatgggcggtcgggccggagggagaatgtatcgatctgaaattgccttctgtgtttatgctggagaaaagtggaaccgatctgctgcaatatgggcatcggatctttattgccggtgctgtgagtgataaagtatttcagtttttacgcgtacagaaacagaccgtagaattgatcgtccgtgattttacccgtgtttttgccgcacctgagtctttttatgcctttttacgtaagggcggaagagtacaggtgcttcatcgtagccggcttttggccgttacgatcaatcctcagtctccgggaggattacttttggattcgttgcgtttgcagcaagcattggaagaaagcttgcaaattccggtgtatgatgtgaaaaaaatagaaaaagtcggtaaaaaccgttgaggatatgattttaagggaagcgataagacaagtcaggggattccgttatatgatcgaacaattggatatctgttcggctgtaggccggagggtattgtatgatctgccctggctcgattcgaaatctcggttggaggccgaatttgaacgtattcaaaagatcatggtactttttgaacaacctgaaaatgaatcccggctggaacgtttgactggtaagctgatgcaggtgagagatatccgggggacgatcgggcggatggcgatggagcaagtgttggatgatcttgaattgttcgaattgaaaacttttgctttgtgctcggaagaaatcaggggacttgtcgaagaatggcggattgttttactcccggaactggagccggttgtacgtttgttggatccggaagggaatcggattcctcatttttatatttatgatacttattcggctgagctggccaggctgagagctgaaataaaacaaaagagccttcaaggggcagaagaacgggaattagaagcgttgtatgtacaaagtgtggttttggaagacaaggtacgcgaagagttgtctgtgcagttgagaccttatcacgacgatttgaaacaggctttggaagcggtcggattgctggatgtcgtattggcaaaagccagacaagcaataagaggacaattgactttgccgcaaattccggaagagggggaaatggtgttcgaaggtcttttccatcctcagatccgggagattttagaacaggaaggaagagcgtttcaggctgtagatttgaaattggaaaagggaacgacggtgattaccggagccaatatggccggaaagacagtgttgttgaaaagtgtgcaattggcgcaatacctgatgcagttcggtttttatgtacctgcccggcgggcgggtatgccgctcgtggaacaagtcttgaccagtatcggggatgatcaggatgaattgaacggtctctcttcttatgcggctgagatgttgcgggtggatgaaatgatccggcaagtcaggcagcgaagtaaaattttggtgctgatagacgaattggcccggacgaccaatcccgtcgagggacgggcaattgtgaatggggtagtggattttttgactactcaccgggtgatggctatggttactacccattatagcggaataacggccgaatgccgtaaattgagagtgcggggatttgtagagaatcgggttgaagggaatatgaccctgaaaaatatcaatgagtttatcgattattcactcgaagaagacagcggagaagaagttccccaggaggcgatgcgtattgcctggatgctggggatcgaccgtggagtgttggaacgggtggaaaattatttgcaggaagaaaatcctgattggaaaaagacagtacagtagaaagaaaatatatatgaaaagtaaattaggaatagattttgataaagtcggacatgcccgtgaaatggcccgtaagattgctgaccaggtgcaggattttgtggatggctatacgacagtggctgtcgaaaggacattgtgtcgtttgcttggtatcgacggagtggatgttcatgctgtccctctgccgaacattttggtagacgagctgaaagaaaagaacgtgttgggagaaggaattttattctttctgggtaatgtaatggtggaaaccggaatgactccgcaggaaatagccgaacaagtggctgccgggaaagtagatgtcacccgggtaccggtatgtactcccggccagcgggaaaaagcgttgcaaccctatatcgaggccagtatccgtcggatttccgacaaccggaaacggcgtgagaattatatcgcaacgatcggagagggagcaaagccttatctttatgtcattgtcgctaccggtaatatttacgaagacgtggtacaggcacaggcggctgcccggcaaggggcggatgtcattgctgtgatccgtacaacggggcaaagtttgttggactatgtaccctatggggctacgacagaaggattcggcggaacttttgccacccaggaaaattttcggattatgcggaaagctttggatgaggtaggagaagaagtcggtcgttatattcggctgtgtaattattgttccggtttatgtatgccggagattgctgtgatgggagctttggaagggctggatgtgatgttgaacgatgcgttgtatgggattttattccgggatatcaatatgcagcggacgttggtcgaccagtttatgtcgcgggtgatcaacggctttgccggagtgataatcaacacaggcgaagataactacctgactactgccgacgctgtcgaagaagcacatactgttttggcttccgatctgatcaatgaacaattggctttattggccgggctgccggaagaacaaatgggcctgggacatgcttttgaaatggatcccatgctggaaaacggctttttgtacgaattggctcaggcccagatgacccgggaaatttttccgaaggctactttgaaatatatgcctccgacgaaatttatgaccggaaatattttccgcggacatattcaggatgctcttttcaatatgatcggaatctggacttcacaaggtattcaactgttgggaatgccgaccgaagccatacatactccatttatgtcggatcgttatctgtcgatcgagaatgcccgttatatttttaataatatgaaaaatatcggagatgaagtggtctttaaagaaaacgggattatacaaaacagggcgaaagaagtgttggataaagctaccgttctcttggaaaagattgaacgggaaggactttttacagccttggaaaaaggaatttttgccgatatcaagcgtcccaaaaacggaggaaaaggcttggacggcgtttgtgccaagggaaagaactatagcaatccttttgtagagattatgatgaacagataacaaaaatcgtaaatcaaataaagattatgagcggaggtttatattcaacagaagggagagatttcgatcaaaccctcgatctgaaaaagataaaaccctacggggatacgatgaacgacggaaagacacagctgagtttcactttacctgtacctgccggagatgaagcgatagaggctgctaaacagttgatgaaaaaaatgggatttgaaaatcctcaggtggtgtttcatcaggaactgacgaaaggatatactttttttaattgttatggaaattgtgtacacacggtagattatagccatatctatgtgccgaaagtggaatcgaccaagtgggatatgggagagaccgatcagtttgtccgggaacatatcggtcggaaaattgtggtgatcggagctagtaccggaacagatgcccatacggtgggaatcgacgctattatgaatatgaaaggttttgccggacattatggtttggagcggtatgaaatgttcgaagccttgaatatgggtagccaggtgaccaacgaggaatttatcgctaaggctatcgagttgaaagccgatgctttattggtttcgcagaccgtgactcagaaagatattcatattaaaaatctgacggaactcgtggagatgttagaagccgaaggattacgggacaaagtgatcctggcttgtggtggtccccggatttcacatgagttggcgaaagaattggggtacgatgccggcttcgggatgaatacctatgccgacgatgtcgcctcgtttattgcgcaggaattggatcgaagaatgaatcattgaaaatatacaagctatggaaaaagaacaaatcagggaagtgattgccaggagagtggcaatggaactccacgatggagacgtggtgaatctgggtatcggtttgccgactttagtgccgaattatctgcctgaaggtgtcgaggtcattttacaaacggagaatggattgatcggtatggggccgactcctgctccgggagaagaagatccggacttgatcaatgccggcggtggagcgataacggctctgcccggagcggccagcttcgatagtgctacttcgttcggtattatccggggcggacacgtagatgtcagtatcctgggggccttgcaagtagatgagaaaggagatttagccaactggatgataccggggaaaaaaacaccgggaatgggtggagcgatggacctgctgatgggagccggtaaggtgatcctggccatggaacatacggcaaaaggaaatccgaaaatcctgaaaaaatgtactttacctttgacagccaaggggcaggtgaatatgatcgttacagaaatgggagttatggagatcacacccgggggaattgtactgaaagagatacatcctgagtttacggtagaacaggtgcaggcagctacagaagcaactctgatcgttgccccggatttaaaaaagatgtgctgaacgacgaaagcgtattgaaggaaatcacgatggaggatggatggtggatacctctagcccgaatcgtaaactataaattaaaaaaggtatggatttttcattatcaaaaaaagagatattgtttcagcagatgatcagagcatttgctgagaaagaagtaaaaccgctggcggcagaagtggacgaagaagagagattccctgtcgaaacggtagaaaaaatggcgaaactggggattatgggtatccctttcccggtggaatatggcggagccggtggtgataacgtattgtattctatggctgtagaggaattgtcccgggtatgtgcaacgaccggggttattgtttctgcccatacctctttgtgtgcttctccgatctatgaattcggaaatgaagaacaacggaaaaaatatttacccaaattatgttcgggagaatggatcggagcttttggtctgaccgaaccgaatgcaggtaccgatgcctctgcccagcagacgatggctgttgctgaagaggatcattatgtgctcaacgggtccaaaatatttattacgaatgcagcttatgcacacgtttacattgttatggcgatgaccgataagtcgcagggtacacgaggaatctctgcttttatcgttgaacgggattttccgggattttccatcggtaaaaaagagaaaaagatggggatccggggatccgcaacctgtgagttgatttttgaaaattgtattgtgcctaaaggaaatatgctgggtaaaccgggtgaaggatttaaaattgcgatgaagacgctcgatggcggacgtatgggaattgcttcacaggccttgggaattgctcagggagccatggatgagacaataaaatatgtgaaagaacggaaacagttcggacgctctatcggacaatttcagaatacccaatttcagttggccgatttaaatgccaagatcgaagctgcccgtttgttggtgcggacggctgcctggaagaaagacaggaaaatcccttactctgtcgattcggcacgggctaagttatttgctgctgaaacagcgatggaagtgacgacaaaagccgtacagttccacggagggtatggatatacccgtgagtatccggtcgaacggatgatgagagatgccaagattacggagatttatgagggaacctctgaagtacagcggatggtgattgctgctgctctattgaaataataatgttttccgcattgaacttataaaaagagaatacatgaaaatagtagtttgtataaaacaagtacctgatacgacagagatcaaactcgatccggtaacaggaacaatgatacgggatggtgtacctagcattatgaatcccgacgataaaggtggattggaaatggctttggccttgaaagataaatatggtgcgcaggtaaccgttattacgatgggaccgcctcaggccgacgatattttgcgtgaagcttttgccatgggagccgaccgggcgattcatttgagcgaccgtaagtttgccggtgcagatacattggctacgtcgaatgctattgccggtgctttacggatgctggatttcgacctggtcattaccggccggcaggcgatcgatggagatacggcgcaggtaggacctcagattgccgagcatctcgatttgccacaagtgacgtatgtcgagaatttggaattcgatggtgacaagttgtttacgatccgtaaatctaccgaagaaggatatcaaaccgtacaggtggaatctccctgtgtcgttactgttctggctacggcaaacaaagcgcgctatatgtctgtgcggggaatcgtagaggcatacgatcgggaagtggaaatctggaattttaataatatcagtgtggatgaagctaaattgggattgaacggttcgccgacgcgggtatggaagtcttttaccaaaggagctaaagcagccggaaaagttttcgaagtggaaccggccgaagctgtagatgttattatcgaaaaattgaaagagaaatttattatttaatacatgattttagaggaaaaccgggaataatccggtgaaatctaaagtttaaaatctgatgaagatggataaatctcaatataaagacgtttatgtattcgtagagcaacgggaaggagttattcagaaagttgccatcgaattattggggaaagcccgggagttggccgatagcctgaatgaaaaagtggtagcgatgttgttgggttatgaagtggagggtcaggcacaggaattgatcgcttatggggccgatgtcgtattgtgtgctgacgaacgggagctggtacaatataataccgagccttatgctcaggcgattacacagattgtacgtgagcgtaaacccagtatcgtactgattggagcgacgacgatcggccgggatttgggccctcgtttatccgcccgtttagagaccgggttgacagccgattgtacgggcctcgctatctcggatgaacgggatttgctgatgacccgtcctgcattcggaggaaatctgatggcgacgattatttgtaaagaacaccggccgcaaatgtcgaccgtacgtccgggagtgatgcgcacgaaaccgaaagatgaacaacgtgccggaacggtagagaaggtgaatattcatttcgataagtcgaaatttaaagtgcggattctcgagacggtgaaagaacaaaagaaccgtatcgatataacagaagcgaagattctcgtatccggaggccgtggtgtaggtaatacggagggatttgagatgctcggaaaattagcggaaacgctgaatgccgaggtttcttcttcacgtgccatggtggatgccggggttatgcctcatgaccgtcaggttggccaaaccgggaaaaccgttcgtcccgatctgtatttcgctatgggtatttccggagctattcagcatttggccggaatggaggaatcggaatttatcgttgccgtgaacaaggataaatatgctccgatttttaacgttgccgacctgggaattgtcggggatgtgaaacagatcgttccgttgctgaccgagaggttggcaaacatccggaaaactgacaaataaaagcccggacatggagtatcaaaaattaatgctggaaaaacaagatcgtgtttgtctggtaaagatcaatcatccggaggcattgaatgccttgaatacggtgatcttgcaggaattggaccgggcattcgatgaaattgcagccgatccggaaaccgatgtggttattctgacaggcgaaggacgttcgtttgttgcgggagccgatattgctgaaatgagtgtgatgaaggccgaagaaggccggcgtttcggtgagttaggggctgctgttttccggaaaatcgaactgatggctaagccggttattgctgccgtgaatggatttgctttaggaggaggatgtgaactggcgatggcttgtgatatccgtatcgcctcggctaaggcgaagttcggtcagccggaagtgggacttgggatcacgccgggattttccggtacccagcgtttaccgcgtttagtcggattaggtaaagccaaagagttgatttatacggctgcggttatccatgccgaggaagcttgccggatcggactggtgaacaaagtggtggaaccggaagaattgatgaatgagtgtatggctatggcaaagactattgctgctaaagcgccattggcggtccgttatgccaaagaagccatcaaccggggagtggaaacggatatggataccggtatcgtcatcgaaaacggtttgttcgggttgtgtttcgcaacgaccgaccagaaggaaggcatggaagcttttttatggaaacgtaaacccgaatttaaagggaattaaaatctttgtaatttaaatttatcgattatgaaaatatgcattgttggaacagggactatgggacatggtattgcccaggtatttgcccaggccggacatgaggtattgttaaaaggccgttctgaagcttctttggcaaaagcccacaaagctatggataaaaatctttccagaatggtggaaaaaggtaaattggaagccggggttaaagatcaggtattggccaggattaaagatacgatgaaatatgaggattgtgccgatgctgatttggtgatcgaggcgatagctgaagatatggctaccaagcatgagatattcaaattgttggacggaatttgtaaaccggaagcgatattggcaaccaatacttcttcgctttctataacggaagtggccgctgtgactaaccgtccggaaaaggtgatcggtatgcatttcttcaatcctgttccggctatgaaactggtggaagtgatcaaaggccggctgacttcggcagaggtgcatgatcaggtatttgctttatcgcaggaaatcgggaaagtgcccgtcagtgtcgaggaagctcctggatttatagtcaaccggattctgatccctctggtgaacgaaggcatcggtatattagctgacggagtggcgaaaaaagaggaaatcgatgccgcgatgaaattaggggctaaccatcctatgggaccattggaactgggtgatttgatcggattggatgtttgtctggctattatggaagtgttgtaccgggaattcggtgactccaaataccggcctcatcctttgttgcggaaaatggttcgcgctaacttattgggacggaagaccggagtcgggttttatgactatcggaaataatgaggagagtcttctttaccgggatacgatgttggggaatatttccccaacatttttactttttccccactttctacaagctgcgattcttaatctgttgtatgtaatgtattgataattagtgtattttgttgattttgtgcttgtggcatcggatttgttctgtttaaggataaaatctaactctaaaaaataatagtatgaaaaagatcgtcattttaggaatcggagcttctatgttcttcctgggtagttgcgtagagagttctcagaaatataagtctttacaagtccgtctggattctttgagtacagtacatattatgcagaattccgaaatggagagtatgctggccgatttgaacgatatttctgccggaatgcaatcgttgcgggatgccgaacgtttattgactttggaaacaattaatgaaaataaagacaatagtaaatccaaacagcaattgaatcagctgaaaaaagacgtacaggctattaccgaggcgatcgcttcttataaagaacagatttccaaactcgaaggtaagaataaaagccagtcggccgagtttaagagattgattgccggcttaaatgcggaattggatcaacgtacacagaaactgaatgaaattactaaacaattggctgagaagaatcagcaattggcagtgaagaccgaggaagtcgctaatctgaccgagaatgtggaagctttggataaagccaataaaagtcagcaaatgacgatcaatgaacaggatatggcgattcatcagggacactatttgattggaaaccgcaaagagctgaaagaagctgaggtaatttccagacaagggattttctgtccgccgatcgtatcgccacaagcacaaaaagccaactttaccgatttggatatccgtgagatgaaggtgatcccgttgaatagtaaaaaagcgaaattactttctgtccatccggctgattcctatactttggagaccggtgaagatggtaatatgaccctgaaaatcaatgacgaaaataatttctggaaacaaacaaaatacctggttgtgatgattgaataaaagcgggaataattttaactgagagaggcatacccaaaaagtatgtctcttttcttttttcacaacgattattcttgtcgagagagaaaataaagaagtttttttgatttaaagacagttcgtttagaaaactagccgaagatcatcaggatttttaaaagtgtatccgatgagaaaatcgctttcaatttgtcgatacttttgtatttcagtgttttaacactgcttactgagatgtttatttcctgtgctatttgctgattgtcgaggccttgaaaagcgagctgcatgacttgtttactacggggaggaagtttttctatttctgcgagaatctgcatggcgacgtctgcttctacaatggcattgaagatattgacctctttcagaggatggttgtttagatatttagcttgcagtttgcgggttcgcagccattcaagtgaaaggttatgaaccagcatatacatataattatcgatattctcaatatttttgttttttccttg

SEQ ID NO: 5998 - DNA, 464 bp, Unknown
  gut microbiota DNA sequence
aatacataaaaatacggtcaatcaaaacagtcggtctggcactattcagtagtttaatcttggctccttcactttatgcccaaatttcactggatgtacaagaccaatccatccgtcacatattaaaagagatagaaaaggcgggggaatacaaattcttctataacagtgatctaagtaacctagatcacaaaacgtcaatatccgtacaggataaaaacattgatgaagtcatgagcctattattagccaatacggaaatatcctataaaaaagaggccaataatatgattgtattaacagttaaatcatcttcttcaccgcaagctccgagaaagacaagaaaaataacaggaacagttgtagaccctgacggtttaccaatcatcggagcaaatgtaatcgagcagggtacaacaaacggttccattacggatttggatggaaaatttgaattaataatt

SEQ ID NO: 5999 - DNA, 338 bp, Unknown
  gut microbiota DNA sequence
tttattcctacctttgcaacgaagaaataaacgaagtatttcttttagataaacaaagccccttcatatcattttttattatagaaccatctggaagaataagcgattctccggatggttcacttttttcccaaactattcctttctctataagaaaaaccgtatctttgctccggtcaaaacaaaattcgacttataggggcatgactttcatctattttgtaacaaacagtgcatggaatcccaacacttgggctattctgtgcggtatattagcagtattccttatcgtagtactgcttactatctattttagatttttctcggtttgacttaac

SEQ ID NO: 6000 - DNA, 1200 bp, Unknown
  gut microbiota DNA sequence
ttaccctcaattggataccatccaggctgtccttttctatcttggcccgccaggcagcttcatccgcatcgatagagatacttacaaaacaaataggcttatccttgaactcctcttttaatttatgaaatgccgggagttcgcggcaacacggtccgcaccaggttgcccagacatcgatataaacgtaattgcccagccagtcagataaattcttccggttaccgtctttatccaaaagggaaaaatggggtgcttttctacctttttccaaacgggtatattgttcatacgaccggaaaaatgctgctttttgtttttcatcctttaccttttcccgataaaggggtaaaaacgcttccattccttctgatccgaagtacctgatatatccggacatgctttcgtcgactaaataacccgccagttcttcatccttaatgtgattgcatatataatccagttcacactttaacttatccaacggtttacctgtttcagttttttttctttctcccagcaattgtataccattcctgaaaaactggcggtattcccagaattcatgagctgaaggatcctcctgaagcaattccgatactttccggtaatacctttctcccggggaataacttttcaggcgtaataatctggcatgacgaaggggataatccaataatgaatggcaagccacataataaagccgtttacgctccgattttttaaaatccgccggcagaggtaaagaatcaagatgtgattgtaatctgccgggcatcagtgcccatgctttcaaaaattcttcttcccctttttcataccccggatcccggttattcaaaaacggactgttcagatagatattgatcgctttagccgctccggcaaatttaatctcttgtccgttcagccgagtaatttcctgttgttgtcccggtacaagataaaacgaataagcgttgcgcggaccatataaaactgcatatccgggaaccagtgaatccggaatagttatcttccctatgcctgattcatctagtttcactttataagtttgttcccggaacccgatccggatttcctcttgcccgaaagtggcgtcgaagcggactcttacctgggaaaaggcttgtgcttcccacaaaaaacagcaggaaagcacaaaaactattttcaaacctctgctcattttaagtaccg

SEQ ID NO: 6001 - DNA, 5897 bp, Unknown
  gut microbiota DNA sequence
ctccgtattcgtcgacgatgatggccatatggaccttttttacctggaattcttccagcaaatcattgatttttttggtctccggtacgaaataggccggacggatcaacgattgccatgcgaaattctgaggctctttcagatgggcaagcaagtctttgacgtacaaaataccttcgatggtgtccagattttcacgatataccggcaagcgggaatacccgtgttcgattaccacatttttgactacttcgaaactatcttcgatatccagggctataatgttgatgcggggacggatgatatcgatggcagcgatattgctgaaccgtacgattccctctaaaatatctttttcgtcgttgatttctgcatcttcggtcaattccagggctttggataactgatccatggataagccgtcttttttggccattcgtttgctgataagggaagttgaccggatcaataaggtcgataaaggacggaaaagataagtgaggaaagtcaaaggacctgccataaaaatggccatttttacctgtgagcgattagcgtataatttgggtataatctcaccgaataaaaggatgatgaaagtgacccctatcacctgaatgataaatcccaacacaggattacccgaaaaatcgaataaagaattaaccagataagtcgatagaatgactatacctacatttacgaaattattagtaatcagaatggtcgatagtaatagattcggcttttggtgaagattggctactttatcgtaacctttttctttcaatttttctaattctccgggagatagagagaaataggctacttctgaggcagaagctaatgctgaacataacagaaggaatagaagaataatcagaaaaacaatgtctgcaagatcgaaagttccgcggaatatactttgtgccgcgtcataagcgtctgtttccaaaatgaaatgaattagttaaacaaattaagctaaaggctataagctataagctaaaagctgattgctatgagtttgaaaagccagagctttaagattaaaactccaggctatactgggacaaagataattgaaaaactttatttttatagcttttcacctttcgcttttcgcttatagcctatagcttatcgcctttcagccttaaaatggcagatcgtcgttatcgtccggtgtattcatcggaggagtagcggtcgttgaagtgctacttgaaaccgacggcgtataagatctgggagcatttcctgtggcctcaccgtcttgtctggaagataacatttgcatattatcggcataaatttcggtcgtatatctttttactccattctggtcgtcccaggaacgggtacgaatccgtccttcgatataaagacgcattccttttttgacatacttttcgacgatttcagccaatcctctccataatacgatgttatgccactcggtctgatcgatgttttcgccgtttttgtttttatatctttccgtagttgccagacggagattggcaaccgctactccgccttccaggtatctgacttccggatcagcacctacatttccaattaaaattaccttatttaccataatgcgtcctaattaaattatttaaataattgaagcagataatgagtgaatcattgttcgaaacccatatacacgtgtaaatttcttaactgaaattttacacaagttacgaaaaaaaacggacatgggatacatcgtctgcatgatttttttcagaaaagcgaaattaaggaaaaaaatctgattcagaaaaaaatgacaaaaatcatcccgttttttttattcttaatagaaaagctttatatttgcagactgaaatttgaacgagaagaaataaattattgaatattaaatatttaaagaaaatgacaaaagcggatattgttaacgaaatttcgagaacgaccgggattgagaaagtagctgtgcaagcaactgtggaggcttttatggagtcaattaaaaattccgttgttgagggtaaaaacgtgtatttaagaggtttcggtagtttcgttgtgaagaagagagctgaaaaaacagcccgtaatatttctaaaaacgtaactatcaaaattccggaacattttattccttcattcaaaccatccaagagttttgttaacgacgtaaagggtaatgttaaaaaataagaaaggaggaatttatgccaagcggtaagaaaagaaaaagacataagatggctacccacaaacggaaaaaaagactgagaaagaatcgtcataagaagaagtaaaattcttcgcgtttgtgagtaaagatataaacctaaaggcacacgtctttaggtttatttggttaaaagataatgtaatacggtatcttaaatagataaaagttgtgagtagtgagttagttattgacgtcaaagcagatgaaattgtcattgccctgttgagagaaaagaaactgatcgaattgacaaaggaaaagaccagtatgcaatttgctgtcggggatatttatctcggaaaagtgaagaaaatcatgccgggattgaatgctgctttcgtgaatgtagggtatgaaaaggatgcttttttacattatctggatttgagtccccagtttcattcgctggatagctatatcaaacaatgtatagctagaaaaggaatgccggtatcgaagttgaaactggaaccggaaattcccaaaaatgggaaaattgccgatattctgacagtcggacaatgggtggccgttcaggtggccaaagaaccgatttctaccaaaggaccccgcttgacttccgaactgagtattgcaggacggaatctggtattgatgccttttgccgataaagtgtcggtttcccaaaaaataaaatctccggaagaacggaaaagactgaaacgtttgatcgaaagtatcaaaccgaagaattatggcgtgatcgtccggactgtcgccgaaggaaagaaagtagctgttttcgatagtgagctcaaagaattggtcgaacgtttcgaaatggcttttaaacacatccgggagatagaacctccgaaattgattttaggagagatcgatcgtaccagtgccatactccgggatatcctgaatccctctttcgaaaatgtatatgtcaacgatatcacgctgagtaaagaaatccggcattttctgactactattgctccggaaaagcaggatattgtcaaatatgtttctcctgagataccgattttagaccattttggtgtggataagcaaatcaaatcttctttgggaaagacggtttcctttaaaaacggagcctatctgattatcgaacatacggaggctttccatgtgatcgatgtgaatagcggtaaccggaccaaactgggggacgatcaggaaacgaatgcccttgaagtcaatctggcagcagccgaagaagtggctcggcaattgcagttgagggatatgggagggattatcgtcattgattttatcgatatgcaaaaggcggaaaatcgccagaaattgttcgataaaatgaaggaatgtatggaaatcgaccgggcaaagcatacgatcctgccattgagtaaattcgggttgatgcaaattacccgccaacgggtacgccccgctatgactgtggatacgaccgaactgtgtccggtatgtcacggtaccggtaaagcggaagccgctattctggtgatcgataagattgaagatgaattggaattttttgtatatgagaagaaaaacaaacgtattatcttaaaagtgcacccttttgtcggtgcctacctgaaaaaaggattactgtccatgcggcggaaatgggctttccgttatcatatttcactgaaaatagttgatgtcccttcctattatatctacgaataccatttctataaccgctataaccgggagttggagaattagaaaaaagtaaaggtgaaaagtggaaagatcgatcgtccggttgggaaggaggattgatcgggggaggattttatattgctgagaagagggattccgggtgtatatgctatggctgtcaacttatgaaaatacagcggacagagattgtccgtggccttcttaaagaaacttgaaaaacgtttgcatacccattaattatatgttaaacttgtatttgcgtctagtgtgaaaaaaaattaataatatttttgtatggagattttgcatcagacggtgtagaggcaagaatgaaaattaattaataatacacttaatagtttatgaaaaaaggattgtttgcttttttgttgacgttcatgctgggtatttttactgtttcggcacaggtagaaaatccggctcaatggtcatattctcagaagagtctgggaaataatgaatacgaacttgtttttaaggccgctttagaaccgggatggcatatttattcgatgtatacgcccgaaggtggtcctatggctacaactgttacttttgaagaagccggaaaagggatcgaattggttggaaaagcaacagagaacgaacccaaaaaagaacatgacgatgtattcggtgtggacgtttggtcgttcgaacttgaatatgtcattactcaaaaaattaaagtaaccgatccggctattgctgctgtaaaaggtgaaatcgaatttcaggtatgccgcgaaggacaatgtgtgagattcgacgaatcgttcgatatcaagatcggtgatcagcctgctgctaaaactgaagtaaaagctgctgctgcaaccgattcttccagtgattcgactaaagacgagtctttgtggatatttttctggggggctttcgtagccggtttggctgctgtggtgatgccttgcgttttcccgatgattccgatgactgtatctttctttatgcacggagatacgaacaaagcaaaggcgaaagcaaaagcgatcttcttctctttgtcgattatcgctatctataccgctctgggattgattatttctatgttattaggtcctgattttatcaactggttaagtaccaattgggtgcctaatgtatttttctttgtgatctttatgattttcgcagcttctttcttcggtgctttcgagattgtattaccttcctggattgtaaataaatcggatgcacaggcagataaaggcggatatgtcggagctttcttcatggctttcactttggtattggtatctttctcttgtacagctccgattgtcgggactgtactggttgaggctgccagaggatctgtactgcgtccgattatcggtatgttgggattttctatcgctgtagccttacctttcggtttctttgctttcttcccttcaaaactaagcaacctgccgaaatcaggaggttggttgaactctgtaaaagtggtactcggttttatagaagttgctttaggattcaaattcctgatggttgccgaccagacttaccactggggattactcgaccgtgaaatatatatcgctatttgggtaacgatctttactttgcagggattgtacctgatgggtaaaatcaaatttgcacatgacagcgaactgaaatacatcggtgttccccgtctggcgtttatcatcgctacgttcacttttgtggtatatctgattccgggtatgttcggtgctcctttaaaagctttggccggttatttcccgcctcaggaaaccatcgacttcgatatcaaccggattgtacgggataatgtaaagcagatttctgtcagtggtgttgctaccggaacagctaagaagtctgacgcttgtgaagctccgaaatattccgatttcttgcacttagctcatggtttggatggctatttcgattatgatcaggctttaaaatgtgctcaggctcaaaacaagccgct

SEQ ID NO: 6002 - DNA, 3539 bp, Unknown
  gut microbiota DNA sequence
acacggttgtgtaaattgccgcgaaatggaacaatcggtatggtccgatccgcgtgtattggatatgttgaaaaacgattatgtcgtagtggctttgtatgtagacgacaagactactttacctgaaagtgaatggtatgtatccgattatgacggaaagaaaaagaaaacattaggcaagaaaaatgctgacttccagatcaagaaattcgattccaatgcacagcccaactacattttgttggatagccgcggcggcaacgataatgatctgagaccgcatatactggctgctccaagaggacataacctggataaagatgctttcgttgaatttttgaaacaaggtttggaagaatataagaaaagaggaaataattaattgactctttgactgatcgatcaggtaccccgtttccggggtaccttttttattttccgaaaattcggtcttttatgtaacttttgatcttttcaactgtcttagtattgtaagtgagtttgaatgatggataaaaatgaatttatatctctggtacttcctttaaaggatcggttgtttcgggtggcttggtgtattctgcgaagcaaagaagaggccgaagatattgttcaggatgtaatgctgaaggtgtggagggatgaaaaaggaaaggttgaaaatctggcagcttattgttacactatggcccggaatctggctttaaaccgattggtcttgaaagacaatcggagcaaggagttggaaggggcatatgaacaggaagtgcaggaacaaccgttggaaaatataatccgtaccgaaaagatgaagttgttatatcggatgattgacggattacccggtttacagcgggatgtcgtccaattgagagatatggaaggactgagttatcgggatattgcgaaaactttacaggtgacggaagaacaggtgaaagtgaatttattccgggccaggaaaaaaattaaaacatggattttaaacatggagaattatggattatgatcggatcatagggttgttggataagtactggaagtgtgaaaccaccttacccgaagaagaagaactgcgttatttttataagcattgccggcaaatgccggaagaattggccgaatatagggagctgttcatctttcaggaaggggaaagacaaatcgggttaggaaatgatttcgaccggaaaattttggcttccatctacaataaacgtcctgccggatggagaaaagggcttcgggtggctgcggtgttgttgttattgataggggtaagccaggtattgatcgatatagggaatccgcaaaaggatacttgtcagactcccgaacaggcactggccgaagtccggcaggctttgaattttgtatcttcgaagatgaacagaggacaacaactgttggaagagaatatggacgaaatgaaatggataaaccgatatataaaataaataggtaatgaaaaagtggatatgcattggattatttttgataggaacctgtagtgtccaggcccaggatctggtgagcgattttttggccaagacgaaagaaaataaagtctttacacaggtcaatatcagctccaggatgtttcaaatgatttcagagatcacggatgctgaaacggaaagtattatccgaaatttgaccggtatgaaaatgctgacaacagaacaggaaacagaccggtattttcaggaagtacggacgatgcttcagaagcgaaagcctgaatatgaggaattgatgagcattctggaagaaggagaacaggtgtggatgtatgtccgggaaaagaataaggagattgtcgaattggtgatattggtaggaggaaaggaagagtttatgttgatgagcttttgtggggtgatcgatttgaaaaaaatctcccgtttggctaaagcagtaaatgtggaaggtatggagtacctcggaaaagtaaagaaatagagtgtgtcgaattttaaactttgggatgatgaaaaaaagtttgttcgtattgattttaatcggaggttgggtaatcccctcttgggctcagaataacaaagagttcgaacaattgtgcaaaaaatatcaggattcggaaaatgtcggatcgttcggaatggatggcttgggttgtcttttggcttcctggtttatcgggaaagaagcgaacgatataaatgcattgattcggcaatgttcttctttccgcatattgagttgtagcggagaagaaagtaaaatgctatgtaaagatatccgggcatttgtccgggctagcaaactcgaggaattgatcagtgtacaagaagatggatcggaggtgaaactctatatgcaaacggttaaaaataaagtccatcaggtttttgtatcggttgtcgatgaagaacaggaagttgtatttctgcaagtaaaaggaaaattcgatctggcagctattcaaaaattagctaaaacttctcagattagttatctttgccactgaaaaggacaacagatatgcagatattgaagtatattttcatcggtttgctgatatttttaacgtgtggttgtggtggaaagaaaaaacaaggagaattccgatatttccggaattatcaacgtacatttaacgatttgaacgataagcatctgaaggctgcacgacaatgggggatacaaccggttacttctgacgaattgttggaagagcaaatgggaaagttggataaaatcggctcctgtcgttattatcaggtagatgaattgacccattctatcccttatttggttccccgggcagagaaattattgaagacgattggccggaattttcaggattccctttccagtaaaggcctctcttcccgtaagatcatcgtgaccagtgtgttgagaacaaccgggaatgtgaaaaagttgcggaagaaaaatgtgaatgccagtgccaactcagctcatgtttatggaactactttcgatgttgcatatgcccgttacaaaggagccgaaaaagaagaaaccgataaattaaagtctgtgttggcagaggttttgcaagatttgcgcaagcaaaagaaatgttatgtccgttacgaattcaaacaagggtgctttcacatcactgttcgttaagtgaacaggtgcgcttcattcttagttgtaccttttgtaatgaatttggtaaccgactcctttctttaaaatcaactggtctttgtcgagctgtatgatattcagggtgtctgaaaaatgtaaggtttgacggttgccggtactttctccttccagaatgagtgtttttccgtttatcttccagcttttgtattgaagagtggccatattgatcgaactggctttcccgtctttctgaaattttattccttgtacatcctgggctctgccggggatgggttcacaccaggaacctggtatttttttctcgtaacctgtattggaacaggatatcaggcctaaagtcagacaagcgattaaagtaaaatttttcatatcacattttattttatagttgtttgtttttaaggagatagcaa

SEQ ID NO: 6003 - DNA, 5843 bp, Unknown
  gut microbiota DNA sequence
aataatggctattgtatgtttagggggatgtgataagaaaaatacatccatatatcataatataatatttaaagaaatatgtgatattgcaagagataagtatcttccattttgtattgttttaatagactcttcgcaacatttgtctcaggaatattattcacgattacaaaatcgctacaaatttctgacgcaacaggccatttataatatggctgatattaatgttttcgtaaatgagtggtatataaaatggttatgtcctgttactactcctttgacttgtgtattttctccggagggagatttggttgacttaattccaggggcaacaagagaaacttttttgtactcaaaagaagcaataaataatttgggacctactgattttcattggcccaactattttcataggaataaaaaagaactaatcccccttttaaataatttattggaacaaaaagaaattttgaatcaaggtgtatatttatcctcaggattctctgaactggtagattctctgaattatccatattcgatctatttgaaattggctggagaattgatgatgcatgatattattacatcgcaaattactgcaaaatctttactagagttttagtattttatctctgtctttgttatcttgcagggatgttcgaatgatgatttcctgaagccaagtctggaagataagcttaactttcctcttcatattgaaaaatttggaaaggctgttgccaatgagattcatcagactgtaataaatttaaatgagagaggtgtagattattctaatgctaaaaacacacctgaatttaaaaagcaattttatcaggattgggcccaggctagtccagggatgataaaaacaaaagtgtcacaaaatcaaatgtttggtaattcacttctttttatagaagggtatcgtaacctgacccatattcaaattgaatttattcgtcggatattgaaggaatgtgatgaaacaacttcttacgaggactttggcaatagattggccaatatcaataaagatatttttaaacaggttcctgaaatagagcaggagaggttactttatattacgtctgccttgtattatggaataggagaaattcagaatcttgaaaaacaaggacaaatgcttattactcctcagactaaattccgaatgagaagggttaaaacaaggagtgaatcaggaggtgatgatttctggggaacttgcaggagcatttattcagcagttgctccttatgttgttggaacgcttactgaaatgggcgaaatagttgtatctgtttcggaggtaatggtgggtggagttgcattgattatgtctgtactttgtgtgtcggatacggaccagtttcgggcagaatgtgcagaaaaatatagggattgtatggataaaaaagggccttggtctaaggaacatagtgggggatggggatatacaatgtgttgtgcaaggtgcttagaattttgcagagtacagcacggtgtttgggattgtcctcggccagtgtaaaattggattattatgaaaggttttgagatatgtattaatgatgcagctcctattgttgcaatgacagatagtttggttactttaatcataagtgtagggtatgctgatggggatgatatgcacatcggaggaatggattcaaaatcgaatcatcttatatggatgaataaaaagatgtctctgggagataagattaaagtgcgggttagagagattgatattgcttctccattgcatatgagatatccttccgatagagaggaaatgaagaaagagtattataaattgaaaaagaaattagaggaggaagggaaactatgaagggattagttgttaaatacggagagaagacttataaagttggtttacccgatggaggtgttaccttgtcttcttgtattatgcagaataaatttacgcttgaggcaggtggctcaggacatgcttatgctagtgtattcctgaaattacgtgaagacatagaatttgaggtggaagtggctgaatttgataaagcttccgagcctctttctgaaacgaatcaaccgataatagatccggattatcctcgtgaagaagatccggattggaaactaaaacatttccggaaattagaaaagattctgaaagaagaaggattgcttgattaaagcagaagcctaagctgattaaatgggccatttttgtaaatggctcatgagctttaggagagcggatcttaagacggagatacctcattgtatgatttaaattctcagaagggtatctcctttgagctatttattctagtccggttttttgctgctttatcggttataaaagagtagagatgatcgggtttacccctgattattgatttgttcgagtttttctttatctatgattttgatttttttgccgttcagtccgacaataccttctgtggcaaaattagaaagggtacggatagcattggccgtggtcatgttggacaagttggccagatcttcccgggtgagacaaatttttaacgtacagccatcggcttcgtagccataagtttcctttaataccagcaaagcttcagccagacgtccccggatatgtttttgggtgagggttactgtacgacgatgcgaaaaaccgaggtcggttgccagtgcgcggataatactcatggccaggtcgggtgtcgttcggacgatgtctaagatcaattcggttttaatccggcaaacgatagaatcttcaagagcttcagccgaagcaatgtgtatttcttcggcgaagaaagctctgtaaccgataaaaccgatcggcttggccatacgaacaatttgttggcgtcctccgatgccctctttataaattttagctttccccgtcaaaagacaatgtaagcctgtcggcatgtctccttcctgataaatcaggtctccttttttataggaaatgcagactgttgtttcgataattttttgttttgccgcataccctagttctgagagtaaggaatgaggactttcgatacagatttggcataaactgtcgtgtaaatcgctatcagtgatgatggtcataattaaaaaggatattttctaccgtatccgaaagcttttttagagattttgatgatcgggggacattgagctcgtttgtattcatttcgttttaccatttgaatgactttttcgacagtagctttcgggtaacctgcctttataatcatttccggtgaatggttttcctccaggtatagttttaagataccgtccaattcgttgtagtccggtaaagagtcctgatctttttgattcggccgtaattcggctgatggtgctttttgtatagtattttccggaatgatgatctgattccggttgatatatcgggctaacgcatagatatcggttttaaaaacgtctccgattgtacccagtgaaccgcagagatcgccgtaaagcgtgccgtatccgacagctgcttcacttttattggaagtattcaggggaatataaccgtatttgttagacatggccataaccaacattccccgggtacgagcctgaagattttcttctgctacattgaagggctggtctttgaataaaggatgtaaggcttccagatattgttcgtagattgctttaatggcaatggtttcatggggcattccgatattttctgccagcgctaatgcgtcttgaaccgaatgttcggtggaataacatgaaggcattaaaagtcccataacattttgtgctcctaaagcttcggcagccaaagcagcgactacggcggaatcgatacctcccgataagcctaagatagctttttgaaaaccgttcttttcgaagtaatcccggataccgaagaccaatgctttatggagcagagcgatccggtcttgagaaacaggtgattgaagtgtaggggtacctaatttattggtatcgataagctgaaagtcttctgcaaattcgttcaattggcaagctttcttccctttgtagttataaaccattgaattaccgtcgaacagtacagaagtataacttcctacatgattgacagcgatcaggtttttattgtatttttgagccaaagtggccagtactttccgcttttcccggctactatcgacagtaaaaggagtcataccgataaagatgacaaagctatctgttttgtcgatgtattccgattcgtattcgtcgaataaaatccgtatattttgatttttataccggatcggcgtattatcttctcctgcgataaaataacggctttcactgaaaatatcataatcactcaggatgtttttatgaacaccgtctaccacttccccatgctgaataaaataggctgagttgtacataataccattttcgctatccaaattcggtgctcctacaatagctgcaatttgagtacatgtggctgcgattttttctacggccatacgacaggcatttacaaattcctctctctccagtaaatcctggggcaatgcgccggaaacagccagttccgggaataggatcagttctgctttttgattttgagccttttggatcgcagaaatgattttttcgctatttccttgaatatctccggctttataatttaattgtggtatagcaatgatcataatttagtgtattacaggttaaaaagtcgttctgagtctcagagattcttaccgactttaagcaactatcgtattacctttttatcttttcgtttatctttgccgtaaaattacgatttttagtatcaaaataattaaaaatggccttgaagtttcttttaattctaataattcttggtttttggttttccggctgtaagagaaatccggctccggaagttaggaatttattgaaagatacgaagatcggagatttatttcgtttagatacagcgatacccgattggggtgcactgtatgaaaggtagaaagtaaaaatagaaaaagggtgatggaaaaaaaagagattagaaaacagattcgggagataaaaaagcagtatacgctagaggataagaaaagaatgtccgcttcggtttggcaacaggtggagcataatgaggtatttcaacgggcccgggtagtgctggcttattggtcgatggacgacgaagtgtttacgcatgactttgtttgtaaatgggctgaagaaaagaccattttattaccttgtgtaaagggggatgaattggaaatccgttatttcgacggccgcgaaaaattgtgtcccggagaagggtatgctattccggagcctgtcggccggctttttaccgatttgaataaaatcgatgtcattttggtgccgggcgtcgcttttgaccggactttgaatcgtttaggccgggggaaaggcttttatgataagattttgtcacagacgaaggcttgtaaaatagggatttgttttgattttcagttgttagaccggattccgaccgaagtgcacgatgtcaggatgactcaggtgatcagtagtcggtaagactataataaataaagcggagcaagagccccgctttattttttcatgctgttataatatttaagcctgtttgatagcttcaaccgggcaaacaccagcacaagtaccacaatctgtacatgcattagggtcaatttcataatgatcagcacccatagaaattgctcctaccgggcattctccttcacatgtgccgcatgaaatacagtcatcagatattacgtaagccatttctttatttgtttaattgattaataatgggcaaaagtataatcattatttgaaagaaaaaagtttttatttgttttttatat

SEQ ID NO: 6004 - DNA, 936 bp, Unknown
  gut microbiota DNA sequence
aaaaatcctgaatctgctccgggatgaagtcccccacggaatcgccgtttccatcgaacggatgaaggaacgggatgacaaagacctgctggacattgatgccacaatctactgcgaacgggaatcccacaagggcatccttatcggcaaaaacggcaccatgctgcgccgcattgccactcttgcccgaaaagatctggagcgctttttctacatccaggtcaatctgcaatgctgggtaaaggtcaaggaagactggcgcaataaagaaggattgattcacaatttcggcctggacaatggcgaataattttctggcgtgcacttttacagcacgccggttcctatgatttccattgataatctgccggatttggtacatgctactcctgacacgtatccgccggaaaacaaaagctgtctcttaaatgtcagcttgcgtttttcaacgctatgggaggtatttgcagcatggatgcatgggatattttttgcctgaccggacatattgacgactatctgcgctatcggagtacgcaggatgccgcagaggccaagacaacgacacaaaaggagcacgcaagccgtggaaacatacaagggactggttctggcggagcggaatgccggcgaccgggggaaattcattgatattctcactgaaaacaacaccgtacaggaagtctatgtccgcggtgccaaaaaggcctcctctgccgccacttcgctgacacagctattttcctacgccgtgttcagcatccaacagcgcaacggccgcgtctatctggacagcgcggagccaatccgtattttctaccggctgcgggaatctctgtcccggctgagcctggccatgtatttcagtgaactgatccggctgagtgtccgagaattccggccggccggagaaacctgtgaagtcatgcgtctgat

SEQ ID NO: 6005 - DNA, 656 bp, Unknown
  gut microbiota DNA sequence
ccttggaaaacctttgtaaggtggataccgtcgtgctggataagaccgggaccttgaccgagggcgtgcccgaggtgacagactctttctggatatcggaggcgagccgggatatgctggatatcctttataccgccgagatgaagtctgagcatcctttggcgtccgctatcctctcatggttgaaaggaacggaggctgcggagatcgacgctgatagtttcgagagcgtaacggggcgtggtatccaaatgcaggtacatggcgtgacgtattgggtaggaagcaaaggctttttggaaaccttcaaggcgatggttccgcccgaggctgggcgggaaatcatccggtgggaagaggatggcaagagtatcgtttattatggttgggaatcggaattgcttgcggtcatggctatttcggatcggttgaaacctacgtcgggagaggcggtagaggccttgaaagaaatgggtatcgaggttcatttattgaccggcgatgggaaacggaccgccgagaccgttgcggccatgctggatatccgtcattataaggcggatgtcttgccgagcgataaggaggagtatatccgttccttgcaagccgccggaaggaaagtggctatggtgggggatggtatcaacgactcgcaa

SEQ ID NO: 6006 - DNA, 1634 bp, Unknown
  gut microbiota DNA sequence
gatattcggaatcgttataagaagaatgcgctattttaacaataaaataagattcacgctcagcactacttccattcggaaagttggtcttctatttccgggatatcgctggctttgaataccgggcttttgataccccggcgtttttgatcgttgtagttttttagggcttttaaagctaaatgaccaagaaagatgagggcgatcaggttgatcagggtcatgagggccataaataggtctgccagattccagacgatgtccaaaccggctaccgaaccgaaaaacaccattcctccgacggctatccggtagatttgcagaccggccggatgccgtgatataaagaacaaattggtttcacagtaggaataattgccgacaatcgaactgaaggcgaataaaagaatacagaaagcgataaactgagctccgaagggaccgatttcatggccgacggcggcctgggtcagttgaatgcctttcaaggttccatcgagaggaaggtccgaaagtaagatgataaaagcggtgcaactacaaatgacaatggtgtcggtgaatacactcagggcttgtatcagcccctgttttaccggatgggaaacggttgctgtggctgcagcattgggagcggaacccatccccgcttcgttggaaaataagcctcgccttactccttgcatgatcgttgccccgagtcctccaccgacaacttgctctattccgaaagcattggagaaaatatggccgatcagggccgggatagcggtcatatgattgaataaaatgaataaggccactaaaatataggcaatcgccataaacggaacgatgatacccgctacccgtgctatccggtgtatccctccgaaaatagtgattagcgtgaaaaaggtcaggatgatggccggacctaattggccggttccgtatatctcgtgaaaagcgattgcgattgtattggcttggacggaattgaagaccaagccgaaagtgatgataataatgaaggcgaaaagcagggccaggcctttcttttttagtccttttccgatatagaaggcggggcctccgatgaatgagcgttcacctttttctttataaatttgagctaaagtcgactcgacgaaagccgaggcagaaccgatcagggccagtacccacatccagaaaacagccccggaccctcctaaagcaacggcagtcgctactccggctaaattacccgttcctacccgggaggcggtcgctatacagaaagcctggaacgaagaaacggaatttttacctttgccgttactgactccctggcctaataacctgaacatttctccgaaatagcggaattgtacaaaacggcttttaaacgtaaaatataaaccgatcagaatcagaaggataattaataggtatgtccaaatccaatcgttcgcagaaataatccagttattcaatgtttctaacatagctctttagttttgacctctttctttctggtgtttctacggaatgattgaaaaaatgtcttgttattttatattttaaacgattcgatatagtttgttgaagaataaattttggtgtttatatacatgtttaccctaaatgtagatttatttttttctattccg

SEQ ID NO: 6007 - DNA, 2399 bp, Unknown
  gut microbiota DNA sequence
ctcacacaaatccttcacaatctcatattccatccaatgggcaatcgcacaattatgcacctctcctaaaaatacgacatcttgatttttcaacactttcatcatctcccgataccccacttccttaccattagcatcaaacaaacgataagctttcttctcctgtccccaacttgcaacggagatacccaacaacattatacataaaatactttgaaaaattttcatatcatctactttttattttcatttaatcaatcatttatcctctccttgcatcatcaggagaccactattctccatattcaaatacttgcagcaagcctcctttaaatcagctggtgtaatagaatacaatatctcatcatactgcgccaaatcatccaatgtttcaccatcccgcaaagctcctgtcaaatatttcttccactcggcagttgtatagtcattcaccacttctctacgtgtcactacaaaagaacgctgtagcgcagccaactcctcggcatcaatttcattttcctgtacatcacggataatttccttcaacaacttatccaccttacccatattcttcgtatcgacagaagcattgatatcaaaataatacccggctctcggcaaacctttatgatacaacaacatataaggagaataaagtaatgactcctgctctctcaaaacactaagcagacggttgcgtacaacatccctcactaacttcaacatcaatgaattacgcaaacttgcttcataagagccataatacagataatcaaaaatagtctgtccttcattagcattaggaaatatctctctgaaaccgcctttgggataagtaaaatcgggcaacacccaatcattcggtttttcctgagccgggaacatactcaacatagccactaaatccctttctacttctgccatatcaaaattgccacaagccacacataccagtccattaggattcgtatatatttggcgataaaaatcagcaatactatccaaattcatcgcctcaacctcttcacgactgtcagccatcgaaccatttaccagtgcatttcccatcaactcatcaattctggcagacatctgtctatccggagcattctttagcatctttgacaacacagtttcctctcccatattttccaacatctcttttttcacctcttcaaaatcgtcatatcgtttttcaggataaaaacacttctcataaaccaatcgacacaactccgttgctttatcagcgggagccattgccatccaaccatgccaataaggttcgaaagtcacagaaaaagccatactttcctgactcaacatttcattgtaagcatcataatccatcttctcaataccacccatttccatataaccggccactccttccaactgagaatatttttccggaggcaatacagacgcaccacctttagcaaaggctgttaacgtaatttgtcgttccccatccttcgtacatttaagaattatacgagcaccgttagtcagacaaatctccttcacctccaaaccttctatttttcgttcagaagccacggacaaatgagcttgagtaaacttacgtgtcaagaaatcaggaatttccacttgttcccgttcttctcgttcttttgccacatattcatactctttatatggatttttttcaccctccttcaaagcaaccagaatatcctcttcagataattcagcagcccgtcctggattataatggtatgcagcccggatttttttccaaccggcaaaccattgagataccaacttctgcaactctctactttcaacacggttcaattgagcagccaaccaagcgttgtgtagcgtatcagtcacataacgttcgccagaaatcgccaaatctgtaaaatcttcacaccattgatctgaacttttcacagcatagatacggctgagtttctgcacagcattctccttcaaacgtgctaattcctgttcgtaaaagccttgttctcgaatttgtttcaagacattgacagcctctgtcactctacatttaatctccttatcattatcaccgctcacagacaacaccaaatggtctttatcgctcagataccaatcatctgatagagacacacgcatattcaaagcagtaaaacgggcattaatggcagccactaacaaccgctccttcattttctgcactcggtctccataagtagcttgaacctttgtcaccttgggtataatcaactccaaggttgaacgattgataagcgtatccttaagcttttgacaaacaatactttccttataatccaacggatactgcttatatcccttcaatttaccggacggaatatccccaaacagtttcttaatcttctgttccatttcagcaaccttcaaat

SEQ ID NO: 6008 - DNA, 2330 bp, Unknown
  gut microbiota DNA sequence
acgggttttaatgaagtgagtgatcaggtgttttccggcggtaaacccacttacatgatcggtataaaggagaaaattaccccggaggtcggtgataaacttgctgttttgtacgaggcgtaccgggacgggacagttaatttgtttggtgtggcttccggaagtgggatgacgataccgggttatgaggatattccggtgtattttatggatggagtggcgttgaaatccatattgaggacttctgcgggtgtagtagcttttgtgaatgatcgtattgtcggtaaatggaatttgttatatactccatatcattttgacggaagatacggagacgagctgacctgggaacgggtaaagagaggggtatttttcgtagtattggtagttatggttgtgttgttgttttacggacgtgaaaaaatagaggaataaacaaagaaattgcctaatatttacaaaaatacgaaaagaaaactctttttgtgcaatggggtatgtgttgaaatcctgatagaacaaggatagcggcaaggtttgttcagaagacaggccgccttgtcagtaagttgcaggaagtgtgttcacttcgtgcaaccgttgggagatattcgatagcataccgtctataatcatagaaacattgtcatatatacgggaagatataagacatccccatccttgcgcatatctttcgtgtaaatcagatatttgttccttatccgggaagagaacttgccgcaaaaggtatccagtgatgtatgcgccttataaccggatgacttgacttcgacggggcttaccttgtcaccgtccgcaatcaggaagtccacctcatagttatgcttgccgctgccggtgggaaaagtataatagtacaattcgtgcccggaagccttcagcatctgtgcgacaacattctcatagacatacccgaggtctgtgctcaacttgtcagcaagcagtttatgatatattgtgttgtcggtaaacttgctgtcccagaatgcgagagtgacgaacagtcccgtatcgcccgcaaacattttgtatttgttggggtcttggtgcaatgccattcccgcactcgggtcattggcatggtaagccatgttgaccaccatcgattccctgatttcggaaagtatctctgccagtgcagaattgcgcgtgccatccgttgcgctccatgccaaatacctgttggcattacttgttaactgggccggaatctggcggaatatcttggaagcgtttcccgtcgggtcgattttgttgaagtcatcctcatacaaggttattatggaacgcttcacactgtctactttttccagattgttggtttcaagataaactaccacggcctgtggcatgccaccgacaagcatatacaaccggaaatcacgcatcagtttgcagttcgtagcatctcccaaggatgttttgtcgtgaaaacagccttggagcagtctgatggtggtcgtatctcccagtgcccacctgaactcctcataatccatgggaaacatgtggagtttgacctcctcgcttgggatcaggatgtccttgacattcttgcgaattgaaatcaacgagccggtctctatgtaatcataccttccgtctttcacaagatacttgatcgcctgcctcgctttgggtgcaagctggacttcatcaaagatgatgacagacttccgttccttcaactcgacaccgtattccagttgcaggcgcatgaaaattcggttaaggtcggacacgtcattgaacaaatcccggatttctgtcgaacatgcggcaaaatctaccagtatatgagtttcgtattcgttagttgcaaactcttcagcaatggtggatttcccgacacgtctcgcaccctgtatcaatacggcagtcctgccttcatccgtccgcttccattgcagaagctcattatatattttccttttgaatatcatatatctgcacagttatcaatatagaacaaagatagcgaaatctgcatatatctcaaaatgttttctttgtaaaatggcataaatctcaaaatttttgtataataaaagtgaatctcaattttaatattcttaaaaatagcatgattctcaaaatgctttactaatcaaacaccttatccaccagattgacggcttccgtcttcttgctgtcaacgatttgtaggttcatcgttttgccggaggatatggaaacgggttgatctgggaacgggtaaagagaagagcgtttttcagggtattggctgttatgattgtgttgttgttttacagatataaaaaatgaaggaataaagtagatctattatc

SEQ ID NO: 6009 - DNA, 28661 bp, Unknown
  gut microbiota DNA sequence
taaagaataaatatttattcatgatttaaaattttttgcgaagataaaagaaaatatttgaatatcatcacagaaactgacagcttattacttcgacctgtcagttcttcgatgaggcgcagcgagttaaaaaagcgttaatacaggaggtcggaggagtggatatgataaaaagaaataattttgcttcatcaatcaaaaataaaattttatgtgtcaggctacagataaacaaatcatagaagtactgaaaatggaaacgattccggcattaggttgtacggaaccggttgcttgtgccttagcttgtgcccgatgtaaagaagaattgggtggtgttccggaacatatcgaagtgttcgtcagtggaaatatctataagaacggaatgggagtaggtattcccggtaccggtatgaccggactgcctatcgccgctgctttgggtgctgtttgtggaaagactgaatacggcctggaagtattgaaggaagtgtctgcttgtaataatttggctgttgctaaatctttattggacaagcaggctgttgttatccatttgaaagaagatgctcccgataaattgtatgcagaagccatctgtaagaaaggcaacgatacggtaaaaacagtgattgtccacggacataccaatattattctggttgaaaagaacgggaaagcagtttatcgtaaagattttacgccggtagctgccgaaaaaagcgatcgtgctgaattaagtatagcccggatctgggaatttatccaccggatcgacgttgcagagatcgagtttgtattggaaggtgctgaaatgaacaaagcgatttcggctgaaggtttgaagagtgaatacggtctgcagatcggtaagaccttaaaagaaaatatcgacaaagggttgctggaaaacgactttttgaacaatgccttgatttgtgccaccgcagcttccgatgctcggatggacggttgtgaaaaaccggtgatgactaattccggtagtggaaatcaggggattacggtttatcttcctgtcgtcgtggctgccgaacagttcggttgttcccgggagcaattgatccgggccttggctttgagtaatctggtagctgcccatatccattattatatgggacacctttctgctttgtgtggaattctgattgccggtacgggggctgcttcggcgattacttacctgatgggggggacctacgaacaggtagtcaacactattaagactatgtgttccaacctgaccggaatgatgtgtgacggggcgaaacaaggttgtgccctgaaagtatattccggcgtttctgctgccgtacaggccgctctgttatccatgaaaggaatcaaaactcacaatgacggtattattgaagaagatattgaaaaaacgatccgcaatgtcggaatcatcggtaccgccggtatggaacagaccgataagacgattctgaacattatgtgtcggaaacaataataatttttctctacatactattccccggaattttggtgttttacagaccacgattccgggatttttttatttgattttcccggattaattccagattcaatttgtacacaacaaatttaatatgtatctttgttccctgttcttacaaagagataatcaagtagttcgaatgttaaaaaaacgaacgattaaaacagttatgtttcgaatctcttttctttttctgactattttataatcttcacctaatcaatcttttcaaaatttattcattaacatccccagctatttcttattacaaatttaatcgttcgttttttttgtaaacatattgccgacgaatttgtacgatcaattcaaattttcaatatgttctgcgttttataatcttatctatcattccaaacgatagttttcttttcagtttatttcttctcccagctgaccgagctccttttcattcttggacgtaaaagagtctcccggtggcgtcgccgtgggttgctacacgcgtagggtaacagaccgggcgtgaaccggtatccaatccggtggggaaacccccgaaggcaacgccgctacgatggttcgggagcgggagttcgattctcccggtagcgacaaagatagatgagggaggatattttgtaggggatttttatttttactttgtctgaaaatacgaacgtttcattccgacgacattgatgggaaccctggctgtcattgtgggtagtgatgctatcgcttttctgctgaccaggtacgaccgcttcggtgtcgcagatttccatctgtggtatttcatcggcataggggtgagctttttcttctatgcgattcatatccggtaatcaatattctttttaatcatggaaagataaaggatgaaaaaacgtatggaaggtttacctctatcgggggaacggatatacagaatttgaaatgtatagaggcctcggtggatgagttcggatatctgtgaggtactgctggttttggtcgataagtatggccggaacatcccggctatgccttaccgtcaggaaaccggagcgatcaagaatctgatgcaggactgaagctcgaagccaatgccgcccatatccaaacgttgtttgccgggtattgggtgagtacccttcgttcggctaacgaacagttcgaacagattatgctcatccgttcggatgccatcttcgaagccgcaatgggcgctgccaaagtagcccgcgaggctgttcagatggcttccgaaaagtggtacgaaatgatcgacgctcttgctgtggtcaacggaccggttgcctacaagcacatcatcgaccacattaatcagccagtcagcgagtcgtacaacgtggccgcccgtcgtcgttcccgtaagacttcctacaaggacaccgccccgtttctcctgccgcccccggacactctggagccgtcgcccgtggaagaatagtctgattaaaaccgggagcggtttaccttctataggccgggaaaattttgtgtattagacagaaagataaaaaattgattaattatagctgatgaaaggaattgttctggccggaggttccggcacccgtttgtatccgattacgaaaggggtatcgaaacagttgcttccggtgtatgacaaaccgatgatatactatcccatttctgtgctgatgcttgcgggtatccgggaaatcctgatcatttccacgcctgaggatttgcctgctttccggcgtttgctgggcgatgggagtgatttcggagtccgttttgactatgccggacagccccgtcctgagggactggcacaagcctttctgatcggggaagaatttatcggaggggatgcggtatgtctggtgctgggagataatattttttacggtcagggtttcagtccgatgttggcggaggcggtgaagactgccgaaaatgccgggaaggccacggtgttcgggtattatgtgaacgacccggaacgatacggggtggccgggtttgacggggaaggaaatgtgttaagcattgaggaaaaaccggtacggccgaaatcgaattatgccgttgtcggattgtatttctatcccaaccgggttgtccggattgcggaagggataaagccgtcagcccgtggggagctggaaattacagcggtgaaccaggagtttttgcggcagggagctttaaagatgcaattgctgagccgcggttttgcctggctagacacgggtacgcacgattcgctttcggaagcttccgtttttgtggaagtgatcgagaaacgccagggcctgaaactggcctgtctggaaggcatagcctaccggaagggctggatcagcgaagagaagatgcgggaagttgccgctcccatgctgaaaaatcagtatggacagtatttgttgaaggtgatagaagaattgaaatcatgactatacaagaagcaaaaatcattgaattgccgaaatttccggatcggcgtgggaatctgtctgtcgtcgaagaatttaaggatattccttttaaaatcgaacggacgtattggatttatgatgtgccgggcggagaaacccgtggcggacatgcttaccgtgaaaaccgggagtttgtcgttgcgctttcggggagtttcgatgtagtgctggatgacgggaaggaaaagaagttgttttctttgaaccgttcgtattacggattgtatgtgccggaagggatgtggcgtcagatgcggaatttctcgaccaattcgctggcactggtgctttcgtctacgaaatacagcgaaggggattatatccgcgattatcaggaatttttaaaactgaaacaatgatccgttcactgacaggcttgcgttttgtctctgcactcatgatttttatgcaccattttccgatgggcggacgggtggtattttttctattatattgaaaaacctttgtcgaaatggttgaaatcaaaatttctcagatgaaaacgacagtatatgattgttctgtaatagaacttccccgtatagagaaccgggcgggcaatataacgcctgtccataaccgtctgaatctcccgtttgacatcaaacgggttttttattcttacgacataccgggcggtgaggcccgcggggctcatgcacataaggaatgccatcagtttctggtggctgccagcggagctttcgaagtggtgctggacgacggtgtgaataaacggaccgttttgctgaaccgtccgttttacggtctgcacattccgccgggaatctgggccgcagagcagggcttttcttccggctcggtttgtctggtgctggcttcggaaaagtatgaggaaagtgactatatcagggattatcaggaatttataaagtataaaaatgaaattggatagtgattttacgtatgaaaaatatggtctgcaactgaggtttgtaaatgaagatgatgcagaatttataataaaactacggacggatcctaagttaggtaaatttattcattcgacttcttccgatatagaagaacaaaaaaagtggatacgggcctataaaaaaagagaacaagcggggacagattattattttatcttttttaaagatggcgtgccggtggggttaaatagattgtactggatcaaagaagacagttatacttccggtagctgggtattttcaccggatgctccttttgaatgtgccattgcagctgctttgattgtcaggattatcgcttttgaaattttaggtaaaaaggttgaaaacgctctggacggttgccataaggataatgtaaaagttcttcgtttcaataaaatgatcggacttgaaataacagggactattcaggacgtcaaaggtgagtattataccggagtactgacgaaagagaattttgagaaaaacagaaagaaattagaacgtctgttacaattaatataaaatagtatgagtgtagcatttatatttccaggacaagggtgtcagcgggagggcatgggtaaagagctttacaatacattccccgaggcaagagcaatgtttgaagaggccaaccggtttcttgggcgccggattacagacgttatgtttgaaggagatgaacttatgttgatggaaacccggaatacccagcctgctgtttttctttatgaagtgatactggctttaacccagagagaggtttttccggatgttgttgccgggcattcattaggtgagtttgccgctttagtggttagtaaggcgctgtcttttgaggatggtttgaatttagtactccacagagctttgatcgcacaaaaagtatgtgaacgatacgatacggcaatgggggcggttattggtttgactgatgagtatgtaacgagacgaatcggggaaatttcggaagaaaccggtgaaaaaatatattttgcgaattataacggcccgggacaggttgtaatcaccggttctaggaaagggatacgtctggcttgtaaagcttttaaagcagagggggctaaaaaagcggttcaattgagcatcggaggttctttccattctccttatatggaagaagccaggttggaattggggaaaattatacagcagactacttttcacaagccagttattccggtctatcaatgtgtagatgcaaaaccgcatattgatcccgaagaaatcaggaaaaatctgattgaccacatcacccaccctgtgttgtggactcagatggttgggaatatgaagcaggatgggatcgggacttattacgaggtaggaaccgatgatacattacagaaaattgtagccaggatgtgtccggatcagattgtgacgtcgatatggaatttacccgcttatcaaggtatgtataattacgaaaatgtataacaatgacagttctgcgttttaataaagtcggaataaaggcaatatctgcctgtgtgcctcaaaagaaggtttccaactatgatttaggccacttgtttccgtcagattatctggacaaactgattaattcgatcggtatagaagaaaagagaattgcagatgagcatgtgtgtgcttcggacctgtgtttccaggctgcccgaaaattgatggtagacaatcatatcgaacctgagtctatcgattttttattatttctgtctcaaacaccggattatattgttccggccacttctccgatattgcagcacagattgggattgccggatacaacagcgtgtctggatctttctttagcctgttccggtttcatttatgctttatctacggcttttgcttatgcttctgcggatggggtaaatcgggtgttgttattggtgggagatacattctctaaagtcgttaatcctttagacaaagtcaattatccattgtacggggatgccgggactgcctgtctcatcgaaaaaggagattatgatgaatcttgctttattttaacttcgggaggtgaaggtgctgaagttgttacaattccctgtggcggataccggaatccggtaacggcggagagtcttgtcagtaaagaaagggaagacggaaatttcagacgtgatgttgatattactatggatggcatgacgacttttaatcatgcagtaagtgttttaccgaaaggaataaaacagattttgaaagaaacaggccggacggcagaagaaatcgattacttggtttctcatcaggcaaataagtttatgatcgattttattgtaaagagaataaaatttgatccggcaaaagttcctttttgtttgtcgaaatatggtaataccagtagtccgtcagtacctttgactatcgtttcggaattagaggggaaactggatggggagaaaaagatcgtgttgagtgcgatcggtgccggttggacgatagcgacggcatttatggtgaccaaagacattaaagtatcatctataattgattatcaggattaaatgaaatacgaagaaattcaagtcggaaccacccaacagctgactcatacaatcactcaggccgatatcgagaagtttgtggatttgtccggtgatgataataaattacatgtagataaagcgtttgcagcgcgtacttctttcaagaaacctgtcgtacacgggatgatcggtgcctcatttatatcgaccgttatcgggacaaaattaccgggtgacggtgcattatggtactctcaaacgctggacttcctgttgcctgtacggattggagacatgattacagtggtggctgaagttataaagaaaaatgatcgtgaaagaagtattgagctggatgtcaggatattcaatcaaaaccgccagatagtgacccgggggatttcgaaggtgaaagttatcgatgaggatattcctgtaaatgaaaatcttgaaaatgaagaaaatcccagggttgccttggtaatcggggcaacaggaggtattggaaatgcgacttgtttgcaattggctaaggatggtttcaacctgattcttcattataataaaaacaaagacaaagctcggaagttacaggaggaaataaaagctttgggaagagaagtgtatatttgtcaaggtgatgtaaatcagctggcggatatcgatgctctgattgattttagtattcgtaaattctccggaatagatgttttagtgaattgcgccgcttttccgattcctactattaaagctactgatttgttgtggactgatttcctgactcaattggaaatcaatataaaagtgaatttactcttgattcagaaagttttaccggttatggtgggcaatggatatggcaaaatcatcacattgagttccgaagcgacagataaaccgaacgcgaactgggctcattatattacagcaaagtctgcgttggaaggtctgacgaagtctttagcctatgaacttgcccccaaaggtatacggatcaatatggtttccccgagtatggtcagtacggaattgactgctgatatccctgaaaaaatgaagttgatgactgctgcgcagactcctttaaggagattggccagaccggaagatgttgcgggggtaatcagctttttggcgagttcaaaatcagattttcttgtcggagagaatatccggctgaacggaggacaagtaatgttgtaagttatggaagagttaaagtattccgaaataataaagaaaaatgcagttctggctgaatccgtagccgactgtccggtatatgatataacggttttatccaatattacctgccatcagctgggagagatattatcctttaatttgaggagtcacggattaaacccccggcttaccctcggaaattacgataatatcgttcaggacagctatcattgttccggggctaaaatggtgatcattcactatgatcttgtggcgattttggacaagtatgctgactatgcagaaaatcttgcagaaaatcagattgctgttttgacggaaacgatacatacagagattgatcttatgctgagtaatttgagttctgtacccgtagtcgtatttgatacttttcttgcggagggtgtatattctcatgcttttcagttttctgcgacctgtttgattgctgaaaacctgaatatgtatcttcgttcaaggaaacaatccaatttgcagatcatagatattcatacgactttaatgcgggtgggatttgacaatgttttcgactggcggatgtattatctttcaaaatctctttatagcgttgctttttggaaagagtattcctttgaattgtcttcgcttgtctataaatacaccggcaaattgaaaaaagcaatcatttttgattgtgataatactttatggaaggggattttaggagaagacggtgagaatgggatagatatgtctgtacattcgaagatcggtcaaatttatcaccgtgtccaacaaattgcagtttggctgagtaatcatggtgttcttatcggtttgtgcagtaaaaacaatgattcggacgtggaaaaaatattgctcggacattccgatatgaaattgcggaaagatcatattgttgtcagccgggtaaactggaaagacaaggcgagcaatttgaaagaaatagctgaagagttgaatataggtttggacagcctgatttttgtcgatgattctccttttgaaatcaatctgattcgtgaacaattacctatggtactggcttttcaggttccggcggcattacacctgtatcctgctgaattattgaaaattgtagaccggtatatgtatttgtccggcaacagtgaagatatccgcaagactgaacaatataaagcacagcaagaacgggagaaagcgaaaaatgaatactcttctttagaagattatctggcttctctggagatcgggatagaaatagaaaaagacaatgtttttcaaattgaaagaatagctcaattgacccagaaaacgaaccaatttaacctgacaaccaaaaggtatactgaagcacaaatcgaagcatttatgcaaagcaaggattgggaagtatatgcagtgacggtggcagataagttcggtgacagtggtttgacggctgtatgtattgtgaaaaacgaatccggacaggtgggtattgatactttcctgatgagttgcaggataatgggccggaatattgagaaggtaattttggattaccttgttttgagatataagaaacaggagatatcttcaataaaagcaacctatattccgacacagaagaataagcctgtctgtgatttttatgagaattcgggtttcagggtgctggatgtggaaaatggagtgaaaagctatgaattggttttagcggaatatactccttccgatatagaatatataaaaataaaaaattaatgatggataatacagaacaacggattaagcaggtcatggcagatgtttttgatatgcctgccgaaactattttagaaaatgtttctcaggataacctggaggggtgggattcattaaaacatttggatttagtggtcgcattagaagaagaatttgagattacgattccagttgaagaagtcggtaatctgatatcgtttaagttgattgttgtaattattaaagaacttctttctgtcagtaaacaataatagataacattatgaatttagaggaatttgtagcacattttgcagcagaatttgatgaaacgcctgctgatgtatttaccccggatacggcgtttaaagatttagaagagtggagttcgctgacagccttgtctgttatttccatgattgatgaagagatggagaaacgtattacgggtgcggatatccgtaattgttctactatccgggagttatttgaattagcggaatcaaaatagatgtatgatgtataatcctttttcattaaccggaaaaacaatcctggttacaggtgcgtcttccggtataggccgggttgttgccatagaatgtgcaaaaatgggtgcatcccttgtcataaccggtcgtgatgccggtcgtttggatgaaacttttgctttacttgaaggggataagcatatccgggttgtggcagatttgtcaaaatatgaagatatcgagaatctggtaaaccaatgtcctcctttagacggtttttccaataatgccggaatcattaaagtggtattggtgaaatttatttcgcgtgagtatttgggtgatacgctgtcaacgaataccattgctcctatattgctcactcagttattggtcaaaaagaaaaaactgaatcgttcgggatcgatagtttacacttcttctctctcaggtgtttattgtgttcattacggagaatccatgtatgctgcttctaaaggggcgatcagcggatttgccaaaggtgcggcattggatctggctacccagaatattcgggtgaattgtgttaatccgggaattgtaaggactgagatttttgagaattcgggagtaatacctccggaacaactggaagaaaaaatacaattatttccgctaaagcggttaggaagaccgacggatgtggcttttgctatcatttatttcttgtcggacgcatcagcatgggtaacaggaaataatcttaaagttgacggaggatatactttaatttgatagactatggacataaatgaatttgtagcacattttgcagcagaatttgatgaaacacctgccgatctgtgtgctccggatacggaatttaaaaatctggaagaatggagttcgttgacagcgctatcggttatttccatgatcgatgaagagatggaaaaacgtattacaggagcggatatccgtaattgttctaccatcaaggaattatttgaattaacagaatcaaaataacattaaatgtataatccgtattcattggccggtaagactatattggttaccggtgcttcctcaggaatagggaaggttgttgcgcaggagtgtgcaaaaatgggtgcttctttggttatttccggacgtaaccccgaacgtcttcatgaaacatttgtatctttggaaggtggcggacatattgagattgttgccgatttgcttcaatatgaagatattgagagtttgactggacaatgtcctttattggatggattttccaataatgcaggtattaccaaaatccttcttttaaagaatcttcaaaggaaatatttggaggagattatgaatactaatgcgattgctcccatattgctgacacaattgttaactaagaaaaagaagtggaagaaaccctcgtctatcgtgtttacttcggcaatttccgggaactattgtgttcattacggagaatcgatgtttgctgcttctaaaggagcagtttgcgggtttgccaaaggtgcggcattggatctggctgcccagaatattcgggtgaattgtgtcactccgggtgttatcaaaacagacagtctgatgaatagtggcgtactgactcaggaagaattgaaggaaaaagaaaattactttcctttgaaaagattcggcgatcctaaagatgtggcattagctgttatatatcttttatctgatgcttcttcctgggttacaggagataatctgattcttgatggagggtatactttattatgagtgaggtaaggattgtaaagcatattaatcgttttaatacttcgaatacttatctgctgtatacggaaggctctccggaagtgtggatcattgatccgggagatgcttcttttgtactggattggttgacagagtatcggaaggaaccggcaggaatatttgtgactcatagccatatagatcatatatatggaatcaattctattcgtgaatactatccgttactttctgtttatgtttcggaggatgggaaatcgggattgttgtcttcaaaattgaatctttcttattatcacgaacgaccttatgttgtgaaagatgagaatttggttgtattgactgagaatggggaagtcatgctttggaatgatgttatgttgaaagtacatgcgactcccgggcataatacagagtctttatcatttcagatcggtggtcatttatttaccggagatgctttaatccctggagtaaaagtgtttacgaagtttcatggtggaaataaattacaggcaaaagaaacgattgaccggattttcagtttgttttccggggagcaaatgatctggccgggacacggagaggaatgtaaactggagaatataaaaaaagaacatctgatatgataaaatttttagacctacagaaagtgacggaaaaatattccgttgaaatccatgaagctgtaaaacgggtaatcgattccggttggtatttacagggcaaggagaacgaaacgttcgaggcggattattcggcgtatatcggaacgaaatatgccgtaggggtggcgaatggtctggatgcgctgatctggattttccgggcgtatgtggaaatgggagtgatgaaacccggagatgaggtgattgttccggccaatacctatattgcttccatcctggctgttacggaaaacggtctgaaaccggtgttggtggaaccggatcttaatacctgtcagattgatgacagccggatcgaagcagccgttactgcccggacgaaagcgattctcatagttcatttgtacgggcgctgtgcttacaccgaacggatcgggacactttgcaggaaatataatctgaaattggtggaagacaatgcccaggctcatggttgtcgttttcaggggcgccgcaccggttcgctgggggatgctgccggacacagtttttatcccggcaagaatctgggagccctgggagatgccggagccgtgacgaccgacgatgaggcattggctgagactgtccggacgctggcaaactatggttctgcccggaagtatgttttccggtatacaggccggaacagccgtttggatgagctgcaggctgcggtgctggacgtgaaactccggcatttggatgccgataatgcccggcggaaagaaatagcccggtattatatcggaaatatccggaatccgcagattattactccgcagacagaggattgggaagcgaatgtgtttcatattttcccggtacgttgcctccgtcgggatgaattgcaacgctacctgacggatcacggcgtacagacgatcatccattatccgatccctccgcatcagcaggaatgctaccgggaatggaataccctgtcgtttccggtaacggaacggattcaccgggaagaattgagtttgccgatcagtccggtgatgacggatgaagaagtgaagtatgtgatggaaatgcttaatcagttttgttgatggcttctgaaacggaaaaacaggaatataagaatagtctgaaagccacttccttgttcggtggggtacaggtgtataatattattattacaattctgaagtcgaaggtagtggctttgttgctgggtcccggagggatgggaatttatggtttgctgacttcgacaaccggtttgattacttcggcaacaaacttcggactggcgacgagtgcagtgaaggacattgcgggggcgaatgcttcgggggatatgaagcgggtgtcgcggacgattacggtgttccggcgttgggtgtgggtgaccggcttgctcgggatgctggtgtgtctgggtctgtcgtcattttggagtcaactgacattcgggaataaggactatacggttgcattttccgttttgtctttgtctttgcttttcacccagttgtcttcgggacagattgccttgttgcagggaatgcggaagtattccttcatggcaaaatcgagcgtactggggagttcggcaggttttctgctcaccctgccgctttattatttttggggaatcgatgccattgttctggttattgttttaagtagcctggcatcgttggtactctcgtggtatttttcccggaaggtgcaaacagagcctgtacgcctgaattggagggagacggtggaaggggggaaagggatggtgaagatgggattctttatagctttacagggattgcttgccgttggggctgcttatatagtgcgtttatatatccggagcgaaggaggagttgatgaggtgggattgtatacggcgggattcgccattatcaatacatacgtagggctggtttttacggctatctcttcggaatattatccgcggctggcaggattttgtaatgatccggataaatttaaccaagccgttaatcaggaaatagaaatcagtctgttattgttggggccgattattcttgtttttattgttttcgcaaatgtggccattgctttgctttattcaaacaagtttttgggaattgacgggatgttgtactgggctattctgggtattttttttaaagccccttcctggtgcctggccttttcttttatagcaaaaggcgatacgaaggcttatttctggagtgagttgacagcaatcgcgtatactacggcgcttaatattctgttttacagatatggcggattgactggaatggggatttcttttttagcctgttatttattgtattatatacaggtgtggctgatttgccgttacagatacggataccgcgccttttcttccatttggcctctgtttttcccgaatctgattttgggaatcgtttgtctgtgtcttgttgtttttacttctgactttgtgcgttatggggcgggaagtcttatcgttatggtttctttggttttatcttacaggggacttgattccagaattggtatcagacatatattgaaaagtaaattcggaaaaaatgagtgattataatcctttggtttctgttgttgttattacctacaattcatgcaagtatgtccgggagactttggagagtgcaaaaatgcagacttaccggaatatagaactgattgtcaccgatgacggttccacggatgctaccgtagacatttgccggaaatggcttgaagcgaacggggaccgttttgtgaggacagagttgattacggtggcccgaaatacgggtatccctgcaaattgtaacagagggtataaggcatgtaaaggtgagtggatcaagggaattgccggggatgatgcgttgttgcctgattgtatacaggattatgtgaatttcgtttttaatcgtccggaaattaaagtttgttatgccattatgagggaataccgggaattattggacgagaattgttttataaaagctataagaagaaataagatcacttttcctctgtctgcgactaaacagtataaattactatctatgaaatgctggattacggcaccttctgtttttttccggaaaagcctgatagaagaattaggatactttgatgaaagtatacctttttgtgaggattatccattttggctgaaattaactcaaagaggacatcggttttattttttagataaagaaacgattaaatatcgtagaagtattcattctatttccgccagggagagcaaatttataaatgataatgatcatgtatgtgataaggctatttatttaaaatatcttacgagggagactccgtttacaagtagagctatgtttagatataggatatttttatataatgttttggagaggtttagattaaataacagaaataagcaattgaatagattttgttattttttcctgagtcttccttataggattataaattacttgcagtttttttattttgttgatattgtgggtgtgattaagagtaggataaatagattacatatttagaatgaattttaaattaatcattacagatgaatttatggccttatttacgacgatataaactttgggagtataatattgctttgataccggccttattggattcgtttgtagcaaatgaattacgattgtcggaggcggtgtggctaaagcataggtataaagaccggatgtttgcggatccttttattttagaagtaaagggagatcggattgaaattcttgctgaagaattaaaatatcttttcccggcagcttctttagtgaaattaacagtctctttgaagacttttgaattattggagagaaaagttattttgagaaatggttctcatttttcttttcccaatattatacggaaggaggatatggtatatatacttcctgaaaatatagcttccggttctttaaatttgtatcggtatgatgtgagcagagaatgttgtgtatttgaaaaaaagctgttgaatattcctgcctcagatcctgatattgtttattggaatggtagtttttggttgtttgcttgtaagaaaggaactgaccagcaagatttatatttatggaaatctgaggatatcttcggaaaatatcaacctttggatggaattttaataaaaagtaatcgccgcggaagccggatggctggtaatttttttgaatttaacgggaaattatataggcctgctcaggattgtgagggaagttatggggcaggaataattctgcaggaggtgatcgccttgtctgagaataattatgttgaaaaagaagtcgcagaactttatccggttcatgttggctataaagatggtattcatacaattaattttaggtcaggttggtgtgtgattgatggacttaataaaaagtctgatagcttgagagccgttattcgtattttgtataagaaaatgaagattatagattgaaatgaatatactgtttgtaactgcttatgatgtatccccgcagaaaggggggacggaaagggtgatacattccttgtctaatgggttgtgtgcggattttggtgtgaaatgttacctagcttattatgatgagattgaaaagcattatgagcggacttcttttaatggaaagatcaggcttgtttcgggaaagcaaataaagttgttgagtgacagcttgatttcgtggaaaatagatgttattttggttgagggactttttaatgaggtgaaaaggatcaggcatttgatagaggtacagcatttattttgtaagctgatttttgttcatcatttttctccgggatatgaattccatttttatgattttcaccgaatgttgccccgttcaaggaaatggagagatgtaatgaagtctgggatgaaaatcattttgtatccctgtctcagaatttattcaaaatatgagatttgtaggagatatcagaatgcttataaatatgctgaccggatagtattactttcccggaaacatatatcggcatttcggaaggtgggacggattaattctgaaacaaaattttctgtaatacataatatgctttcctataatgaattttttaaaattaccgatttccatttgaaacgcagggaagtcattattgtgtctcgcttggaagaagaacctaaaagaatttctttggctttacatgtgtggtatgagatagaaaaaatccctgacctgaaagattggattttaataattgtcggtagtggcactagtgaaaattattatttttcattggcaaggaaactgaaacttcaacgggttgtttttaaaggtgttcaggaacctttaaattattaccgacaggcttctgtttttatgatgacttctgcctcggaatcgtgggggttagttttgacggaggcgcagcagatgggagttgtgccgattgcttttgacagttatccgaccgcctgtgatattatagaatcgggagtaaacggatatttgataccagacaaggatttggatacctatgaatgcaaattggtggaactgatgagggatgaacaattaagacgtatgttagctaaaaatgctattgggaatagtaagcgttttcttagtgagattattattcgtgactggaatcagttgttggctgatgtgtgcaatgaggcatgattgtaaaatgaattatgaagatcgtattttttgtagctgatttttcgggaggaggtgctgaacgtgttgtttccttattgggaaatgagctggttgggcgaggatatgaaatttttattattactgacactcatattccttttgcatatccttttcggaaagatattcttttttttgatgtccctttcagttctggaagaaagtacgattggctgaaagcactgaaaaggtcaagggtaattgtacaggatatccggccagatatagtaataaccataatgcctctgatgtttttaatggcaaaaatagccatgcgggggataccgatacctgttattgcgtctgatcatacctcttttgagagaaaacttccttttcatattcgtttgatcaggaagtttttttataaatgggcggatatgctgactgttctgacaaaggcagatagtgtttatattggtagtcatataaagaataaggttgtaatgcctaatcctgtttcttatcctgtatttacgggagaatgtagacgggaaaaatgcatattggcggttgggcggttggatgtttggaaggtaaaaggttttgatttattaatcagggcttggggaagtattgccaaacaatatcctgactggaatttaaaaatagcagggactggtcgtccggaatctttccatttgttaagaaggcttgctttggaatgtggctgtatagggcaaatagaatttttaggattccggtcggatattgacttattaatgcgacaaagtgcaatttttgttttgagttccagagaagaaggttttggattggtattagctgaagccatgtcacagggatgtgcatgtatcagttttgatcacggtgggcgtcaaagggagattatcactccggatttttctggtatactgttggaaactcatagttgtcagttgcttgctgaggccatgagtaaattgatcgcggacgactcttgtagacaaaagttatccataaatgcaaggaaagatgtagttaaattttcactaaataaagtggttgatttatgggaggatttaattcgaaaggtcgtcttgaaaaagtttgtctgtttggacagagatgtcgataaaaacaaatgaaatgcaacttgcttacattattattttctctttattgattccggtattatttagggtaaacgggagtaaattccggttaaagtcaggtaatttaagagtagatatctattttctggtggtggcttccgtattgttttatctgcaatttgcattaagatcaagtagtgtaggtagtgatacgcagaattattttgaccttttccagaatattaaagagttgaattattctggagtatgtaattatgtgacgcggatggaaatcggttatttgttttataataaaattatttcagatttatgttctaatccgcaatcattacttgtagtttcaggattgtttattataactgcaaattcgtattttatatataaatattcgcagcagatctggttgagtttattccttttttttacgctgaggtattttgataccaatatgaacattctgaggcaggctcttgctcttgtatgtatattgtattcatatacttttttaaggaaccggcgattctggccttttttgtctttggttggattgggttctctttttcatatttcagcaattgtattcatcatttcatggtttacagtaaaagttcgcttcaaatccagttatatcttttggtatattttgagtttattcggagtatatgtcctctcgtcttatctggttgatatactattccggtttaatattatttatgtttattatgcagatagtgattatctggctggagggaaaatagctccgatgctgaatttatttattaatttatgtatcatcagtatcggaatcagtacaaaatcttataaagttccggttgaatccaaagaaaaaccccggaattttatatatgataatcaaaatatgctgatgcttttattagtatcttcctatatacagattttgggtctgtcttttgcccttttggaacgtgttgctgcttattttcaaattttcagtattgtttttttacctaattctttaaagtgtattcggcggaaagaatggtatatcctttctctttttttggtgattctggtgagtatagcttattatttaattattattacttaccgtccggattggaataaagtatatccttatcgtttttgtttttaatttatcccttctgtatttaataatgaatatcctttatgtttcctgtttgctgaataataaagcaactggtctgtattggagtgtcccgcggcaaatagctgctcaggcacgttatgaccatgttttttggtataatgtaaatcataattcggaatgtgaatggcagaaaatttatccgtgtcatactatagatgaatatccgtatttacgtttaaaagatcttccttctccctttaatgctccggatttggtgatttttgaaagtttttatgaatatgcttttagtaagctggtttatgaaatatggcggaaaaatattccctatattattgttccccgctgttctttgacaaaagaagcacagcggataaagcgcttgaaaaagcggatcgggaatttcttatttttctcgaaatttgcgcgaaaggctttagctatccagtatttgactgaaaatgagtatgtggcatcgggtgataaatggaatgggcaacatatcattattgctaatggaatagatactcccggtgaaatacatagggtatttggttcgacgcttcatggactttttatcggacgtatagccgtttatcataaaggtttggatttattggttgatgcttgttctaaaatgcaggatgaactccgtcaggctggttgcactattcgtctttatgggcctgattgggatgatgatgaaagtaagttgagaaagagagtgcaggaaaggggtgttgcggatattattctgctaggaaatggtccggtgtatgaggatgaaaaaagaaacctcttactccgttatgatttttttgtattgacttcccgtttagaagggcatccgatggctttgattgaagctctgtcctatggtttacctgctgtcgttacggaaggatctaatatggctgatgaaatacggacttacaatgcaggttgggaatcagttactacggttgagggtattgcaggttcattgcgcagattaataaaagaacgggcagaattaagcctgaagagccaaaatgcgatattattatcaaagcagtataattggaaatctttagcgtgtgatgcgtcagaaaaatatgcatttttattacgaaaaaaatgctaactgatttttcagcatgataaatgtttaaataggttttatttatgaaattttctgttcttctctcggtttaccggaaagaacagccagcttaccttcgacaaagcttagatagtatttttacacaaactttgcagcctgctgaagtggtgttggtcaaagacgggcctttgactgatgcgctggatgaggtggcggaggaatattgccggaaatatccggtgctgaaggtcgtacccttgtctgaaaaccaggggttaggccgggctttgaatgaagggttgaagtactgttcttacgatttggttgcccgtatggatacggacgacgtggccaaacccgaacggtttgaaaaacagatagcggtgttttgtgctcatcctgaaatggatgttgttggtgcctggattgatgagtttgaaggaagtatcgaaaatgtgatttcggtgcgggtattgccgctggaacacagtgaaatacggcgctttgcccggaaaaggaatccagtgaatcatcctgttgtgatgttcaggaagagtgcagttcttgtagccgggggatatcaacattttccgctatttgaggattattatttatgggtccggatgttgatgaatggagctcggttttataatattcctgaaagcttgctttatttccgtttttctctggatatgtttaaaagacggggtgggtggaaatatgcgttggatgaatttcgttttcagcaatttctgttcaaatctggatttattgggattctctgttttgtacagaatgtaagtgttcggtttatatccagaatcgttcctaatggtgtacggactgtgttgtataaaaaaatgctacggaaatcataacatgccttgggaatggttgattgaaaaagataatactttgttaaatattttttgttatgaaaatcacattgatcggcggttccggctttgtcgggacccgcctgatagatttattgcgtccggacggcaagtataagttgcagaatattgataaacaacaaagtcattttttcccggatgtgactgtggccggtgatgtgagggatagggagaagttgacggaattactgaaaggaactgacgtagtggtattgctggcggcggagcatcgggatgatgtaacaccgctttcgctttattatgatgtgaatgtcggcgggatgcagaatacgctgtctgcgatggaggccaacggggtgaaacggatcgtgttcacgtcgtcggtggcggtgtacgggttgaataagaagaatccggacgaggagtatccgaaggatccgttcaaccattacgggaagagtaaatggctggctgagatggaactggaaaagtggtaccggacacatcctgactggaatatcagtattctgcgtcctacggtgatcttcggggaacggaaccggggaaatgtgtataatttattgaaacagatttccggcggaaagtttctgatggtggggaaggggaataaccggaagtcgatggcatacgtaggtaatatcgtggcgtttatcaggttcctgatagaaaataaaaaggatggatatgatgcatacaattacatagataagcctgattttacgatgaatgagctggttgggcatgtgagtaaggtgctggataagcatatcccgatgacacatttcccttattggctgggtatgcttgggggatatgggtttgatatactggctttcgtaacacggaaaaaactgacggttagttctgtccgggtgaagaagttttgtgcgacgacggagtttgatgcttcgaaggctttggctacgggatttaaggccccctatacgctgggagaggggttggcgcggacattagagtttgagtttgtacatccgcggacggatgaggtgacgtttaaaagtgaatgaaagatgaaaatactggtcaccggcgcagccgggtttatcgggtcttatgtcgtgcagcgtctgctggaacggggagacgaggtggtggggttggataatatcaacgattattatgaggtggagttgaaatacggaaggcttgcagagtgcggtattgtgaaggaagaggtggggtggtataaactggtgcagagccggaagtggccggcttaccggtttatccgtatgaatctggaggacagtcaggctatggagatgctgttcgtgaatgagcggttcggccgggtttgccatttggcggctcaggcgggcgtgcggtattcaattacgaatccccgggcttatattgagagtaatatcgacggatttttcaatgtgttggagtgttgtcgctggaaccgggtggaacatctggtgtttgccagttcgagcagtgtgtacgggttgaacgggaaggttccgttttctgaaaaggatagtatcgcgcatccggtaagtttgtatgcggcttcgaagaagagtaatgagctgatggcacatgcctatagtcatctgtatggaatcccggtgacgggtttgcgcttctttacggtttacggtccctgggggcgtccggatatgagccctttcctgtttgcagatgccattttgcatgaccggccggttaaagtgttcaatcagggggatatgcttcgggattttacgtatatcgacgatattgcggagggtgtaatccgttgtatcgaccgggtggccgaacccgatccggcctggaatgcggaatgtcccgatccggcctgctcttcggcaccttaccggatctacaatatcggcaattcggagccggtacggctgatggattttatcgcggcggtagaggcggcctgcgaaaaggaagctgtgaaagaatatctgcctatgcagccgggagatgtgtatcagacgaatgccgatacttcggctttacagcgtgatatggggtataaaccttcgaaagacatccgggaaggcatcagggagaccgtggcctggtttaagtcgtattatcatttggagtagttgcttcatttttgatctgaatagttttgtttatataccagttttcccttactgtttttccggtaagggatttttcatttaaatcaatcgtgttatgaatatagcaatagtaggcacgggttatgtcggtctggtgacaggcacctgttttgctgagatgggggtgaacgtgacttgtgtggatgtgatggaagagaagatagagagcctgaaaaaagggatcattccgatttatgagccgggcctggaggatatggtacaccggaattttcaggcaggacgtctgaggtttactaccgatctggcagaggtgttggatgaagtggaagtggttttcagtgccgttgggactccccctgacgaggatgggagtgccgatctgaaatatgtgctggaggtggcccgtacaatcggccggggaataaacaaatacattttggtcgtaaccaaaagtacggtacctgtcgggacggcccggaaagtaaaggcggtaattcaggaagagttggataagcgtggagtagaagtgggttttgatgtggcttcgaatccggagtttctgaaggaggggaatgccgtggacgatttcatgaaaccggaccgtgtggtggtcggtgtggagtcggaagaggcacggcggctgatggagaagctttacaagccttttatgatgaataactaccgtttgattttcacggatatcccgtcggcagagatgatcaagtatgcggccaattcgatgctggcaacgcggatcagttttatgaacgatatcgctaatttgtgtgagctggtcggtgctgatgtgaatatggtacggaaggggatcggggcggatagccggattggcagtaagttcctttatccgggctgtgggtatggcggttcctgtttcccgaaagacgtaaaagcattgataaaaacggcggaaaagaatggttatcggatgcgggtattggaggctgtggaagaggtgaacgagacccagaaaacggttttatttcataagttggcgaaatattatccggatctggcgggaaaaaccatagcaatctggggtctggctttcaagcctgagacggacgatatgcgtgaagctacggctttggtgatgatcggcttgctgacccgggccggagcaaaggtacgggtgtatgatcctatagctatgccggagtgccggcgcagagtgggtgaccgggtggaatacgccagggatatgtatgatgccgtggtagatgcagatgcacttttgttgctgacggaatggaaggaatttcgcttgcccggctggaatgtattgaagaaactgatgaagcagtgtatcctgatcgatgggcggaatatttatgatgcaggagagctgaaagaacaagggttcgtgtatgagtgtatcgggaaatagtgaaagtattgatatacaatcaggtgattgtgcgatattaatgatgttgattaataatatgaaacagttggtacaagaaattttgcggctttgccgggagtacggagaatgccgggtggaggcggaacggatggaggaggcccggagggtgaaaaatgccctggagagtgtgtgtgcgatggcgaggcagagactggatatttcggatccggcattgcttttggcactgctggatgcctgtgaggtgacgcgggatgaggggatgttgcaggaggtgctggatgtggttggtcggaatttggatcgcctggccgtttcggcggagagtgtgaaattgctggcctgctgttattattatgtggaggagaaggaatgtgtggagcgggccggaaggatgctggaggagttgaggaagatgggaaggggggaagaagaattggcggatgtggaaaccattttagaagaattgacttagggggcgactttaggacagatcccgggagactcaggacgtgccccttcgggggcgggaggagtgtggcttgacggaaagcgggggattgattatccggaggaatggtgtatatttgtggttataaaaggatgcttatgccacaagattggattaacgtacatacacatcggccgggagagggggtgaatattgtcgatccttgtctgggaaatgtgattatgcccgggcagggggcggtttacttttctttgggaattcatcccatgtatatcgatgatagggtggaggaaaggttgcagaagatagaactggcggcagcagaggggaagattgtggctgtcggggaagcgggggtggaccggaatgcgcttgctccggtggaagtgcagttgaagctgtttgaacggcaggcggaaattgcaggacggtatgggttgccgttgattattcatggggtgagggcgatcccggaattgattactgcctataagaaatgccggtcacatcagaaatggattatgcacggattcaataaccggcgggagatcttgatggatttgttgcggcatggattttatatttccgccggaaggcatgccatgaacgaagagtcgcaggtgtatcgggtattacctgaaattccggcagaccggttgctgatcgaaacggataattcggattttacgatcggggaggtctatgggcaagtcgcccgtcggagggggatcgctgtggaagaattgcagcatattgtccggatgaatttcgatcggttgtttaaattgtaatgttatactttgaaattttatattatgcctgaatggttgagtcgtacggaattgttactcgggaaagaaaggttggagaaattgcagcaggctcatgttttggtggccggtttaggaggggtgggagcatatgctgccgaacagttgtgccgggccgggataggcgaaatgacgattatcgatggggatgtggtggaactgaccaacaagaacaggcaattgccggctttggattgtaatctgggaaaagccaaggcggagattatggccgggcggttccggaatatcaatccggagattaaattgcatgtgattaacgattttatccgggatgaccggatgatcgaggtattgaaaatggcccgatacgactatatcgtggatgctatcgataccttggcgccgaagatattcctgatttatcatagtctgcaattgggcttgcctgtcgtcagttcgatggggtcggggggaaaactggatccttcgaaaattgcagtggcggacatttcgaaaagttataattgcaatctggcgcgtatgttgcgtaaacgcttgcataaactgggggtttacaaaggggtgaaggtggttttttcgtcggaatttaccgatccggaggctatcgtcctggcagagagtcggaataagaagtccaatgtagggaccatctcttatatgccgcctatcttcgggtgctttatcgcttcggtagtggtccgcgatctcattggagaataaaaagggatattcagtaaatagtataaaatta

SEQ ID NO: 6010 - DNA, 7665 bp, Unknown
  gut microbiota DNA sequence
ctaagttgttcttaatcgttttattgtttgcagacagagcattcgctttttcgaagtcagctttagcctgagcaactttacccgtttcgaacagaatcatacctgcgtcattgaaacctctccaatcgttcgggaattgtctcatagcagcttcgtagatagctaatttatctccattattatcgaacagcgtagctgcatacagtaattcttcaacattcagagcagaaggattagattttgccaggttacggatttcttcatccgatttaccgatgcgttctgcatttacaacaaatttagaacgtctcagtttcggcaggatttgttcagccactacagaataagcagaagaaatatttttgatttctctttctcttacttcaggatctgaatacatagccagtacacgcaagatcaattctttgtcgcggatattagattcttccatcgcttttttgaaaccttcccagtcttcagccacaacatattttttgaagaaatccaagtctttgtattcttctactttatttttcttcatgttgtttttaacgaacttgtcagcagcaccttcccggttgttagccaaattctcgttaaaagacatcggaccatcaggagaagcataagactgaatctggatatttttcaattccatatcttctgcagctttcgcatctttgatgaatttttccattgccttgatttcttttgaactcatttctttggtacggatctgagcagaattgatcaaataatagatagcagcttcctgttcttccttggtgattctttcgaactgatccgcaccgatagcgatagccggagcattattcaccatagtagcggtagcaatcacaccatcagcaattttacgggattcgtaatcagcagattttttacctttagatccctgaaatttcacatacaagccggaaactctcattccttcttcaaaaggaacggttccactataattgacagtcttttcggtagcataaggtacaacctcgttgtttccctgcactttttcgccctggaaagttttaggttcataagctttttctccaccattttggaattttaaaaccggagtagcaaccaaagttactttcttgttaaaatatttagcaggaatagtagcatcgattttaaggtctacttggccacctttagcttccagcatttcaggagttaccttataagcaatgttcttttctaatcttttcatcttattcagagatgaacaagaagcaacaacaaacccggctaacgcaacggtagcaacagttttcaatgttcttttcataatcactttcaaatttattcttaatattcaaattggttgctcaataagcaaagcaaatgtataaaaaaatattaaaacattcacttatctggaaaaatattgaaactaatctacattaattttatgcatcactaacttttctgctttttcgatggctttttctattccttccggataggcccctcccgcagttgcgaagaaaggttgtccgcctccgccaccttttatttcctgagcagcttcacgcacgatctgaccggcattcaacccgtagtcttctgctatactattactgatcatcacggtcaggtgaggcttcccggcatttacacctcccgcaatgaaaatcactttttcatattcccctttcagttgaaaagcgatatctttcgcttgagctgcggggatagacaaattcgtaataatcagattgatatcccggtatacctttttctcgtttttcaaccgttctttcaataaacgtaagctttctttagcaaatttttcagtttccttttttaatccttcgttctcttccaaaacattctttacgcattccatcagatttttattggatttgaacattttctccatttcccggatgatagcaaaggaattattgatgtactcttccgctttatcggctgtgatcgcttcaatacgacgcacaccggcagaaaccgaactctcagacagaatcttgaaaaaaccaatttgtccggtagccggaacgtgtgtacctccacacagttcgacagattccccatacttgatcacccggaccagatcgccatatttttccccgaaaatcgctaaagctcccatagcttgtgctttagccatagggacactgcgatgttcttccaaaggaatattcatacggatcaaccggtttacaatggcagcaacctcggccagttcttcatcggtcactttctggaaatgtgaaaaatcgaaccgtaaatgctcgtcactcacataagaacctttctgttcgacatgctttcctaacactttccgcaaagcataatccagcaggtgagtagccgagtgattattagcggtcagcacccgcttatgttcatccactttcgcgatgaaagtctgggttacatcctccggcatcttctccgccaaatgaatggtcagtccattttctttcttagtatcgataatccggatagtctctttctctccgatcagtactccgctatcacctacctgtcctcctccctctccatagaaaggagtaatattgaataccaggtgatagaaggtcttgttcttggtaactactttccgataacgggtgatttttacctccacctcggtataatcatatcctacgaactcctgaacatcgtcgtcgatcaattcgatccaatcgtccgtatctacagaagatgctgaacgggaacgctctttttgagcttccatttcagctttgaattcccggcggttaaccaccaaccctttctcccgcaagatcaattcggtcaaatcgagtgggaatccataagtatcgtataattcaaaagcaacattaccgggaatcgtcagaaaatcttctgctttagttttctcgataatccgatccagcaatttgatacctttatccaatgtcctcaggaaggcattttcttcttcccgtatcactttttcaatcaattcttgctgagcgaccaattccggataatgttttcccatcacttctatcaaaacaggcaccaaccggtacatgaaagcttccttctgatccaggtaagtataagcatatctcaccgctctccgcaagatccggcggatcacataacctgctttcacattcgaaggcaattgcccgtctgtaatagagaaagaaatagtacgcaaatggtctgcaatcacccgcatagccacatcggcatcgtgtgacaccccatacttcaaaccgctaagccgggatatttcatcgatgattggagtaaaaacatccgtatcataattagaagtttttccttgcacagccatacaaagccgttcgaatcccattcctgtatccacatgatgattgggcaaattttccagacttccgtccgctttccggttgtattgcataaatacaaggttccagatttcaatcaccagtggattatcctgattcaccagttcacgaccggatttcaattttctctcctcctcgggccggaggtcgatatggatttcagaacaaggcccacaaggtcccatatcccccatttcccaaaaattatcttttttattcccgaagaggattcgatcctcggacaaataattcatccaaattttacgtgcctctgcatctccttccagtccgtcctctttgctcccttcaaagacagtagcgtacaaccggtttttatccagtcccataactccggtcaggaattcccaggcaaaagcaatcgcatcttctttgaaataatcaccgaacgaccagttccccagcatctcgaacatcgtatgatgatatgtatcgtgtcctacctcttccaggtcgttgtgttttccggaaacccggagacatttctgcgagtccgcgacacgccggtgtttgggattgatattcccaagaataatatctttgaactgattcattcctgcgtttgtaaacatcaacgtaggatcgtccttaatcaccatgggtgctgaagggacgatagtatgtcccttactttcaaaaaaatccagaaacttttgtctgatctctgctgatttcatatctttttaatgaacaagttgtaactatcgttttttgtactcagaagtacaataaaaaaacgggattgtgtttccacgtcctgaacctgcccaagactgtctctcccgtatcgacgcaaaatagaattgcaaaattagattatttctttaactttgcatcgaaaattatcaattttataataaaaaatggcgaaaacaggttatcgttttaatcccgaaacactgtcttatgatagaatacatgtctccgtaaaaaagaaactatggtcgctggtcgtaaaattcttttccagtttatccctggccctggtcatctttttgattgtttccgctatcgtcgattctccgaaagaaaaggcgctgaaaagagaaaaagaagaaatactggctcaatatcatattctgaacaacgaattggagcgtatggacgaggtattgaaaaatctggaaacccgggatgacaatatctatcgggtgatattcgagtccgaaccgatcgacgcttctatccgccgggcaggttcgggaggagtaaaccggtatgagtccttgaaagacatggacaatgccgaattgatcatcaataccagcaaaaaactggatgaattatcgaaagcgctttatatccaaagtaaatcgtacgatgaaatagaaacattggcgaaaaataagatcgaaatgctggcatcgataccggccatcttacccgtatcacttaaagatccgagtacccgtttttcttcctcctacggctatcggatgcacccgatttataaaacggtaaaactccatgccgggatggatttttccggagccgtcggtacgccgatctatgcaacgggaaacggaaaagtcgtatatgcagaaattcatcaaggttatggaaaatgcgtattgatcgaccacggcttcaattatcaaaccctttacgctcatatgagcgcttacaatgttaaagcaggccaaaaagtcaaacgtggcgatatcatcggatatatgggtaatacagggatgtctaccgggcctcatattcattatgaagtaaagaaaaacggcattcctgtcgatccgattaactattatttcaacgatttaacagccgatgaatatgataaactcgtaacagaagcaaacaataacgggcaaaccatggattaagcggcaactttatacctcagattatggaacaggagaaacaaccattaaaagtatactactcaatcggtgaagtcgccgatatgttcggagtgaatacctcactgattcgtttttgggaaaaagaattcgacgtcatcaaaccacataaaaacaaaaaaggcaaccgccagtttaccaaggcagatatcgacaattttcacctgatctatcatctggtcaaagaaaaaggcatgacactcaaaggtgctcagatgaaattacgggaaaacaaagcggaaaccgaaaccaacttcgaagtggtaaaacgcctgaaagcaatcaaggaagaattacttcagattaaagaccaattacaataatcaggacttacagtcccaagtacagacatgcaaaaccagcaacggcccctatatgtcagagacatcctctctattttagaggacttcgctcctttgagtttacaggaaagttacgataatgccggactcatctgtggcaatccggaagccgaaatacattcggttctgttaagcacggatattaccgaagaagtaatcgacgaagccgtacagggaggacatgatctgctcatctcccaccatccgctcactttacagggattaaaaaatctgcgtccggacagctatgtaaaacgttgcctcatcaaagccattcggcacaacctcaatatctactccgcacataccaatctggatgccgtattacacggtgtcagcggcagaatggccgacaaactgggattacaaaaccggaaaatcctgcaaccgggcggtaaattattcagcctgtgcttctacacgcctgtttcaaaggcagaagaagtaagacaagccgtattaggagtaggcggaggccacatcggtaattacagtcactgttcattcaaccagaaaggagaaggcacctttcacgccgaggcaggcagtcatccctatgtcggagtgatcgggacccttcaccgggaggaagagataaaaaccgaaattacggtccctgaatacctcctctccaaaagcatagagactttactgaaggtacatccttatgaagaaccggtatggaacatcgttaacctggataataccaatcctgtaacgggtttcggaatcatcggcgaactcgccgagccagccgatagtctgcctttcctgcaacaggtaaaaaagactttccgttgtaaagtcgtccgtcacactgcaatctgtaaatctcagatccggaaagtagccgtctgcggcggttccggtgccttcctcacttcggccgcaatagctcagggagccgatatatatatcaccggagactacaaataccacgatttcttccaggcagaaaatcggttgatcctgacagacatcgggcattatgaaagcgaacagttcacaaaagagattttttatgagttagttacaaaaaaaatatctaactttgcgattcagttttcgaaggtcgaaacaaatcccatacattatttataatagggtgtttcttcctctgatggttcaaaaataaattagagttactttataaatatggcaacaaacaacgaaaaactgcaagaactttctgtcgaagaaaaattgcagcatctttacgagctacaacgcattgataccgagatcgataaaatcaagacattaagaggggaattgcctcttgaagttcaggacttggaagacgaaatcgccggtctggaaacccgtcttgaaaatttgaaaaatgaaatcagtgaagctgacaaaagtgtaacaaacaaaaaacaggaaatcaccaagtcggaagagctgataaaaaaatattcagagcaattggataatgtccgtaacaatcgggaatacgatgccctgaccaaagaagtcgaatttcagaaactggaaatcgaattacagcaaaaaagaatccgggaagctcaaaaactgaaagccgaaaaagaggtaaatctggaaatttccaacaaacaatatacagaaaagaaagcagatttagaagcgaagaaagcggaactggacgacatcatcgctgaaacccacaaagatgaagaagcattgacccaaaaatccgaggaattatctcagaatatcgaagagcgtttgttgacagcctaccggaagatccgcgacaatgcccgcaacggcctggcagtcgtcaccgtcgaccgggatgcttgtggaggttgtttcaataaaattccgccacagcggcaattggatatccgctcccggaaaaaaatcatcgtgtgtgagtattgcggacgaatcctgatcgacaaatatatctgtgactatgacggcagcatgcaaaaagcagatctcgaatcagcgatggaagctcaaaagaaaaaaggaagacgaatcaaaaaatcagaagaataagaaaaggctgcaaatgcagcctttttattatcatttcaaatggtaaaggagaattcagttcttaaa

SEQ ID NO: 6011 - DNA, 16392 bp, Unknown
  gut microbiota DNA sequence
agtgaggagttccgccggtcagtgaaggaaagccttaccggaccgttccaggcgaaccggtctgacgggataaaacccggaatcggaatagaaagaaaaaataaacctaccttttttaatttgaaacaaacgtaacttttcccggaaagttactttgggtttccggtttaacgggttggaatgacggtaagagttcgcatcaggcaaaaatactttaccggccttctttcagcagataaactttacgtttgatttcctgagcccattcgatcggttttttgcttttatccagactttcccattcgatcggctgtccgatatagagcgtgaacgtgcggttacgttgtttaaacgtttcatccggcaggtaaagcatttcgatgttggctttcaggccgatttttttccggaaattcgccaggttgtaaaaaaagttcgaatttcttccatcgataaagatcgggacaatatcccgtcgatgctggatggctttggatacgaaacttttttgccattccaggtcttggatgatcccttgttgtttacggctgaccagaccggccggaaacatgatcatctgacagtcggaagcataagcgtcttccaatgcagaaacggcgtctttcgcttgggcaccatgcttgttgaccggtaagaaaatgttgttcagattctttaggtttaataaaagatcgtttaccggaaatttcaattccgggtaacgtgtacctaaaaaagagattaaaataataccatcgggtccacccagaggatgattggacacaaaaatataccggccgtcgggggaaggcaggttcgcttcgccgatcacctgataggaaacatggagatattccaatatcgcatcggagaagtccagccctttccggtcaccgtaacgggtaataaaatcattgatatcgtcttgatggatcacttttttcagataggaataaataaacccgggaatcattttggctactcccggatttttgcttctgaaaagttgttcgatatagatcggttttaaaccctgattatctgccatgagtatcttgttttagtcgtagagtcggattggtttataaactttaagcgacgaaagagcaactttaaaaattttataaacgaattatacctgcaaaggtataaataaaacggaatttttgaaaatccttcgtcacctgctcccttttagggatgaaactttcggtgaggctttccgttaaaagagtaggtaagaaaaaactgaattaaaaactgataagttaaactaaaaacgagaagtatgaaacgtacatttttaatgacgggattggcagttttgacactggcgtttttcatgaccggatgtaattcgatgaaaaaattacagaaggaagtgatcgaaacagccgttgtgggctatgttaatccggaacaattggaatctgtgaatggagtggtaaatttcaattataccatcaattttgctcctaaacagtttgataaaaagatgattctgaaaattacacccaaaattcagtacggtagccagatgatgaatttgcaaccgatgtttttacagggagaaaatgtgaaaaacgccagttatccggtggtgaactatgataaaggaaccagttttactcagaaaatgtcctttaatttcaagccgggaatggagaatggagtactctgggcagatatcgaagctatgcgcggtaacaagtcctttatgctgagcccggtaatcctgaataaaaatggaatcaaagtttggaaacaaccggtattcacgctggacggagtaaattatgttccggctatgaccgagacttttgtgagtgatgttccggcagaggctgtcggtgtggtaagtggttatgtgatgtttccactgggaaaatctacgattagccaggctgaacaaaattcgccggtaatgactcaggcggtgaaagccatggaaaaagttttggcagataagaatgccaaaattacgaatatgtttatttatgtatccaattctcccgaaggtgccgaacgtttgaataagaacctggccaatacccgtttccggtctgccaagagtttctttgaaaaagacctgaaattgcagaatacaccgatggcccgtaatccgaaatttgtagttcagcaaacggttactgaaaactggaacggtttgtatatgcttcttggagattcaaatattaagaacaaagatcagattatcaaagacttgaaaagtgctccgaatgccactgcccggaataaagtgatcgattcttatatcgctaaaattcctgaattgaaagaggtgatccttccggtccttcgccgtgccgatttcttcgtattctacacggttcccactactgtacaggaagatgtgcaactgacttattttgtacctcagttgactgaaaagactccggcagtgaccgctcagaccaattggcagttattgaacgatctggctgtgatggctatcaataataaagaatattcgaaagcacagaaaatactggaagcagctgttgctttgaagcaggatgctaccgtaaacaataacctgggggtaatccatgcacaaatggggcataaacgggaagctgcccaatatttcgacaaagccaagatccggaaagaagcccgttataatatgggattgatcctgatgcaaaacggagaatatgcaaaagcgattccctatctgaaagataaacccaacatcaacctggcttatgctcaattgatgaataacgacaaccgcgcagctttggagactttccgtaagattaaaatgcagaatgcgatggattattatatgcaggctgtagctgctgccaggataaaagataccaaagaaatggcagtctctttgcaaaaggcgatccagatgcaaccggacctgaaaaattgggctgctaccgatatttctttctatccttacaaaggagatcctgtttatatgcagattgtgaaataaaattgtatttatgttgttctgatagaggggtgttcgggaagccggcaccccttttgagtggaaaagaaaaagaacgacaagggagaccatttggaaatttgaaaaaaatgtcgtaattttataaacttgataaaatagcatttactgattactgcggggtgtctgtttcggatggggattgctcatcgcgaagaacgttcggactttatcgatattcagcagaaagcttgtggctctgttacttttctggttagaggtacattattctcactccctgggtggagtactggtcgattgtataatatttattttaaaggaagtagaatggaacgaacttatcaggcttatggtctgacaaattatcggaatattcgtcaaataacccgtttgaataaggaagaattacaggcaattgaggtggttggaagggtgttaccgtttaagacgaataactatgtcgtggaagaactgatcgattgggaacggatagatacagaccctatttttaccttgaattttccacgtcgtgaaatgttatcgaaaaagcatttttcagtcgttagtaaattattggctcaagaggtcggaaaagaagaatttatagcagcagtcaatgctgttcgtcttgaattgaatcctaaccccgccggccaggatcacaacgtacctatgctgggggatatccgtttgaaaggtatacagcataaataccgggaaaccgtattgttttttccggctcagggacagacctgtcatgcctattgtagtttttgttttcgttggccgcagttttccggtatgaatgagctgaagttcgcaatgaaagaaacggacctgttattgaagtatctgcggttgcatcctcaggttacggacgtattattcaccggaggggatccgatgaccatgagcgcttccttattgtcggcttatatagaacctttattacaaccaggattagagcatatccgtacgatcaggatcggttcgaaagctttggcatactggccctaccggtttatttccgatgtggatgccgctgaggtattgcgtttatttgaaaaagtgaccgctaccggtaaaaacttgtcttttcaggcacatttcaatcatccggtggaactttctacggcagctgtatgcgaagctatccggcggatccggaatacgggcgcacagattcgtacccagtctcctttattgagacacatcaacgattctccggagatctggcgggagatgtggcggaaacaggtcgacttgagttgtatcccttattatatgtttgtggcccgggataccggggctaagcattattttgaaattcctttagagaaatgctgggatattttccgtaaggcttatagtcaggtcagcggtatctgccgtacggtgagaggaccgagtatgagcgacgagccgggcaaaatccaactgctgggagtggccgaaatcaagggagagaaagtgtttgtcctgcgttttatccaaggtcgtaatccgaagtgggtagatatgcctttttttgccgcctatgatccgaaagcgacctggtttagtgaactgcgtccggcttttggaaaggattatttcttttttgaacatgaatttccaactcgtccgatgtatggggatggatttttatttgaataattttaaacctgtttgtattttgagcgtataagattcagctattcattaaatattaatcttatggacaaaatgataaaaggtacagaaacagaaaagagtttgctgaaagcctttgccggagaatcacaggcaaagaaccgttatacttttttctcggagattgcaaagaaagaagggtatgagcaaatagccggcatattttatgagaccgctttacaggaagaaatgcatgccaaacgattctttagctaccttgaaggaggaatgctggaaatcacagccgcttatcctgccggagctttattggatacgttggctaatctggcagaagctgccgacggcgaacacgacgaggctttcaatttgtatccggcattcgggaaaattgccgaagaggaaggcttcaaaaaagtggccgcaacttttaaatatgtgaccgaagtggagaagatgcatgagcaacgttacctgaaattattacaaaatatacgggataatctggtcttttcccgcccggaagaagtccgctggtattgccgtaaatgcggttatgtacatgtcggcaaaactcctcccgaaatttgtccttcctgcctgcatccgaaaggatatttcgaactgttccccgataactattaaaaaacgattcggttgtataaatccggcctgtgtgaggaattttttctttacgcaggttttttgtttcgaagcgggaggtgaggtctttaaaaattttccggtatctttgtaaaaatttgagcggatgatagcgggaaatggaactaaaatgaaagataggtggaatatcgttggttgtgtgttattttgctttgttgttttcggtgtacaagcacaacagcaacatccggtaaataaaaaggcctggggacttttccagcaggcacgggagtcttttcgcgaaggagataaggagaaagctttgggattacttttgaaagcagagactttcgatcagggtttttcacccttgtatctgttgaaagcagatatatacaacaaaaaaggagataagattcaggaaatccgtgctatcgaaacggctttggctttggattctctgaaaagtcatccttattattattttattttggccgaatattatttcgatgaagccgattacggaaaagctttggcacattacgggcggtatctgagttgggataaacgcttgcaggtaaaggcagtggcggagcgacagatggaaaattgccggtttgccctggaggctttgcggacccaaaccaaacaacctcccgaagtgttttatgaggccggatgcccggtgtattggccggcattggatgtgaccggacaaaccttcttgtttaccgaacaggccggcgaacaagaaacgatgtggatgttgcaaggcgacagacgctatgcgttgaatttttccggtagagaaaattatggggctccttcactgacagccgatgggcgaatgatgtatttttccagggaaaacggccggaatagttttgatatttatgtggcttaccgcttgtcggatacgtcctggtcggaaccggtcaatctgggcgccccggtcaataccgatggctgggaggctcaaccggcggtatcggccgacggtacacgtttgtattttgcttctacccgtgagggagggagagggggaagcgatatttggttttcgtatttgctaaggcgggaggcggatggacgacagttgtggtcacagccgcgttgcctttattttaataccggaggagatgaaatggcccctttcctgtatttcgataataaaacgttgttttttgcttccgacggatatgcggggatgggacggaaagatatctataaagtggacgtggaacaggtgaccccaccgctgaatatcggtattacagtgaatacccaaagggatgaattcgggtttatggtggatgctagcggtcaatggggatatttttcgtcggatatcagcgggaaacgttgtatttaccgatatcggctaggagaagaggtggcttgtccgcctgcctcttatttgaggctgttgactgtaaatgaagccggtgagccggtaatacccgatgggttgacattaacagaagtggggaccggtgataccctggcttgttacgaccgggtcgatgcccggacggatatgctggcttgtattcctgtgaataaattattatgggtgagcgctgttaaacagggctatttgtattattcggataccctgcaagtgaaagaaaatacgagagaaaatccccgaatctatacgctctgtttaagaccgatccaaaaagaacagacattggttctcaagggaatcttttttgatgtcgacgactatcggttacggcccgaatcttatccggaattacggcaattggtcgtgtttcttaaacagaatcctgaggtaaagatcgagatatccggccataccgataatacggggagtgatcaacataattatcggctgtcggaaaatcgggctttcgaggtgtataaatatttgttcttgaatcatattcagaaggaacggatggaatataaaggatatggcaaggatcgccccttgaggactaatgatacggaagaggggagaaaggagaataggaggacggagattagggtaaggtgaaaagagaataaaatatacgatagggtatgaaaagatatgaagtgagtgggttcggggtaatggaatatgaggaggttgcttcgaccaatagtctggcggaaaaattgccgctgagtgaattgaaagataaacaggtgattttgacctggcgacagacacaggggcgtgggcaggctacgaatcggtgggagagtgccccgggaaagaatatttcaatgacggtgattttccgtccggagtgtctggaggcaggaaaacagtttgccgtgtcgatggtgatcgctttggggtgtctcgattttttaagccattatgtcgagggggtgacggtgaaatggccgaacgatgtgtatgtgggggaaaggaagatttcaggtatcctgatcgaacaccgggtggccggagctcatattcaaagttcgttgtgtggtatcggggtgaatattaatcaggaacaatttttatcggacgcccctaatccggtgtctttatttcaattactcggtcgggaacttcccttacaggaggttctggaagagctgttggaatgtatcgggaagagatatgaacagattcatcggtatgccgaactggaaaatgactttttacggcatatgtaccggtctaccggaatatatgattttgaagatgaacgtggaatcttccgggcttcggtcggaggaatcgatgaatatggccagctgatcctgaaagatacggatgggcgggaaagggtatatgcattcaaagaagtgagatatgtctgctgatttctcctatacgttgcggtcttgtgttttcagttgttataccgggtttattccggaaaggctgggtatgggctgatcaatacctctctgactttaatctcactttcttttcggattctttcgaccggggaagtcatttgttttcaggattgatccagtttatctatacctgtcgtttctactttacccgtaagcctttccgaataagtatgcggaaagatcggaagcaggttactttctgaaaaatgcttggaaaaaccggaaaaaaccgaaaaaccgggtagggaaatcagtaaaatttgattatttttgcatgacagtccaaaaaacggtttatgcattgaatacagcaggtgcttttttacggtcgccgatgtgcccattgggattgaaagtcccgtgaacaaagcgcccctggcagtcttaggctttatatactttaagtgccgaaagagcactttggcaactttatgaaccgaattgaaacaatatgttttagtgctgaaagggatggacttaataaactttatagataaaatttgatggttgagaattattcggaagattcgatcaggacgctggattggcaggaacacatccggttgcggccggggatgtatatcggtaaactaggagacggttcggcgcctgacgatgggatttatattttggtgaaagaggtggtggataactccatcgacgaatttgccatgggagccggtacagagattacgattaaggtagaagaccgtaaggtgagcgttcgggacttcggccggggtattcctttaggcaaactggtagatgcttcatctaaaatgaataccggagcaaaatatgattcggaagctttcaaaaaatctgtcggtttgaatggcgtcggtattaaagcggtgaatgctttgtcggagagctttgagattcagtcgttccgggatggcgagaccaaatatgtgcgttattgccgtgcaaaaattgtagaggaaaggaagatcgaaccgactgaccagccgaacggtacacaggtaacctttttcgccgataaggacattttcgggaattaccattacattgccgaatatctcgaagcgatggtgaagaactatgtatttctgaacaccggtttaaccatattcttcaatgaccataaatattactccaagcggggattgtatgatctgctgatggaaaatatgagcggagaaggcttgtatccgatcatccatctgaaaggtgaggatatcgaaatggctatgacgcacggacggcaatatggggaagaatattactcgtttgtcaacgggcagcataccacacagggaggaacccatttgagtgctttccgggaagcggtggccaagacgatccgggatttttataaaaaagatttcgaaatatcggatatccgtacttctattatcggggcgatcagtataaaagtacaggaaccggtgttcgagtcgcagacgaagacgaaactgggttcgaaagatataaggcccgacggtcctaccgtacgtaactttatcatggatttcgtgaccagggaattggataattatttacaccggaatccggatacagccgaattgttgttacggaaaatcgtcgagacggagaaagaacgtaaagccatgtccggtgtgcagaagattgcacgcgagagagcgaagcaggtgagcctgcacaaccggaagttgcgggattgccgggtgcacttcaattccaatcacgaacggaaaaacgaatcttcgatttttattacagagggagattcggccagcggatctattacgaaatcccgggatgtgaatactcaggctgtgttcagcttacgcggtaaaccgctcaattcctacgggctgaccaaagaaatagtctacaaaaatgaagaattcaatttattgcaggctgctttgaatattgaagacgggttggaagaactgcggtacaacaatgtcatcgtggccacggatgccgatgtcgacggtatgcatatccgcttgttgttgctgaccttctttctgcaatttttccccgatctggtgagggccgggcatgtatacattttgcaaactcctctgttccgggtcaggaataaaaaagaaacccgctattgttactccgatgccgagcgtgaaaatgccatccaaaagttaggtccgaaacctgagattacaaggtttaaaggactgggagaaatttctccgaatgagttcgtacattttatcggaaaagatattcgtttggaaccggtacgtctttcaaaaggagattcgatcgatgaggtgttgagttattatatgggaaaaaatacaccggaacgtcaggattttattatcgacaatctgtatattgaaaaggatgaattaaggtaattttgaaatagtgttatgggcgaggatataattgacatggatttgaatatggaggggggacgtaaagaaactgacgaagaagggaaagagatagcggccgggaccgatcgttcggcctcggaacagacagcgccttacgaggctgaagcggcaggaacagaacaacacatagaagacgacgaggaaatccctcaactgatcatggagcattcgggagaagaaagtgggaagattcgttctattcagcatctggacgggatgtaccaaaagtggtttctggactatgcttcctatgttattctcgaacgggccgtcccttacgtgaacgatggtttgaaacctgtacagcgacggattctgcactctatgcgcgaactggatgacgggcgttacaataaggttgccaatattatcggtaataccatgaagtaccatcctcatggagatgcttcgatcggagatgcgctggtgcaactcggacaaaaagatttattgatcgattgtcagggaaactgggggaatattctgaccggagacggggctgctgctccccgttatatcgaggcccgcttgtctaaatttgccctcgaagtggtatttaatcccaagacaacgaattggaaaccttcgtatgacggacgtaatcgtgagcccatcaccttacctataaaatttcctttattgttggctcagggagtcgaagggattgccgtcggtctggcttctaaaatattacctcataatttcaacgagctgatagatgcctgtatcgctcatctgaagcacgaagattttgtgttgtatccggattttcctaccggtggaatgatcgatgtcagcaagtattgtgacggtatgcggggaggaaatgttaaaatcagagcgaaaatcgagaaagataataataatagggcactaaagattactgaaatacccttcggacgtacgacctcgagtttgatcgacagcattatcaaagccaatgagaaaggaaagattaaaatcaaaaaaatcgatgataatacggcccgggatgttgaaatattgattcaactggcccctggagtctcttccgataagacgatcgacgctttgtatgctttcaccgattgtgaattatcgatttcacccaattcttgtgtcatcgaggaggaaaaaccccggtttatgccgatctccgatattttgcggcagtcggcagacgatacggttgccctattgaaactggagctggagatccgtttgaaagaattgctggaagatctgcattatgtgtctctggaacgtatctttatcgaagaacgcatctataaagacaagcagtttgaagaaagcgaaaccatggagttggttatcgctcatgtacaccggcggttacagcctttcttaccggaactctaccgggaggtgaccgatgacgatgtgaaaaaattgctggagatcaagatgaaacgaatcctgaagtttagctctgaagaagccgatcattatatccggagtctgaatgaagagattgctgtggtgaaacataatatcgaacacatcattccttattctatcgcttattatgaacggataaaagcgaaatacgggaaaggacgggaaaggaaaacggaaatccgtaatttcgaaaatatcgaagccgctaaggtcgtcatcgcaaatgaaaagctttacatcaaccgggaagaaggttttatcggaacggccttgaagaaagacgagtttatctgcgagtgctcggatatggatgatgtgattgtctttaagaaagacggtacctattatgtgacgaaggtggccgataagatattcgtcggtaaggatgttcaatatgtgaatgttttcaaaaagaacgataaacgtacgatttataatgtcgtataccgggacggtaaatatggggcttcttatgtgaagcgtttcaatgttaccggtgtgacccgggataaagtgtataacctgactaaaggtaccgccggatcccggattttgcatttttctgccaatcccaacggggaggccgaagtgattaaagtttgcctgaaaccgaaacccagtataaagaaactggtattcgaatatgattttgctgcgctgtcgatcaaagggcgtgattctcaggggaatacactgacaaagaacgatgtccacaagatcagtgtcgtgcaaaaaggagtatctactttgggcgggtgtaaaatctggctggatgaagatgtgttgcgtttgaataccgatagccggggaaaatacctgggagaattccagggagaggaccggattctggttgtaaataagaatggtacttaccatacgaccgattttgatctgaataatcattatgacgaaggatatatcgtttttgaaaagttcgaggccgataaggtttggtcggcggttttcttcgatgccgaacagaattattattacctgaaacgtttccgtttcgaggattgtgtgaaactgaattccatcatcggtgaggtggaaggctcccgtttgatctgtctgagtgacgagagacatcctcgttttgaagtgatattcggtggaaaatatgaagcccggcctgccgatgtgattgtggccgacgaatttatcggtgagaaatcatttaaagcacgcggtaaacggatcacaaccttcgaggtgaatgaaattcgtgaaatagaacctttgctgaaggaaggagaggccgacgagatcaatacggatatcgaatttgaagtgactaatccggaagagattgccggcgacgaacaaatgaagctcgattttgaaaatacggataatccggatgaaatataatgtcgggactatgaagtattttttagtcggttatatggcctgcgggaagacccgcaggggaaaagtgatagcggaagaacagggggtccggtttatcgatttggatgcttatattgtcgaacgtgaaaataggagtatctctgaaatttttgctgcgatcggagaagccggatttcgaaggttagagactttttacttaaaagaggtttgtgaactatatcaggattttgtcctctcgacagggggaggaaccccctgtttcaatgataatatggcgtatatgaatgcgcagggaatcaccttgtttctgaatacggatacggatacgatcgtagaacggctgattcggggaaaacataaacgcccgatcgtcagcaagctcgaagaccatgaaatccgggattttgtcctccggcatttgaaagaacgcctgcctttttataagcaagcccaaaaaattatcgtttaaatagtagaattattctgtcgttacttattcgtcttcggtgatcggaattggcgaaccggtctgacggtataaaacccgaaatcggaatagatagaaaaaaataaacctacgtttattagtgtaaatatgtatataactgccttacttcttttagggtgaagggcatttgtcagaaatgagatgctccgggcccgttttattttttctgttaaaatatcggatttaaaaataacagtctgttcatgttttttagttttgattatttctcggaataagagatgaaaacgtatatttgttgcacaaagtaacctaaaataatttatcatgggagagcggattacttttcggcggaacgaagggcttattacagtaaagccttattggaggggaaatcctgtggtaaagggacgttttgtgaatcggcaacatcgctctaaacaggggatcggtaatgttttgaaatggcgtttttcgcccaatccccaacgtaaagagaaacggaacgaaaattgggaacctcaactttttccactgcatagcatacaagggattagcggtgatgcgttggcttggttaggacataattctttctttatgcagttgggtggtaaacggatcatgttcgatccggtctttggcaatattccgttcgtccgtcgtaagagtaaatttcctgccgatccggatattttcaaagagatcgattacttgctgatcagccatgaccatttcgatcatatggacaaacccagtattacccgtttatatgagaacaatccccggatgaaagtattttgtggtctgggaatgaaggatttgatccggggctggctgcccgatattcaggtgatagaagccggatggtatcagcgttgggaggaaggacggttgaaaattacttttttgcctgctcaacattggagcaaacgttctttaaacgacggaggactgcgtttgtggggagcttttatgttgcagaccgatgacttgtcggtgtattatgggggagataccggctattcctctcattttaccgaaatagaagaattgttcggtgctccggattatgctttactgggtatcggagcttacaaaccccgttggtttatgcaagcgaaccatatttcgccttatgattccttgacggctgcttcgcagatgaaagcccggataacgatccctatgcattatggaacattcgatttatccgacgaacccctgagtgatccgcctgctgtatttgccgaagaggccggcaaaaggaatatacaggtaaagattccggctttaggggaaattgtaaagcttcggaaaagatgatttataaattcctattatatgaaaacaactttattacttatcgtatcttttatttttttagttatgacagcatgtaattcagagaaaaaagaaagtaaaatccagacgaaggatgccttggaaaatattatgggccggaaaagtgtaagaaaatatttacccaaaccggtagaaaaggagaaaattgaggtattattgaaggcaggaatggctgctccgagtggtaaagatgtccggccttgggaattgatcgtcatcgacgaccgggaagtgctcgattctatggctgctgtgttgccttatgccaaaatgttgaaagaagctccgatggctatcgtcgtttgtggggatactactaaatcttcttattggtatctggattgttcggctgttactcaaaatatcttgctggctgcggaagcgatcggattaggagctgtctggaccgctacatatccttatgcagatcgcatggaagtcgtgaaaaaatatacgggaattccggaacaaattaattcattgtgtgtgattcccgtaggatatccggctatgcctcatagtccgaaagataaatgggatgcttcgaaggttcatatgaataagtggtagaagaaacgttatccttataccattcggatgacctgatttgccagtgatctcggggttaaaagaaaaggtgtttatatacatgtttatcctaaacccaggtatattttttctttctgttccgattccggattttgtgtcgtcagaccggttcgcctggaccggtccgttaaggctttccttcactgaccggcagaagcgaccgggtccccgaacacgaacaccggagacggataagtaacgacagaataattctatgtttataagtgtaaatatgtgtatcattgccttatttaaatacccttaccctgtcgcataaaggtttgtattctttcttttggggtggttccagcggtaaaccgaaaggcatctgtgcaatcaattcccaggtggcaggtaatttccaggtggcaataacctctttgtcgatcagggaattgtaatgttgcagggaggctccgaatccggcgtcttcgagcatagtccagacggccagttgatgcatccctgaggtatgctgggaccattgcggaaatttttcatgatataaagggaaagctttctgtaaaccttcgattatagcggtgtcctcaaaaaataataccgtaccgtaaccggctgcgaacgatttattgatttttgcttcggtagaagcataagcggctgccgggatcgtcttttttagcgtattccggacaatgtcccaaagccgtcgatgctgttccctcaataatagtaccatccgtgtggattgggaattgaaagcagag

SEQ ID NO: 6012 - DNA, 41677 bp, Unknown
  gut microbiota DNA sequence
gcatcaggaattgtggtttgattatctatcgcgtaataacttctgcgatgctttaaagcttctttaaggttcctttccatgatatttcattttatgtttacacggtatacgcaaattttgctatctttgtggtgacttttcaaaaaaatgttagttatgaagatgaagggtaggataatttattttgaaggctagtttatttttcatttagctttcgattccccctttttttatcgcctattgcttttttagcctatagcctttaagctgtagctttttagtcttttgtttatagtttttttatcatggatctttggaaaaagaaatttattattatatggtcgggacagttgttttctatcctgagtagtgctattgtcggatattcggtcatgttttggttgagcatagagactaaaagtgccgaagtgctatcctatgctgtgttggcgaccttattacctcaggctttgttaggacctatagcgggtgtatatgtcgatcgttggaaaagaaaactgaccatgatcgctgccgatagttttgtcgctctatgttctttgatactgggaggtttattctatttcgatcaggctgaattgggattgatttatttgttgatggctctgcggagtatcggaaatgctttccattcacccgctatgcaggcggctattcccatgttggcgcccgaatcggaattaatgcggattgccggagtaaaccaggcgttacagtcggtgagtagtattgccggacctgccttaggagcacttttgatcacttcactgaatatgacggtggtgatgctgctggatgttgcaggggcgatcatcgcttgtaccgctttggcttttgttgcgatccccgacccggtcaggacggaagaaaaacggaaacccggaatatggcatgaaatggtcgaaggctggaaggaagtacaaaaacatcggggattaccctggttgatgataatttccgttgcagttactttctttttaatgccggttgctgtattgtttcccttgatgacggtaactcatttcggaggagatacttttcaaatgagtctggtagaaattgtctggggtgcaggtacattgctcggcggtttgattctgggagtctggaaaataaagatccggcgggttgggctgatcaatagctcttacctggccttgggaagctatattctgatatcgggattattgccttcggatgcttttgtgctgtttgtgtgtttaactattatcggtggattggccggttcgttttatagtggaccttttacttccgttttacaaacttttatcgatcatactgctttaggcagggtattttcactttttggaagtctgagtttattaccttctatgataggtattttgttgaccggttatatcgccgatacgataggggtaagtaatgcgttctggatttccggatgtatcattttatccctgggggtgatttcattcttcatcccttcggtaatgaaactggaaaaacggagtggcgaagatcgtttttagcactaaaatatcggatttgtacggatacaattcgggaaatccggtatctttgcaggaaaggttttggttgtttggagttcctctgtcattgtaaagagaaagggagcttctggcggaagaaaatccgaaggatttgctgttgaagatttcatctaaaatcgaagatgagataatatgtcgaacagaaggataaattttctcggcaggaacggggggtgagtctcggcaaaccggaagtttttaaacaaccataaactgtgttttaatggttttccgttcaggaatgaaaatgatttgaaataaaacctatgcaatcgaataagacaactgcctcgctactacaaccggacttgtttccggattttcggaccgcttctttcagtcctccgaaacattccagggacttgtgtattcctcaacggaaatgggaatttttatgccatactttgtatctggggaaatatccttttctgttggggccgaaaggatgtggtaaatcatcggtggcgatggaattggccgatgctatggaaatggattatttcggtttcgatatggggcaggcatttaagccgaagaaaatgtttgtcggtgggttggttatcggggatgaagggaaaaccctggcggtccgttccgaatttttcaaggctttcacttccgataggcctacgttgatcttcctggacgagctgacccgtatcccgatggtggctgctaattttctgatgacgattctggaccggcgacagtcgtatctgtatgacgaggattcgggtgttcgctataataaaggcacgaatgtacaattcgtcgctgccggtaacaccgggtttgcttatgtttctacccaacggctggactctgctttcgaagatcggtttatcaaggtacaattggattacctgactcccgaggaggaagcggcattgatgatgcagcgttatcctttggtaaaagcttctgcagcggctcaactggcagagatagcccgtttattgcgacaggccgaacaaaaagaggctcttaccgtgtcgttgtccacccgacaggttttggatgccgcagcctatttgcagttgggctattctgtccgcgaggtggtcgaagaggttattctgaccaattatgtgattgccggtgagcagttagtggcccgctcgttagtacagatggtatgacccgcgaagagatcgaatcggtgtatagccgggatgttttggaccggaattggtggggaaatttcccggaaccgttggatttattgggaaaagattttccgaagacggccgatatctatcgattgatgccggtatgtgcccgcattgccttgcatatgggaggtgaattgccacggattattttttcgaaagaggggggagccaggatggatttcaattccgtggtgatgaatcccgagattctttcgttgaaagtgagtgaacaggttcgggcagaagtttttttcggccaatatattcatcaggtcgggcatatttgttatagccggggagtatacgaaaaataccgctgtacacttcagcaaaaatattttatccatctgatagaagatcgtcggatagaagggaggattgcccgggtatatccgggatattattattatctgaacgctgcccgccggatgcagtttacactggccttactgagggctgaacaggaattgaagtttaccgatttggacgatgtgcgctataactatctggctacccgggtcctttttcctgaattgctggaatatgaagtgtttaaaacccgtttgcttcctcaccggagccggttgggatggatcgacggcctattggatacgattacggattatgcttccctggaaccacgacaagtggtggagctggcacaacaaatcagtgcccgttttataactaaggacgaggagttaccgccgatgttcaattattattccagggtaatgatgaatctgcctctggaagtggaaggagctccggtggatatcgatgtcaagatcctcgacgatctgtttttggatttgagtaaatcgctggatttggtgccttgggccgatatcgaagaggatacgaaaggggctttgaaacgggccggaagtcctgttgcagaacgctatcgggaactggatgcctcttgtggggtagtagatccggtcttgatgcggagagcaagggaattagccgctaaaatccggctgaactttctgacctttcaggcaaagatgaataaagcttgtgttttttatgagcaggagagcggggatttggatgaagacgaattgtatcgggtgcatttgaatcctcatatttttatcgaggagttgcctgccccttcggctttgctggaagtggtgattatgctcgatttatcgggatcgatgaccgatgaaaataaactggaattgcagttggtgttatcggtcgctctggcgcttgctttcgaagccaatccggatatccgattttctatttatggtcaccgggtaaagcaggaaagggttgaaatcgtccggtttcatgaacccgggaaacgtctggagatcaaaaagcttttttctcaagagggaatgtatgtcaatgccgatggattcgctatccattatgctacgcagaaattccggactaccacacagaataaattactgtttatgatttccgacggcacaccgacagcagctgccggtaagaccgatccgcgggtgcatgtccgggaaatggtccgggaggcccaacggaatggaatcactgtactttctatcgggatttcgaattttaaccagtcggatatgtacgacgaatttattccctactccggaccggaagtcaccacccggctcgtccaatggttaaggcggaaatttgcccatattgccgatggggcgaccttttaacccgtcgtttgtcgttattcggtgaccgaatccttataaaaacagtaaaatttgaaacttagaaagggtttttccgatctttttacttttaatcttttactttttacattaaatcgttatttttggaatcgtttgagaaaaggaagcatcgttgcgctaattcaattaatcatcataatacaaacttatggaacaagaagaacaaaagctaaattcgttgcccgataacgcctatcgggagttgaagcctggcgaagtgtataaaccgattatgccggctaattcgaaaccccgggaagtaacgacttactcggtggttttcggtattattatggctatcgtcttttcggcagctgcagcttatctgggactgaaggtgggacaggtgttcgaggctgctatcccgatcgctattatcgcggttggatgcggaaatctgatgaaaaagaataatatgctcggacagaatgtgatcattcaatctatcggggctagctcgggagtgatcgttgccggagcgatctttacattacctgctttgtatattcttggtctggatgctaaattttatcagatttttttatcctctttactcggaggattgttgggtattctgatgctgatccctttccgtaaatattttgtaaaagatatgcacgggaaataccctttcccggaagctacggcgacgaccgaggtgctggtttcgggtgaaaaaaagggaaatcaggcgaaattattggcggtgagtggattggtcggtggattatatgacttttttatcagtactttcggttggtggacagagaccatctccacccggatcatgggttggggagagatgctggctgaaaaaacgaagctggtatttaaagtgaatacaggggctgcagtgttaggcctgggatatattgtcggattgaaatacgccgctattatctgtgccggttcgtttaccgtgtggtttgtgctgatcccgtttctgagttattttgcagatggacagactgttgctgtaggagaaggggtttctatgctgatccgggacatgtcgcccgaacagttatttacgaattatgcccgtcatatcggtatcggtggtatcgctatggccggtatcgtcggcattatccgttcgtcgggtattatcaaacaagccttaggcctggcggtaaaggaattggggggaaagaagggaagtgaagaagtcgcagaacgtacacagcatgatctttcgatgaagtttattctgatcggtttgctggcgactttgattaccactttcattttcttccagttcggtgtactgggtaatctcttccagaccattgtcgccatactgattgtgtttattatttctttcctgtttactacggtggctgctaatgctatcgctatcgtggggacgaatccggtatcgggaatgactttgatgacattgatcctggcttcgctggttttggtgagtgccgggttgagcgggacaaacggcatgatggctgccatggtcatcggtggcgtggtttgtactgctttgtctatggccggaggttttattaccgacttgaaaatcggttattggatcggtacgactcccgcaaaacaggagcggtggaaatttctgggaaccgttgtttctgccgctacggtggccggagtaatgatgatcctgaatcagacttacggatttgtaggtgaaaatgctttggtggctccccaggcgaatgcgatggctgctgttatcaaacctttgatggaaggaggagcgactccctggatgctgtattttgccggtgccgcactcgcattgattctgaccatgatcggggtacctgccctggcttttgccctgggaatgtttattccgttggatctgaatacgcctttattgatcggagggctggtcagttggtatgtatctacccgtagtaaagatgaaaaagtaaataagatgcgccgtgaacgcggtacactgatcgcttccgggtttatagcagggggagccctgatgggagttatcagtgccgtattgaaatatgccggagcagattggtatgctacctggagcggggcagaatggctggccgttgtcatgtatgtcgttattatcggttactttatctgggattcgttgagagccaaagaagagtaaaccggagaggaacccgataaacgaaaaatcgtaaatcgtaaatctaaaatctaaatcataaagatatggaattaaaagagcgttttttgaaatatgtcggattcgatacccagagtgatccggagagtgaaacctatccgtcgactgcgaaacaattgattctgctgaattatctggccgaagagatgaaagagctggggttggaggatgtggaagtcgatgccaatggttatgcgatgggtactattccggcaactcccgggtatgaagaccggccggtgatcggttttatctcgcatgtcgatacgagtcccgatatgagtggggccgatatccatccccgtatcattgaaaattacgatgggggagatatctgtctgaacgagcaattgacgatgacgctggcagattttccggagttggcttttttcaaggggcataccttgatcacaaccgacggtacgacgctgttgggagccgacgataaagcaggggtggcagagatcatgaccgctgccgaatatctgatgaagcatccagaagtgaaacacggcagaatccggatcggctttacgcccgacgaagaaatcggaaaaggggtagacttttttgatgtaaaacatttcggtgccacctttgcttataccgtagacggaggctttgaaggagagctggaatatgagaatttcaatgctgccagtgcccggatcgaagtacaaggacgtaacattcatccgggttatgcgaaggataagatgatcaatgctttgcaggtagtcaacgaattgaataacttattgcctccttgtcagcggcccgaacatacggaaggttacgaaggtttttatcatttgatcagtatcaggggagaagtagaaaatgcttccagtgaatatatcatccgggaccattcgcgggtgaaatttgaagagaaaaaacgctacctccaggctgttaccgctctgttgaccgggaagtacggagaaggggtgatcaaactaaccctgaaagatcagtattataatatgcgtgaaatggtcgaaccttatcccgaagtaatcgataaagccttccaggcgatggaaaaggccggtgttactccgatcgttcgtcctatccgcggcggtacggatggtgcccgtttgtcctatatgggactgccttgtccgaacttatttacaggaggtatgaatttccatggaaaatatgaatattgctcgctgaatacaatgcaaaaagcgatgcagacgattttgaatctgatcgaattgtggggtaaataatacccggattctttgttgaacagcctgccgcatgaaggagagcgtacccatccggcaggctgtgtgttatccggttatttttttagctgggtttccaggtagttctgtagaatccgggcatggttgtgaacaggatctttcgaagcatataacaaggttactaccggataagtcccgattctggaaagaaaatctttaacggcttgcgagtgctccaactcttctttatacatcgaagtaaattcttcccaatgtcgggagatatcgtcatgaaaccaggttcttaaaccgggagagggagtgatttctttagcccattcatcgtaggataaacatgctttttttatccctctgggccagagcctgtcgactaatacccggtaaccgtcccccggttccggatcgtcatatacccgttttattttgatttgtatcatgtttttttactgttttactgattggaaccgaaaaagttatcattaaaacgtagaattattctgtcgttacttatattcgtcttcggtgatcggaattggcgacccggtcagtgaagggaagccttaacggaccgttccaggcgaaccggtctgacggtataaaacccggaatcggaatagaaagaaaaaatatacctacctataacttggcccttatcatcgttccaataaacaaataccttccgtctgctatcggtagggaaggtatgcgattgtacaaaagcttgtcctgtgggctgagggaggccggacactggcaggtggcatcggaatgggagaagcatattttattactgtaaccgtttcaactgaaaaagggtgcacttcattgaagcacacccttgatttattacggtaaactcttgttttatccgaggaaagagagcaggataccggctgcaacagcagaaccgataactccggctacattgggacccatggcatgcatcagcaagaagttgccaggattggcttcctgacctacagtctgagatacacgggctgccatcggaacggccgatacaccggcagaaccgatcagcgggttgatcttattcttggtaaacaagttcataaatttagccagcaatactcctccggcacttcccaaagcgaaagccaggattccgattaccaggatggccagagtttggtagttcaggaaagctgttgcggtagttgtcgctccaaccgaaacacccagaaagatggtggtaatattcatcagttcgttctgaacagtcttactcagacgttctacaactccactttcacgcatcaggttacctaacatcaaacaaccgatcagcggagcggcagaaggtaacaataaagatacaaaaacagtaacgatgatcgggaatatgattttttctgttttagatactttacgcaattgcttcatgacgatctcgcgctctttctgagtagtcagcattttcataataggcggttggatgaccggtaccaaagccatataagaataggctgccacggcgatcgggcctaataaattgggtgctaacttagaagtcagataaatggcggtcgggccgtcggctccaccgataataccgatcgaaccggcttcggcatagttgaatccgagaaccaaagctcccaggaaagtagcgaagataccgatctgggctgctgctcccaataggaaacttttcggattggctaacagcggaccgaaatcggtcattgctcctacaccgatgaaaatgacacagggatagatacccagtttcactccgaggtagatgtaatccagcaatccgacgttattggcatttgcaaaatccggccaatgaatgtgtcctccttcaaatagttccggatgatacaatccggctcccggcagattggtcagcaacataccgaaagcgataggcaacaataacagaggctcgaactttttaacgatagccagatagaataataaacaagcgacagctatcatcaccaaacacaaccagttgccctcgacaaggcgggcaaatccggtgtcgttcaggaatttactgatgctttctcctaaactgacttcttcggcactggcgataaagggcgtaatagtcaggcccagaaaggcaaccagccgaaagagatattttttcatttgtttcattactaacgattttacaatgaattactgcagatcaaccagtttatcgtcctgtacgaccgtctgtccgacagtgacatggatggctttcacctgtccgtccttgttagccataatgttgttttccattttcatggcttccatgacgactaaggtatctccccgtttcacctgatcaccgacttttacgttgatggtcatgatcgttccgggaagcggagctttgatactggtggcactggatgctgcagcagccggtgctgaaacatgtacctgtggggtaccgggagctgtcgatttgcggataggagctgcaaccgtatttttgctttcatagcttacatcgtaagatatcccgtttacttctacgttagctttatgatgatccgttagattcactgtgacgtcgtaattatttccgtcgatagtgattttaaatttattcatatggtcaatttatttacttgataatcgtatttctcatgctgtaaattttggaactccatggcgaatagcgcttttctacttcctgaatcgtgatgacatgcggctcttcatcgtgggcatcgaagtacaggtgcatagccatggctatggctgcttgttcgtgaggcgtcggatgggtttctgtcgtccttacggtcgcttcttcagaagcccctttcgagtggcctgtgatgccattgatgattttggtttgcaaaccaattacccaaatcaaaacaataagcagtaaaaatacagttccgattcccattcccgtgaccaggagcgcatagccccagtcgattgctaatatggtcataattataaaggtatattagaatgtttcttcatcgggttagtgacacgcttcgtctgtaaagactggaaggcccggatcacacggaaacgggtgttgcgtggttcgatcacatcgtcgatataaccgtaagaagctgctttgtaaggattagcgaatgcatgattgtattcttcctctttctctgcgataaatttagcttttgcttccggatcggtgatcgctgctacttccttaccgtatagtacttcgatagcacctttggcacccatcacggcaatctgggctgtcggccaggcgtagttgaagtcgccgcgaagttgtttacaggacatcacgtcgtgtgctcctccgtaggatttacgtaaagtaacggttactttaggaacggtagcttcgccgtaagcgaacatcaatttggctccgtgggtgatgatgccgccgtattcctgcacacggcccggtaagaatcccggtacgtctaccaacgtcaggatcggaatattgaaacagtcgcagaagcgaacgaaacgagctgctttacgcgatgattcgatatcgagtactccggcatagaaactaggctggttggcgataatacccacagaacgtcctcccatccggcagaaaccgacgatgatattccgggcataacgtttgtgtacttcgaggaatttaccctggtctacgattgcttcgattacttccagcatattgtacggcagattgggattatccggaatcaggctgttcaatttgtcttccagacgatcgatcgggtcgttgcataccatcatcggcgcttcttcgaggttgttggaaggcagataagaaagcagatcacggatcagagaaataccttcttcttcgttttctaccataaaatgagaaacgcccgatttggtcgagtgaacttctgcacctcccaggtcttctgtactgatatcttcgccggtaacggtttttaccaccttcggtccggtaacgaacatgtaagaactctgatcggtcatcaggatgaagtcggtcagggcaggagagtatacggctccaccggcacaggggccgaaaatagcggatatctgtggaataaccccggaagccaggatgttacgctcgaaaatttcagcatatcctgccaatgaatttacgccttcctgaatacgtgcaccaccggaatcgttcaatccgatgatcggagctcctaccgtcatcgctttgtccatgactttgcagatcttctgagccaacatttctgaaagtgctcctccgaatacggtaaaatcctgtgcaaatacaaatacgatacgtccgttgatcgttccttgtccggtaacaactccgtctccgaggaattttgtcttttccatgccgaaattattacaccggtgtgtgacgaacatatcgaattcttcgaagctgtcttcgtccagcaacatggcgattctttcccgggctgtatatttaccctttttgtgctgagattcgatccgtttttcgcctccgcccaatttcgcttgatttcgtaagtcgataagttctttgactttatcttgatttgtggccataaaattttaaatttacttttaaatatctaaaatgcctaagctttgaaaacatcgaaagcgccaaaaggacactgctttaaaatgcctttctgacgttttcaatcatctttgacgcttttgacgtaattattttttaccgcaaagttctgtcagtacccgattggttgatttcgggtgaaggaatccgatttgaagtccttctgctccggtacggggagctttgtcgattaactgacaaccggctgctgctgcttcgtttaaagcttcggctacatcttcaacggcaaatgccatgtggtgcataccgccaccatttttttctacaaatttcccgataggaccttcaggatcggtagattccaacaattcgatttttgtctgacctacttgaaagaaagctgtttttactttctgatcttttacttcttctactgcatagcatttcagtcctaatacattttcataaaatggaatagcttcttccagacttttgacggcaataccgatgtgttcgatatgagttggtttcatgatcaataaattgatttgttaataaattgtattttaaaatgtttgattttcaccgttttatgttgtataacatatttttttacgcactcaaacgtcttttcgaaaacgttgttattgcaaaaagcgttccaaaattacgtattgttcttacgattatcaagcaaaatcggaagattattttcagtttttcatgtttagaacagttttaaataacagacgatacattttcaggtttgaggggattcgaaagggaaaaccgaaaacttttcgatagaaaaaacgtataaaatttgaatcttctttcaaaaaaagagtaggacaaaagactttttgaaagaagaaataatatttaaatcttcagattatgaacaaacagagatttgctgtcattattgtggctctcatcggcttgatagctacttttttaccttggtataaaattgtacaattgggaacaatatccggaatgtcttcgtcgggctggtttacctttatcatgtttatcatagtgattattctggctttgagaaaggatctgcatgaagatctttcgatgggaatttcctggagcattacgatttgtagtttactggcatcgttcgtcgttttgtggaaaattatcgatgtctggttcgcccaggaaggaatgtttagccttggtggcggtatggagggaatattgggaagtcaggtcagtatcgcttacggagcctggattgttactatcgccgggatctgtgtcccgtttgccggttatttgttccgcaataaatcctttcggcgggtttgagagaaattttttactttttgcctttccccttttggcttttttctttatcttgtgacactttttaaaccgtacttactaaaaattgaaagatatgtttgaaacaagtgtttacaaaaacagacgcgcccgtctgaaagaaaaagtgaaaagtggtttggtgttgatcctgggaaatggggaggccccggctaattatacggataatacttataagttccgtcaggatagttcgtttctctattttttcggtctgaatcaacccggttttgcaggagtgatcgatatcgattcgggggatgaatatatattcgggaatgatgtggatatggatgatattatctggatgggacctcaaccgagtgtaaaggatatggcagcccgggtcggcgtgtcgaagaccgctccttttgcccggctggcggattgtatgaaaacggcgatttctcagggacgccggattcattttttacctccttatcgtttcaggaatatgctcttgctcgaagagttgttgggtatccggcctgctttggtgaaaaattatgcttcgctggaactgatcaaagctgtggtcgatctccgctcggtaaaagaaccttgtgaaatcgaggaaatcaccaaagcttgtaatatcggttacgaaatgcatacagctgctatgcggaattgtaaaccgggagtcaaggaacaatatattgcagggctgatcgaaggaattgcagcttcgtacggaagtatggtgtcgttccctgtgatcctgtcgcagaacggtgaaacactccataatcacgatcatagccagatccttcaggaaggacgtatgatgctgacggatgccggagcagaagaagtgtcccattattgttcggactttacccgtacggttccggtcggtgggaaattcctgacccgccagaaagaggtttataatatcgtattggctgctaataacaaagcgatagagatagctaaacccggggtgacttatcaatacgtgcacctggaggtatgtaaggtgctggcacagggtttgaaagatctcggcctgatgaaaggagatgtaaacgaagcggttgctgccggggcgcatgccttatttatgcctcacggactgggacatatgatgggattggatgtacatgatatggaagacttgggacagatctatgtgggatatgacgatgaaacccggccgatcgaccagttcggaacttcatcgttgcggatggggcgccggttgcaggagggatttgtcattaccgatgaaccgggatgttattttattccggcattgatagaccaatggagagcacaggggatgcataaagaattcctgaattatgacaagatcgaaacattcaaggatttcggaggtatccgtttggaagatgatatcctgattattcccggaggttcgcgcttcctgggagataaacgtactccgattactgtcgaagaagttgaggagattatgcgttaaggggtgttttttttaatctgatattcaaattagaggttaagtatttttatctgcaaaataatatttaaaatcgtaaggatgcatagaagtttttctatgcacctttttttatggttttgtgtaaatcagatgtaaatggaaaaatggtagaattattctgtcgttacttattcgtcttcggtattcgtgtttggtgacccggtcgcttctgtcggtcgtctagccctttctttcactgaccggcggaactcctcactccgtaaaaaactttacgttacgtttccgtcagacaccatcggtcggacgttcagaaaaagcaagacgacactcgccggagctccaatggtccccgaacacgaacacctccgacttacgttatcactgcctggcaagctaaaccggacctgaaaaccataaatttcaacgaaaaaagattttccgatagagtaacccaattatccataatccgatagagatgagccggtattttattctataaaatttttctaattcttcctttgccaggtcgtgttaacgtgagatgcagggttttgtggcggaagaccattggagcaggaacgagggtccggttaggttttccgaacgcccgaccggtggtgtctgacgagcttgcgaggagttccgccggtcagtgaaggaaagccttagcggaccggtccaggcgaaccggtctgacggcataaaacccggaatcggaatagaaagaaaaaataaacctacaattaaacgataatatcccgtctgcttatcgccaaaaatcaaaggggcggtaccctgggggcgatttatcgaagatgggctcgactatctttccggaagccgctttgaatggtatattgatgaccgctggggagaacaagtatttaaaacggatggaatcggtatctacggtggttgggacgattcgtttaagcaaacgaaatgtcggtcccgagcttatgtatggggaatattcgtggatggaaaagaagtggaacggggggacaccgatgttgataaaagtaggaaacttttttcttgtaaatcttttctgtgaagggaaaaaacactaatttaggcgtctctttgggattgaaataaagtaaaacataaaatattgaatctatgaagtttgtcgtatcaagcaatacattgctgacccgtttgcaagcggtaagtaaagtgatcggtggaaagcccgtacaacctattctggataatatcttgttggtggctaccgaaggtgtcttatatgcaacagcatctgataaagagacgaccatggaagcccggatagaattggaaagtctggaagaagaaggtaaaataacgatacctgccaaaatattgctggatattttgaaggaatttcccgaacaaccgttgacattcgaaatcaatacggagaccaatgaggtgaaaattatttccgagaagggagagttttctgtgccgggagaaagtgccgaagattatccgatacaggcagcactcaacgatagcagcaacgacctgacctctaaatgcggtttgattctggaaggaattgtgaagacgatatttgcaacggccaacgacgatctgcgtccggttatgaactgtatcctgatcgaaatgaacgaagataattttacctttgtcgcttcggatgctcacaaattagttcgttacaaacggttcgacgccaaaagtgaaaacggacagttctctttgattttaccgaagaaaccggccttgatgctgaagaatattctgccgaaagacgactcggaactgaagatctcttttaacgataaaatggcttgcttcgtattcggtgattataaaatgacttctactctggtcgagggacgtttcccgaattataattcggttatcccgcagaataacccgaaaaagattatcattgaaaagaaagagctttacaattctttacgccgggtgtctgtcatggccaatcaggctagtaatctggtgaaattcgatgttgcagaaggaaaaatcgtcatttcagcccaggatatggattattcgatgtcgggacacgaaacactgacttgtcagtatgaaggcgagaacatcgctatcggtttcaaatcgcctttcgtccttgaaattctctctaatatcgaatctgaaaatgtggtgctggagttatccgatccgactcgtccgggattgttcctgccgtttgaaaacgaggacaacgatgaagatttgttgatgctgctgatgccgatgatggtgtaacggaaagacttatccgatagaatagtaaaggtaaaaatgaaagataaagagtcgtttgattggtttttatagtaaatcgaacggctcttatgatttatgggtaggaaagtgttgcttgtccttgtcctgctacggaagagattataaattttgaagtatatgaaactgaatttagctaatcccatcgtttttttcgatctggaaaccacgggaatcaatattgctaaagaccggatcgtggaaatttcggtattgaaagtgtatccgaacggtaaggaggaacaaaagaccatccgggtgaatccgggaatgcatatccccgaagaagcgtctgctattcatggcatttacgatgaagatgtgaaagatgcaccgatgttcaagcatattgcccgcgaattggcgcattatatcgaaggatgtgatttgggaggatataattcgaatcgtttcgatatccccttattggcagaagaatttttgcgtgcggaggtggatttcgatatgagtaaacggaagtttgtagatgtacaaactattttccacaaaatggaacagcgtaccctgtcggctgcctaccatttttattgtgataaatgtcttgaagatgcccatacggctgcagccgacacgatggctacctatgaggtgctgatggcccagctggatagatatggggaaaagctggaaaataatatcgatttcttaagtaagttttctacccaaaacaagaacgtcgactttgccggttttattatttatgacgataaaggggtagaagtgtttaacttcggtaagaataaaggagtgcctgtagagaaggtgttgaaagaacaacagggatattatgattggatgatcaaaagtgatttcccactttataccaaaaaggtgttgactaagattaaactgagaagttccgggttagtaaaaggggtgtagcttcctgtaggaacgaaaccggaaacgggagatatgggtgaactggtaaggaaggaattaaaaagtttttttgcctcgctgtcaggctatgtggtgttggtgttttttctgcttgctaatggtctgtttttgtggatcattccgggaggatatcatattccggcaagtggcctggccgacatgcaggctttttttacctttgctccgcttttgtacctttttctggttcctgctctttgtatgcgcctatttgcagaagaaaggcgtaccggtacgctggagttactgcttacccgcccgctaactacctggcagattgtcggagcaaaatatctggccggatttctgttggtgctcttttcgatattacctaccctcgtttatccggtcagtttatggtttttagcccagccggtcggacatatcgatgtgggaggaattataggttcgtatatcgggttgattttcttatccggcatatatgtggctgccggggtttgggcttcggctttgaccgaaaatcagattattgcttttctctacaccctggtggtggcttttttgttgtataccggtctcgactttatagccggtattcctttgtttgaagattatcagacttcgattcagttttggggaattcattttcattatgagcccatgtcgcggggggtcatcgcttttagcgatgtcgtttattttgtctccttcgtttttctttttctgtgggctaccgtacggcggtttcacggaatacggttaggcgggggctatgttataatagcttttgtggttttgaatctggcttgtacccgggtttacctgagggcggatattaccgatgataagcgttatacgctttccgaatccacctgttcgttgctccggggaatcgaccggggagtcagtgtagatatttttttgggtggaaaattacctgccggtttgcaaaaattgcaatatgcattgaccagaaatctcgaagaattccgccggctttcgggaaataatttccgttatcagctgatcgatcctacggaaatacaggatcctgaagagaaaaaggctttagtaaaatacctggcagaacggggaatcctgccgataaatctgaatcgcagaagtgaagacgagactttatcccagcagatcatttttcccggattgatcatttacgatcaggaaactgaagtaagtgtcaatttattacagaatgtgcccggaaatagtgccgacgagaatatcaaccattctatcgaggcattggaatatgaattgacaaaagcgattcggttactgatacagaaacaaaaaaaagtagtcggttttttggtaggacagggcgaattgacttatccggaagtgatggatatggcgaagacactttcctattattatcaggtcgatctggtgagttgtgatagcctggcgaccgacttgaaacgctatgctgctttgattatcgctaaaccgacgaaagatttttctgagcgggataaatacgttatcgatcagtatcttatgcatggtggacggttactatggtgcttggacgaagtggatgtagatcacgaagtgttgaaaaatcaggagactgtacctgctgtttatcggcctttgaatgtggaagatatgttgttccgctatggggtaaggataaatcctgatctggtattggatggaaattgtgtgctgattcctgtgattaccgggatgaacgggacgactcccgactatagtccgggttgctggtattattcgcccttattactcgcccgcggacaacatccggtaacggccggattgcaaccggtacgggtggattatgccaacagtatcgatacggtgggaaaaaacgatggactgaaaaagaccgtattgttgtccacttcctcttatgcggctgttatgaaaactccttgccctgtatcgttgtcgataaccgaggagaagatgactcccgaccggttcaatcgtcggtttgtaccggtagcagtagctgtcgagggaaattttacttctctgttccagtaccggaatcgggaagaagtggcgggacagccttttaaagcacagagcggttatagtcgggtgatcgtagtagctgacggggaggtgatccgtaatcaggtgagaggggtgggggaaaatgcccggatcgtacccttgggctatgatgagtatagcggacagatgtacggaaaccgtgattttattctcaattgtgtcaattggttgtgtgatgatgagggatggatgcagctgagaggacggaatttgtccttatatctattggataaaacccggctgaaagcggaacgtacttcgtgggaaatgctgaatttattattccctatatttatcgtcgctgttgggggaggaatctttgcctggggaagaaaatcaagaaaccggaagaggggttctacccgttttaacgatttaagatagaaatttccgatgacttctattcaactttttttagtgaaaaccgtataaaagaacaaatgaggtttttactggtttttcccataaaaaatattttttaacttaataggggagggtttggcttatcttttgatagaagagaggcgtctttgtgaatgaatttaaaaaaagaaaataaatcgagaatcatgaaattgagattatttattttgtcgggtttgtgtgcttggatcggtgtttcctgtggaggaaaaaaagaaaataccggccaggaaagtattcgtccggtacgggtggtaaaagtagaatcactgggagctatgcaaaaaatgtataccggagtggtacaggctgaagaatacagtaaactggcatttaaggtttccgggccgttggttgaaatgaatgtggatgcaggacagaaggtgaagaaggggacagtcatcgctgctgtcgatcctttggattataatttgcaattcgaagccaataaggcggcttatgtcacctccaaattgcaaatggaacgaaataagaagttgttggcgatgcaggcgatctctaaacaggattatgaaatagccgaagcgaactatgtaaaagccaaatcggcctacgagacttcgcagaatacattggccgatacaaaattgagagcaccgttcgacggttttgtagaacagaaatatgttgaaaattatcaaaaagtgcagccgggagaatcgattataaaattggtgaatccggataaattggaagtcggttttatccttcccgagactaatgtcaggttgacccgtgaaaaaatgcaagtggcggtcgaattcgatacttacaaaggcaaatggtttaaggcagaggtgaaagaatttgtggatgcttctcccgacgggagtgggatacctgtgcgactggccattaccgacaagagctttaaccgcgatgtgtataatatttatccgggtttctcttgtaaagtgatcctgagtatcgataatgagaccggaaaaggctatactgtgccgttaagtgctgtatttaaagatttaaaaactgacgaaacttcggtttggttgtatcatacagccgatgagacggtcaaaagacaaaaagtcactaccgagcaattgttggggacagatcgtgttttggtgaccgaaggattggaagccgacgatattatcgtggttgcaggagtgaattatatcgttaatggacagaaagttgccgttattgaaaattagaaattaaaattgaaaccatattgatatgaatatagcaaagtattcattggataatccgaaggtcatctacttttttctcttcgtcatgttgatcggaggggtgatttctttcggttcgctggggaaaaaagaagattcgccttttgtgattaagacagccgtattgattactcagtatccgggagcttctccgaaggaagtggaacaactgatcacagagccgattgaaagggagattcagtctatgcggcgtgtctataagattaaatccgattcatattacggtatgtcgaagatcaatatcgaattgagtcccgcaactccgcccgaagaaatgccgcaaatgtgggatgaactccggcgtaaggtattgaatgttcagtcgcaattgcctcaaggggcatccgatattaaagtttccgatgattttggagatgttttcggtatctatttctctctgacagccgacgaaggatttagctatcatgacctgagggaatggggacaacggctgaaaaccgagttggttacgatcgaaggtgtgcagaaggtggccctgttcggagaacagaccgaggtggtcaatgtttttatttctatgtcgaaactggccaattcggggatcaacctgaattcgttgatgcagaccattaaatcacagaattcgttgatcaataccggagaaaagagagcaggaaatatccagctcaagattctggctgaaggaacgtacaagaatctgaccgatatcagaaatcagttgatttctaccgagaccgggcaacaaatccgtttaggagatattgctgtgattgaaaaaggatatatggaaccgcccagtaccctgatccgggtaaatggcaggaaagggatcggtatcggagtttctacggcacccgactatgatgtggtgaaggccggagaggctgtgcggttgaagttggcacaactggaagaacaaatgccggtagggatcgaaatggtgacgctgtaccccgaggatcagatcgcccgggaggcgaacaacggttttatcctgaatctgatcgagtcggtggtgatcgtgatttttatcattcttatcgtcatgggagtccgggccggtattctgatcggtagttcgttgatattttgtatcggaggaacactgttgatcatgcagtttatgggagtaggattgaatagaacttccttggctgcttttattatagccatggggatgttggtggataatgctatcgtggtcaccgataatgcacaaatagcgatcaagcggggaatacgccgccggcaagccttgatagacggggctactacgcctcaatggggattgctgggggctacgatgatcgccgtattctcttttctgcctttatatctggcgcaatcttccgtagcggaaatgatcaaacctttgtttattgtgttggccgtttctttgttacttagttgggtgctggcgttggctcagacaactgttttcggaaatttcattttgaaagaaggttccggtgagactggaaaagatccgtacgatactcctttttaccataaattcggtaaattcctgcgtttgctgatccgcttcaaggggacgacgatgttagtgatggtggggttatttatgctggcgatgacgattatggggttgatgccccagaatttcttccctaatatggataaaccctatttaagggccgattgctttttacctgaaggatacagtatccgggagacagaaaaagaaatgggaaagatcgaagagtttttgttacaacaggaagaagtcgtgaatgtatcggctacatacggaagctcaccacttcgttactatctggccagtacttctttcggtccgaaatctaatttcggtaatttcctggtcgaagtaaaagataaaaaatatacggctcaggtagaagaacgcctgaataaatatgtccgtgaaaactatccggatatcctgatccgttcctctttatttaagctttcgccggcagtggaagcgaatatcgaattcggttttatcggagagaatatcgatacgcttacgatgttgacggagaaggcaatgagtatcatgcacgaatgtgatatggttaccgatatcaaaaatagctggggaaataaagtacctgtctgggagccggcttattcgcaggaacggggacaacggctggggattacccggcaggcagtggcctatgccctgaaaattgcaaccaacggtttgcctttgggcgattatcgggagaaggatttgtttatgcctattttgctgaaagaggaaaatatcgaatcgtcgaatatcgataatatgaagaccttacctgtattttcccagtcgggatatgccgtccctttggctcaggtggtggacagctttgccttcggatataattacaacgtaattaagcgttataaccgcgataaggtgatgatggcacaatgtgactccaaacgtggagccaatacgatggcagcttttgcgcaggtaaaaaaagcgattaccgagggtatggatatccctcagggttaccggatgcaggtcttcggggaaaacgaaactcaggaagagtcgaattcggctatggctgccaatttaccgttgacctttatcctgatgttcatcgtgttgttgtttttgtttaaaacttatcgtaaaccgacgatcattttgttgatggtgcccctgatctttatcggagttgtcttcggattggctgtaaccgggaaaatgctcgatttctttgcaatcctgggggtactggggttgatcggtatgaatatcaagaatgctattgtgctggtagaccagatcggtattgaagaagagaaaggtactccccgcctggaagctattatcgaagctacaaagtcgagaattgtgccggtagcgatggcttcggggacgacgatactcggtatgctgcctttgctgttcgatgcgatgttcggcggaatggccgcttgtatcatgggaggattattggtggccagtctgttgactatttttgttttacctgttacctatagtttgttgttccgggtgaaagtgacagatacccctgaggtaagaatgaatgaggaataataaaaagaaaggataaaaataaacggaatgaaaaaaatatatttaatcgtcggagcaatactttggggtggaatagttgacgcccagacgttgtcggtggaacaataccggcaaaaggtgttggaatataatcaggatatccaaaagtcccaacaggctgtaaacggggctttatattccctgaaaggaattaaaacgggcttttttccgaaattggatattaccggaaactattcctatcagttggagaaggtggagttcttgcccggaaccgacctgaaacacgataattatggagtagaagccggattggtacagaatgtctattccgggagcgctgtccggaaacaatatgatgtagctaaattgcaacatgctattgctcagttgtcggtagaacatacagtggataacatgatttatgccgccgatgtcagctattggtcggtggccgcaaaccgcaatctgtatgagctttcagaacaattcgttcagattgtaagggaattgtatgagattgtaaataaacggtttgaagaaggagctatcagtaaaacagatgtattgatggtgcagaatcgtttgaaagaagctgaactacaattgaatacgaattcgacgaattataagacagcactgcaatctttgaatattatgatgggagtggagccggatgctgctgtagttttgaccgattctattcaaaaagtgctttgggttcctaagcaggaagggttgaataaggccctggaaagaagagccgactatcaatctgccattatggggatagagatggcgaaattgcagaccgatatggcccgttcgaagtatttgccccaattggctgtcggtataaaagaaaaatacggaacgactttgttgaatgtggacggaaaggctcaatgggcgactacggcttatgcacaaatcaatataccggtattccattggggagaaatgcggcagaatgtgagattgagccggacccaggaatggaccaaagaactggaaagaagccagctcaaggaccaggtaagtaaagagctgaataatgcctgggtgaatgtgatcgaaatatccaaaaagctggagatcgtatattcttctctcgatatagcaaaggacaacctgacgttgaatacgtttagttataatgaagggaaactgccgattatcgatgtgttgtcggcccaggtgagctggttacaggcgtacaccaatgtggtttctgtcaactatcaatataaagtagccttggccgagtatgccaaagctttggggggaacggaccgttgagtctgtcaggaataacggcgcggataccggaagacgatagccgatagggcacatatcccgatcagcatcggatagtacaggtattgaatgatggaaagcggggagatggaggccagacctgcagcgatcagcatttgagctccatagggtatgattccctggataaaacaagaaaatgtatctaatatgctggcagatttacggcagtcgatgccgaatctgtcagctatatttttagctataggaccgatggtgatgacagcgatcgtgttgttggccgtacaaagattggccagacagactaaaccggcgatactcagctctccggcacgtttggaattgacatgtcgggtgagtttgacgatgatgtaatcgatccctccgttgtatcggatcatttcgagcatacctccggccaataaagtgataatgatcaattcccccatgcctgtgatacctgctcccatagcaccgaaccagccgaacaaatcgaaaccggaagagagtataccgataagcccggaagttaatatccccagaaataatacgagcatgacatttatgccggctaaagcagttgcgagaacgatgagataagggataaccttgatccattcgacggcttcgatctgcgtgggggtatggatgtgcatgccggcaaagacataataaaagagcaataggatggctgccggcatgacaattaaactattgaccttgaatttatctctcatttcacacccttgagttttggtggctgcaatggtagtgtcagagataaacgaaagattatctccgaagaaggcccctccgacgacaatagctaccatataggctagttctacaccggttttatcggcgattcctacagcaacaggagtgagggctacgatcgttccgacggaggtcccgaccgataaagaaataaaacaagcggcgataaagataccggccaaaagcaggttgtccggaagaatgtgtaaagtcagattgaccgtggcgtctatggctcccatcgctttggccgattgggcgaaggctcccgccagaataaatatccagatcatcaaaaggatatttttatccgaagcacctccggagaaatgagcgatcctttcactcagaccgagatgacgggtcatggcgatagctgcgatggaagagatcacgaaagcgacagtgatcggtactttataaaaatcatcggcgataagagaagtgaccaggtagactcccagaaatataaataaaggacttaaagccagtaaagaaggttgctgcgtgtattgcttcatgtatttttatattttcagcgtgcaaagttaacggattaattgaaaaatcaattcgaaatatcgttatcggaatgtgcctgaccacttttgtgagaatccgtgtttttagcagcaatataaaatcccttgccaggggtccattccacgcagaagagcgaatcgatatcttcgtatcccagtttttttaattgagccagtagccaggtttccttttttccggcattatccagtgaactttgcaggatcgatccattattgacaaaaagataagattcggaaatatttcgtttcagtgaaacggtgagcttgccgtttgtctcgaagcgggcatcgtctacatcgaacatcgagaatatacccacttcccgcaacatggtccggaattgttccatttccagaccgttacgtttgaattctttgagattgatttgtccgttcctgacgatcataaccgtatctcctttgactaaacgcctgatcagactgaaacgcagcaagtagcggatagtcatattgacgattgtccaggttccgagcgcaaagatcatataccataccgacaagtccggattataaatcacgcctccgatcagagctcctaaaacaaatgcattgaccgagtcgaggggagtgagctgggccatttgtgtcttgcctgagatgcggagaaaaaagatcactccggacataccgatgatgattttgataataatgctgaggatcataatataccttaatttcattctgaattaggagaattacgcttttgcaaaagctttgttacaaattcccgaatttttagccgatacagaaagcaaccaaaaatagatttattccgttagtaggttaataaatgaggttgattaattaaaatttattggaatgaagaaaaatatttcaacttggcagttggccttgatgacggcagctgcagtgattagtttgagaggattgccgatgatggctcaggaggagctgacgatgtttttttacattttctttgctactttcctgttcctgataccggcggctttggtcgctgccgaattaggtagcgcttttgccgaccggggtggtggagtatatacttgggtgaaagaagcctttaaccggaaaatgggatttacggcgatttttttacaatggattcagaatgtggtctggtatccgacagtacttggatttgcagccgcctctatcgcatatatgatcggaaaacccgacttgtcgcagaatggctggtttgtaggggtgttttctattgctatgtattggctggctacctggttgacctttaagggcacctcgattatttcccggattaccagtcagggatttttattaggaaccgtattgcccggagtggtcattatcgttatggcgattatttggattgcaggaggtaatccgattgctttcgaacatgtcccggatacggttactcaagtggtcaacgtaaatgccgggcatgtacatccgcgttttttccctcatatgacggggatcagtgatatcgcttttttggcgggtattttactgttgtttgccggagtcgaggtacatgccgtacatgtccgggaaatgaaagaacctcaaaaacaatttcctgctgccatgtttttagctgccttgatttcttttgccttgttcactttaggttctctggcagtagcgatagttactccttatgatcagatcaacttacaagccggattgttcgtcagttttcagcaattgttcggtcattatcatatcgggtggttgactaatgtgatgggattgttagcggctttcggagctttggccggggttatgtcatggatttccggccctagccgtggattattatggacggctaacgatggacaattgcctgatttcctgaaaaaaaccaatcggaatggggtacagactcatatcctttttattcagggagctattgtatcggttttatcttccctgtatatcattatggatgatgtcagtgtggctttctttttgttgagtgctttgacgatcggactttacctcgttatgtatatgatgatgtatgcttcaggaataaaattgcggtatactcaacctgatctgaaaagaagttataaagtgcccggaggtaagatgggcatgtggctgattgcgggagtcggttttctggctgtcgccttttcatttatcgttaccttttttccaccttcgcagttgccggtcggtagtcctgccttttatacggggttagtaattgtcggtacggtagtatttgtgggcattccgatccttatcagcacggttatggccaggagaaatcggaaaggacagtaaaatttacggttttaccaaccgagcaatttgaggataagtaatgtgtattcctttccgagtatttcccgtaaccgtctgtatgcactttttttcattgatttgacggtgttgacagagatatgcagaagatctgcgatttcagtattattgttgccctccaaaccgagctggataatttcccgggtttgcgggggcaattggctgatggcgaaactgagtaaacggagtgtttcctgataagtaatttcgtgaagacaattttgctcttcttcctcttcccgttgtgaaatatatttttgtgcgatctgggaatgtcgcaaatgattaagacaaaggttgtgtgcagtcgtataagcgaaagatttggctttttcgatggcgtaaaaattttctctcttctcgtataaacggacaaaaacattctgagctatatcctgagctacaggctcttctcttacatattttaaggagaagagatagacaggttcatagtaagtattgaaaaataattcaaatcttttattgtttagaagcattttatttgccggtcgtttatactgatattcggaaacaaaagtaatttttttttttcagatgcgcacacccacttgttgattttaagtgtttcagtataaaatacacatagaaatgagagggtttgaaaataggtatgaacttgcacatttgattagttgccggcttatgggaactattactccggaagaagaggaacggtttcagaagtggtggaaagaatcggaatcccatgaaaaagaatatgagatgatatgtaagcgtctgattattgatttacgaagaacggagcatccggatttgcataaagcctggaagggagtgtggagcaaacttccccgtacgaggcggctattctggtcctggcattcgggggctgctgtttgtgccggagtgattctgctcttgggattggggtggatatttctaccggctgatgatttgaatatatctcggtcggggaatgaccggtgtgcggggactgtgttgattctcggtaatggagaattaattgatttgggaaagagacaggaaagggtggtcgatgctggaaagggaacgaaaatcaggataggggagaatgtggtgagttaccagacaggagaacaagaagaagctccgatacaggaaatgaatacggtacgggtcccccggggaagtgaataccggctgatactgtcggatggaacgaaagtatggctgaatgctgagtcgcagctgatttatccggtccgtttcacaggagaaaaccgggaagtaatcatgaaaggggaggcatgttttgaagtggcgaaaaaagaaaaacagccgtttgtcgtgaaagtggatgaaatagaagtgttagtgacggggactttattcaatgtggaggcttatcccgaaactaaagaggtaaagatgactttggtcgaagggcgggtcgaggtgaagacagaagagcaccggcaactgttgagcccggatgaacaggctcttgtagataagcaggaaggacaaatccgggtgagaaaagtggttgctgaagagtatatcggctggaccaggggagaattccgttttacgcggacaaggctggaagaagtgatgacgaggttggcacgctggtatgatgtagaggtattttttgcagttccggacttgaagaatgcccgttttacgctgaatttggaacgttatgacaatataaataaaatattgtcgaagattgaaaaaacgggacgcgtgcatttccgtattcagggacagtgtattattgtggaataataaaaacagcggagtatagtggcatataccccgcctttagttataaaacccttgctctaccgacatagagcaaaaaattgttataaactctaactacaaaagtatggaaaaaaaatcaagaacaggtgattccgtgttccttaaattaccacggatgtttttaatcatgaaaacggtatttatctcattggtgtgtacattgaatgtacaggctaatgtgttttcccaacacacgaagttcgatatcgcgatgaaaaatgttacggtatcggaggttttgtgttatttagaagaaatcagcaaataccgttttgtgtatgacagcgatgcaattgatcgcatgcaacgggtggatgtagagatgaagggaacgaagttggaaacagtgttggaaagtatattcgtgaaaagtggtttttcatttgtcatagaggatggggtggtgatcatccgcgaggctggaaagaaacagataacggctggaatactcccgcaatcccggaaaattaccggtcgggtaagggatcatggaggccatcctttacctggagtgaccgtggttttaaaaggtacctctgtcggagtagtgacggatgtggacggtcactttaaaatggatctgccggccgatcatgaaactgtgctggtgttttcatttgtcgggatgaaaactcaggaagtgtactataaaggggaaaaagaattgaatgtagtgatggaagaagatgtgaagcaaatggacgaggtagttgtgaccggaatcttctctaaatcgaaagaaagctatactggtgctgtgtcggtgattacggaaaaggaattgaaaagtttcggtaaccgaaacatactgaccactttgcgcaatatcgatccttctttcaatatcctggaaagcaacgaatggggttctaacccgaaccgtttaccggaagtacagatccgcggagcggccaatatgccggatatcgaccagttgcaaagcgatacaaaagcagaattgaacacgcctttgattatcatggacggttttgaaataactttagaacgcatgatggatttggatgatagcgaggtggagacgatcactttgctgaaagacgcttcggcaactgctatttacggttctcgtggcgcaaacggtgtgattgtgatcacgacaaaagaacccgaacctggaaaactgcggtttgcctatacgggaagcctgaatctcgaagtgccggatttgagcgattatgatgtattgaatgccagggaaaagctggatctggaacttcgatctggctattatgacggtgtcagggctgaatatgaagtgcagttgaaacaaaaatataatgaaattctgcaacaggtggagagaggggtaaatacctactggctgtccaagcccttgcgtgtcggcgtggggcatcggcacaacatcaagttggaaggaggagatccgagtttccgctattcggcaacagtgcagtataacgacgtagccggagttatgaaagaatcgttccgccggacgttcaatggagggatcaacctttcttacaaaacttccgacctgattttcagaaatcagctgacgatcggtttgaataaagcacaagagtctccctatggaactttcgatcagtatgtaaaactgaatccctattggacagcaacggatgagaatggtaatgtaaaacgtttttttgatgaggattacagctactggggaggaaataatcctgccaatcctttgtataatgctacgttgaatacaaaagaaacaagcgattatactaatattaccaataatttctcgatcgaatggaaaccggtacaggaatttaccttaaggggtacattcggtatttatactcaaacgaataattcagacaaataccttccccccgaacatacagcgtttgctgattatgccgatgacgattacttcagaagaggaacttatgattatacgacgagcagatcgtcgcgttacaatttttcattgacggccaattattcgaaagtgtttgcggaaaagcatatgatttatgccggtctgaatatggatttggaagaccagaaatcacagaggtacagtttttctgtagaaggttttccgagtggggcgctcgattttctggcagtagctatgcaatataaagaaaatggaaaaccgggaggtagtgaatccaaaagtcggcgtgtcggttttgtcggtaatgccagttattctttcgaggaccggtattttgtagatgcttcatttcggacagacggttcttccctgtatggagcagacaaacggtttgctcctttctggtctgccggtatcggctggaacatccacagggaaaatttcatgagtaatgtcgattggataaaccgcttgaaaataagggcttctgtcggtgagactggctcgaacaacttcagtgcctatgaagctatggttacttatacttattctttgagcgatcgctattacaattggatgggagctaacctgaaagcactggctaatcctgatctggaatggcagaagaccatgaagtacaataccggagtcgaagtaaatttacttaacaaccgtttgaatatgatctgtgatctttatctggaacggacaaatggcctgatgtcttctttggaattacctccttccaacgggtttaccagctataaagccaacatcggaaaactggaaaataaaggttttgaattgaaagtgactggctatctgttacgcgatacggaacgggaactgatctggtcggtaacaggttctttagtccggaacaaagacaaaattatcaaactctcggaagccatgaaagaagccaatgctaccctactggctaccggaggggctactcctaacaaagtatggcaggaaggagactctcaaaatgcgatttatgccgttccttcgctcggtatcgaccccagcaacggccgtgaacttttcctgaagaagagcggggaggttacttatacctgggatgcgagggaccgggtgttctgtggagtagaccaaccggactaccggggaaatattaatacgatgtttatgtggagggatctgtctgtcaatctgtctttcggttacgaatggggcggacagcaatacaattcgaccctgatcaaccgggtggaaaatgccgataaaaaatacaatgtagacagacgggtatacgaagaccgttggaaagagcctggtgaccggacatttttcaaagggatcaaagagactactgctacacaggctacgtcgagattcgtacaggatgaagctacgtttacctgccagaacctgaatatcacatatgatttgaaaggaaacaaatggctccggcataatttgggtatccagaccctcacattgaaaggagatattgcagacttgttccggatttcgacgatcaaacaggaaaggggaacctcttatcctttctcccgtcagttctcttttacgttaagcgtaatgttctaaccgataaaaataaacagagatgaaaattaaattatatatattggcctgttggctactcagtggcctcgtttcatgtaatgactggctggatgtaaagccggaaacggaaatgacgctggaagaaatgtatgctgatcagcaaggatttcaggatgccctcaccggcgcttatttgaatatgaagagcaccggtgcttatggacagcaactgatgtatggtacagtagaatacctggctcaacattgggattgttcagcgaatagtacccaggagaagatttcgcagttcaactatgttgacaatagtgttcaaagcagtttcgaaacgatttacacccagctttacaaaatcatagcatcggccaatatgattttagagcaaatcgatgccagacaggacgttttcgaaccgggaatgtacgagattatcaaaggtgaggctctggctatgcgggcttattgtcatttcgatctgctccgtttgttcggtcctatgccgacccggacaagtaccggtaaaattcttccttatgtcactacggtgggtatcgactaccatacccatcacacctatcaggaatttacagaactgttgaaaaacgatctgattgatgcagaaggattgctgaaacaggtagatccaattattccggcagaaaaaggtggggaggaactcaatctgtccgtttcggcagaaaattttttattagcccgccaggtccgcttcaattactacgcggtgaaagcgatggaagcccgtttttttctctggatgggaggagaaacgaataagtctgcagcctatgattgtgctaccgaattgatcgaggctgaagatagtgacggaaaactcctttttactttgggatcgacggataatttgagtaagtcagattattccttttctacggaacacattttagctatttatgaatataaccttaaagatagggctgaaagtgcttttacgactaactcttcttattcgaaggctcaaaacgtcctttctccgaatttatatccggcaggaacgacggatatccggtatttaggattgtggaccagttacacttcgggaagcggaagtgttgtcttttctattaagaaattcctgcaagatgataatcacgatgaaattaatcaattcccgttgatccgtttggctgaaatgtatttcattgctatggaatgcggacctctgagtgaagccagtcggttgtacgaagagttttgcctctccagggatattgagttggtaaatctgcaaagcgaagcccagttagaggaggttttaattaaagagtacaacaaagaattttatgccgaagggcaggcattctacgcttttaagcgtctggcagtggaaaatattctttgggcgaaatttccgggcgacgaggagagttatgtcgtgcctttgcctttgagtgaaattaattatggaaactaaataccagaaaattatgaaacaaatcatttatacggttctcttcttggtggcgatcgggctgacaggctgccagaaagcggaatatctgttattcaacgatatcgcccgtgtacaaatggatgaggctaatgaaatccttaccagcttttactatatggatgcagcgatcggacgtgatacggtttacctgacagtcaatacaatcggtgatccggaaaatcgggtacgccaaattgctttggaacagatcagcgaatatgatgttgagtataagtatgacgagaaaggcaatcttatcgactcgattttgacggaaaagcccaataaggcggtagcaggagtacattatgtaccgatggacgacccggaaatgcttcccctgttggttattcagccgaatgctgtaacggcagaaatccctgtcattttgttgcgggatgccagtttgaaagaagacgattatcgcctgtgccttcggttgaaagccactgatgacttccggttgggtgagaccggtaaattatccggcactattgttctctctgacaaactcagcaaacccaatttctggaatagtagtgtagatcgttattatttcggagtttacagtacccggaaacatgagtttatgattgaggtgatgcagacggaaatcagcgatgcctggtggaacaaattaagtgcagattatgcagaaatcaattatacaaaagataaactgagagatgcgttgcaggcttataatgatgatccggacaacaaagtacagggactggctccgatgcgggaaaatcagaacgatccgaacagtgcccttataacattccccagttgaatttttaatacgctaaacgatgaaacagttatatattatcagttttttactattcctcatcggcttttacggctgttatgatgatgagggcaactatgattataccgaggttttcgaaattcgaatcgatagcatgaaagcaagttacacgctctacaccttggtcgatactttgcgcatttcaccggaagtcagtccggccgatgctgaatatgattttcattggggtgtgtaccaaaccaatgtacagggatatgctccgacattggataccatcgctactacccgggacttggtctatccgatgacactggaccctggttcatataagattgtctgtatggcgacggaacggaatacaggtattactgagattaaagaagtgccgctgactgtcacaacagctctgtctgaaggctggtatgtcctccgtacaaaagacgactgtacagacctggatttgttttctacggaaaaaggtaaaatagaaaatatcattgccacaaacaatgaagggagaaatctgaagggagaagcacgcgccattgaattttcatacaattacaaggcatgggatgagatcaatgaacgttatgtaaataccaacagtattttcgcattggccaaggaagaagctgtggttatcagaacgtcgaacggggaaatcattcgcgacatcgatgatctgttttatgaacgtccggctgtcgcaaattttcagaacatctgttctcaaagcactgaactttatctgatgaatgacggtaaagcacattacatttacaacatgtcttccaatagcggccggtttggggttgctctgcctggtaattatcaattgtatccaaattggacatacggtttccgccaaccgctttgctttgataaaacgtcggattcgtttgtcgcgataaatgctatgagtagcagtgttgtaaactttaaagagaaaggtgcggttgattcgctcacctatcccagagtcagtaacctggatgccgatctgctgtatattggtcccggtcccagtaattccggttgggctttgctgaaaaaaagacagaccgatacctgcctgatgtataatctggaagtcaataatgcttattccccatataataatccggcaaaaaaatgtgataccctgattgacaataattctttaaagttattacaagcggatttccgggccagcagccaaaataataatattatctatttctcgcaggggcatacggtttattcctgtaatatcgatgccggttatcaggaaaagagccaggttattctctccgatagtgagaatatcacctatatgcggcaccttaaatattccacggtgattaataaactggcggtcgccacttttgacggtagccggtataaggtttacctgtacaatattcaagcgggtaatttacaggctgatcccgaaatactggaaggggaaggaaaagtaggtgctctgatttatatcaaaggaacaggtaaaacaacactttattaatttataaccatgaaaaattatttgtttatattgatcctgtgcttatccctgcctggccatgcacaggaatattcggccattaaaggatttgtaaaaggagcaaaactaaaggaagtcaccctatataaaacggtagatggtagcatacaggcgtgtgcgacctctcgaatcggagcggacggcagtttcgggtttctgctgaaacccgaaaccggtttttactccatcggaggggaacgactgaattttcctgtttatctgaaggggggtgaacaggtcaatatcgatttgttagaaacccgggcacagttgaacggaaaaaattcaaaggaaaataaaaccctgtacagctgggtggattatgctgctaatattcgcctgaaagccgtattttttgaattgacacggagcaattacgaggatttctttccggaattcgaaacttatgtgaaagggttggagcaactgaaaagtaaattgagaagcgggaataaggctttcgacgtgatattgtcggactatgtggattatgctaccgattattatgcgattattttcctgcatactccccgggagaagcatccggaaaaatcgatgcggccggaatattacagtcatattgtctctgcacgaaaatatacggacgacaaggtgctgcagttcccggaagggatcaaaatgctcatcagttatacctcgttcgcttataatgaagacggcaaaaagtatgacgtggaatcttatacggatgattgcctttcttatttgggaaacgaccgtttgaaaggagaatatgtcgttaataatagtttccgtagttttaaatcctatgaccagtatttgaacgcaatggagaagttcggtaaatatttggtgactccttctttgaaaatgcgggcagaagctgtcggaaccaaactgtatgatacgaaagccggcggacaggctgccgattttacctatccggatgtggacgggaaaatggtgtctttgtccgattttaaagggaaggttgtgttggtagatgtctgggccacttggtgcggaccttgccgtcagcagattccttacctgaaaaagttagaggaggaaatgcacgggacagatgttgtgtttgggggagtgtctgttgatgaatccaaggataaacagaaatggctggacttcattaaaacggagggactgaaaggggtgcagttattggccggcggttggagcaagattaccaaagattataagattacgggaatcccgcggtttatggtttttgataaaaaaggaaatatcgtgtcggtggatgctccccgtccttcttcaccggaattgaagaagatgctggaaaatgaattgaaaaaatagcgattgaaacagataacgtaaaaagtactttattgttgatggtattcctggcggcctgtaccggtgtatgggccgacacagggaccatcctgataaaggagggaagcggtcgtatataacaggctgcggggacgcggacgaacttgttttcatgggccaaccgattgtcaggcggaatgaaacggtgcttaggaattgctcaggctgttgtggggaaactgatggatgtccgggcgtgataatttgcaaattttgtatcacttttaccctcttttacagatactatttaagtgaatttacactatatttgctccggaatggatttgatcgctgctgtaaataagaaagattacaaattattcggggcatttttcagagaaaatttcccctttcttgtcatgtttgcagataagtatgtccatgatatggatatggctgcggatattgctcaggaggcttttatccaattatggcgctttgaaggggaattcgtatcgccagagaaggtaaaggggtttttgtatacgacggcccggaatctggcactgaatcacattaaacacaatcagattgtagacgaacatttaagactacaggagaaagattctgtactcttttttcggaaccagattattgaagaagaaacttatcagcttgtccataaagcagttgaacagctgcccaagcaatcttgtaaaataatacaattaagcctgcaagggtattcgaatcaggagattgcagatcaattgaatatatccatcaattctgtccgtaccctgaaacaaagtgcttataaaaagttaagaggcattctgaaagagcatttctatttgttacctctaatgttaaaaatgaattttttttaacctccattcgtcttttttttcttttcagttgttattagacttgaaaaatgttcgattaaattagttgaaagtttataaagttcgtaaagtttaaaaagctattgacccctgagggcacttagttaattgacaattatcgcatgataattgaccacatatttcccaacctgtggtttcttctttatttatttgataatcaatgattctcttcttcattctctttttcatttcttttcttattattttctaatggaagcaaagcttccagacaattgtcaattatcatctggcaattattctttttgcggattcccgcaaaaagaatcgaac

SEQ ID NO: 6013 - DNA, 29385 bp, Unknown
  gut microbiota DNA sequence
agcttcggtttaaatcctgctgaagaagaagaattggaatgttggctgaaagaatcggaagaaaacaggcttttgcattcccggcttactgatcctcattaccttatccggcaggaagagaagaggaattcggttgatgtggaaaaacattggcgaatagttcgtaatcgtttgactgagagtaaaagcaataagggcttatccggtcggtattggaaatatgcagcaattatcatgttgttattgggaggaggagtgttgggatggtttatgcagcgggaagaaaatgttcctgttgatgtgacgcaacaaattcatcccggtatttcaaaggcccgtctggtattggccgatgggaaaactgtcgagttggagaaaagaaatggagatacccaattgatcgattgtgacggtatgcttatcagtaacgattcttgcggtttgaaatacaacggccaaatagaaatgccggtagcaaactggcataccctggaagtttctaaagggggagaatatataatgactttgcaggacggaacggttgtttggttgaattcagaaacgaaaatgaggtatccggtacagttttccggacagaaccgggaagtttggctggagggagaagcttattttaaggtagcgaaaaatgagaaacagccttttgtagtaaagactgaaaatatggatgtgagggtattgggtaccgagtttaatttaaaggcttatgccgatgaaaaatgggtacaggctactttggtacggggagaagtggctgtatttacggggatggataagtctgtccggaatacgttgaagcctgaacaacaggctgagtgggatatcgaaaaaggaaaactggacgtgaaaacagtagagctcgatctttatattgcgtggaaaaacggacagtttgtgtttcgtggacaacgtctgacagagatcatgactgttttagaaagatggtatgatttcgaggtttgttatcaggcggattggatcaaagaagttgaatttgcgggtaaattgaatcgtagtgcttctatcgaaccgatattggatgtcattcgctcgactcataaaataaatgtaaatacaagaggtaaaacaattatatttagtgcaaaacaataatttttaaaccaaacaaacgatgaacaaaatgcaaacaatccacccttggttggtgtggagaagaaaaattctgatgacaatgaaattaggtgtgtgctttttgttgtgtacagtgtttcaggtgtcggcccgtgtcactgcacaaaatgaaagaatgaatttcaagatgcatgatgcctccctgaaaactattttatgggcacttgaaaagaaaagcgaaatgttttttttctatagtgttaaggatatcgaacaggtgaccggaatcgatgtcgtggcagagaataaaactttggacgaaattctgagtgaggtgttgaaaaataccggtatcacttatgaggttacccataatacggtcgtgttgcgtaaagggaaggtgaatgctgctttgcctcagagtaaaacatcggaagtgacaggtaaagtgactgaccgttcgggtagtccgcttcccggagtaactattttaatcaagggtacctccctgggaacagtaacagataccgaagggatttttaagatcgctttgccgcaaaagaaagatgtggtgctggtattttcatttatcggaatgaaaacacaggaaattgtgctgaaagatgacaaacctttaaaagtggtgatgcaggaagatgcaaaagaaatagatgaagtggtcgttaccggtatttttaaccgtaaaaaagacagttttaccggagcttctgccactttcgacggggaacagctgagatcggtgggtacccaaaacgttatcgccagtttaaaaacactggatccttcatttaatgtacttgagaataatgagttcggttccgacccgaataaattaccggatattgaaatccggggaaaatcaagtctgatcagtacccgggatgaattgagcgaggacccgaatcagcccttgtttattctggatggtttcgagtcttcgctggaagctatttataatttggatatgagccgggtagcttcgattactattttgaaagatgctgcttcaacggccatttacggttcgaaggcttcaaatggagtggtggtagtggaaaccatccgtcccaaatcgggtaagttaaatctggcttacagcggaaatgccaatgtttcatgggctgatctgagcagttataatttgatggatgccagtgaaaaattgcgttttgaaaatttggtcggcaggtatgatgcatcgaatgatgttgtgaaagatgttgaattgaaaaagtcttattatgataaattggccgatattgcccgcggagtaaatacttattggctgtcggaacctctgcgggttggcctgaatcaccggcattccctctatgtagacggcggtgaaggtgcatttatgttcggtatcggactggcatataacgggattaccggtgtaatgaaagaatccaaacgggataatatcagcggaaatatcgacctgacttaccggctgaagaaatttcagtttatgaataagtttgatatgaacaatacggacagcaaggatccgattgtcgctttttcccaatatgccgacgctaatccttattatacgaaatacaatgagaacggcgaagtggaaaggtggctggaatatacggattatattaaagctgccaatccgctttacaatgctaagcagaacagttataacaagggaaacaatttgtcgtggtcggataagtttattgtagaatatactcctgtcccgaccttgaaattacgggctcggttcggttttacacaccagagtactcaggcggaagctttttattctcctctggatacccgttttgccgaaacggatttctcagaacgcggttcgtatggcaatacggaaacacagagcaataagtatgaaggagaatttacgcttacttatgccaaagtattgaaagaagtacaccaattcaatatcgtattgggaggttacctttctgctttagaggcgaaatcgcaaggatattcggctatcggttttccggtaggagatttcacacttccttcttttgccaacagttatccggacggaggttccccggcttataacgaaagtacgacacgttcggtgagcgggtatgtgattggaaattatgcttatgataaccgttatttgctcgatttcagttatcgtgtcaacggttcgtcggtattcgggactaataagcattatatcggtacgtgggctgtcggtctgggatggaatttgcaccatgaaaaatttattgccgaccattttgacggaatttccatgttgaagctgagagcttccatcggtaatccggggaatcagaatttttcttcttcggcaaccattacgacgttccgttataatttcaattcctttaattatttcggaatgaccacttcgctggctcagctgggaaatcctgatctggaatggcagacaaccctcgataaaaatatcgggttcgatattacgattctgaataaccgtctgaccctgaccggagactattattataagacaaccgatcctttgctgatcgctatctctatgccgccttcttcgggagcgaccgacaatatgacttataaaaatttcggcaaacaaacctccaaaggttttacggcatcggctacgtattacattattcgccggatgagcgagcggatctggtggtcggttcggggtaatctgcggcatggttccaatgagctgtccggcatcggcaatcgtctggaaatgtataattcgcaggaacgtgaaggtgataacaggtcgacaaaacggtactatgacggcgcagaccccgatgatatctgggctgtacgttcggcaggaatcgatccctccaccggacgggaactgtttattaagaaaaacggggaattgacttatgatttttcatatgacgatgaagtggtggtggccaacagtcgtccgaaggtggaaggggtactgggtaccaatttttcctggaaaggtttttcctgtaacctggatttccgctatcgggtgggcggtcattcgtttaattccgttttatttaataaagtagagaacatcagtacgaattcgctgatatataatcaggataagcgtgctctttatgaccgttggcaaaagccgggcgataaggctcagttcaagaatatcgccaattcgacatccactccgatgtcttcccgttttgtacagaaagacaattcattgagtctggaggctttgaggataggatatgaattttctcctgagttggttcataaatgggggcttggctcgttacgtttgaatgcctatatgaacgatatattccgcctgtcgaccatcaagatggaacggggtacttcctatcctttcgcacgcagtgtgtctttcgccatttcattaactttataaatccgatatcatgaaaaaatatagaatcgtttttccgcttctgttaagctgtattttatggtacagctgcaccgactggctggattataaaccgagtgataaacagagtgaggaacagcaattttcttccaaagatggattttatgctgctgttaacggggtttacaaccgaatgtccgggaactcgctttacgggaaatatctgagttatgacatgatcgatattctggggcaatattacgctgtggagcagtcggatgaaagcgattattataaatacttgcgggctctgaccgagtgggattattcgaacgagtcggttacaggcgtactgagcagtatatggaacgaagcctattcgacgattatgaataccaatgtggtattgaagaacatcgaggatgatgctgtaaaggacaaggtattaccggagcgggaatataaaatgctcaagggcgagatgctggctgtccgtgcaatgctgcatttggatatgttgcgtttgttcgggccgattatggcgaaaaatccggatggacgcggtatcccttacaatgaaagcaccgatccgcaaatcctgtccattatgccggccggtacggtactgaaggactatattatccgcgatcttacagaagccgaagctttactgctggcctccgatccggtacttaccgagggaccccgtgcagaatacgatgaggtgagtcaggataactccatgcgctaccggcaattgcgtctgaattactatgcgacggtcttgttgacggcccgggcttatctgtgggggggagattacggcaatgccttgaccgaagcccgcaagctgaccgacgatccccaggtcagggagttcttcccggtggttgaatcgggtaagttgttagggaacagttccgaccccgaccggatgttttcgaccgagtgtttattcgggtattacaataaaaacagaggattgatttatgactattcttttggaggaggtaataccggaaaagctttgctgataccccgtaccggatatgtagatggtattttgttttacaaatacgggggatattgggtcggagactggcgtttccagtcgcaatgggccagcggaaccactttggaaggaaatgcgagctaccaaatggtaaaattcaaagaaattgcggatcaaaaacgggatgaggtgaccaataataaagatgaaaaccagttattgcaggctcagaaattttacggaaccttttgttcgctgatcaagcttagcgaagcgtattatattgcagcggaatgtctcggtacgaccggttccgaggtgtacgatctgccgactgcatggacctatttgaaccggatgttcgttgaccggggtaccaataactggggaacaggaaacggagagagctttttacaggattggctgaccttggagtatatccgtgaatttgtcggagaaggtcagaagttcttctatttcaagcgtcggaatatgggattcgataatgattacaacggacgaaaagaagtaaaggtgatgactaatcccggcataccaatgtttggaatacctccgacatacgattataaagataaagcaactgatgaagaaaaggaagaacgctttgtacttccgttgccgaaaagtgaattggataaccgttaaatacagacatatgaatagaataaacaaatggatatgggttgccgccatggcaggaataagtatcgcctgccaaaaagaaaacgtcggtttgtacaaccgtggtgacagtatggtatattttcaggtacagaatttttcaggaagtaacggcgccgaaggatataccacgaggactaatttttcgtttgtcgattatgcggcagcttatacctcagtagtattcaatgccaaagtgaagttgctgggcgaggtaaaagattacgaccgggccctgaaagtcgttgtcgacgaagagcaaacgacgatgacttcttatgatgctgtaacgaatcccgatggaggatatatgatggatttcgatacgctgaaaatcaaggccggaagcaacgagggaactgttggagtccgtttcatgcggaatgcttccatcaaaaaacaggtggatacattggtcttgaaattagaggccaatcaatattttgaggtactcaatgcttataaatccagcaatgtgtggagtaatacaacggcagatacgatagacggaacccgctatacatttctgatcagtgaaatttatacgcagccgagtcggtgggggtatgttgctgccgatcagtatttcggaaagtggaatccggtccgatatgcctatatcaatggcttctttggctttacgacaacggattggacttgggccactggcaaagtcagcaaaggacggatgcctttttacgcccgggaattgcagtcggaattgcaacggagagcagatgaaggcgatccggtatacgatgaagacggctcttatatgcaattgccggatgcttatcgtgtggattactcgaatgtcgtgttaaaaccttaaaatatagaaaaaatgaatatattaaaaatttcgcgtctgagcatgttgtggttttgcctgttggcaatagcctgtgcggaagacaaaggaaattatacgtatgaagataaagcggtcattacgatagatagcatttcatcaatgctgtcggtattggccaatgcggaatatatcgatttaaaaccggtggttacttccaatttggaaggaattattgatgagcggaatacgaacttcgaatttgcttaccaaaggaaaaattcggaaggtgaatgggaagaagttgccaatacgaaagaccttcatatgttagctgcattggagtccggcaggcatgcatttttgttctcggtaaccgataaacggacggaagtaaagaccctgaaattgttttatgtcaatgcaacgaccattacctcggagggatggatgttgctttgcgatgaaggatcggaagaacgggtgcgtttagatatgctggcgcagatttctgtggaccggattgttccggcttatgatgtaatccggcgaaaggatggagtaccggaacagtaccacgctgcgaatataggattctatgccactggaagtgctaccggtaaccggattattgcaatgtccgaagatgcggcttactggctggagacaacagattctaaaggtggcggagaatttcttgatgtagagagttatcacgaattgaaatcggcaatgtttctggctgctactgacgatcatattgtaaattttgtgtcagtgccttataaaggactctataaaccagagcacgatgctgttatctgcgtatcccgggaaggaaatgtctatgcctggaatacggtggaagtagaaacgggattcgagtatccgattaatacttccgtccggggaggaacgcctgaatacaaggtggcgccttatgtcgggactacgctgaaaagaccgttgtcatccgactttggtatcgccttgttgtttgatacggataatcatcgttttgtttactggagtggtgaaggtgttacaggtagcgatgtcgctggaaaaaagcaggtgttgcatccgttggaagatccggagaataaaaattttagttacaatacgggaaatatggatttggtgtgtatgcttaacacctctttttccgaaggaatggtgtattgcattatgcaggaagatggcaagcggcatatttatgaggtgaatttgggaagcggggaatttaaacaaggggcctgccatttggatgttatggcggaaaattttgccaatgccacttgttttgctgccagttcccagtattatgtgatttattacgcttatggaaataaagtctatgcttacaatgtgggatcaggggtttccgaaccggtgattactttagaaggcgaagagattacctgtttgaagttcaaccgctatgattatccgcggggcatcgatgacttgtgttcgaaatatgacgatgaaatcaaaaatatataccgagaccgtgaaaatcaactgatcgtctgttcttacaaaaatgccgctacggataataatggaggaatgctgcgtttctatgatgtgagcggatcgggtatgaagttgaccctgaaaccgggctgggagtattccgggttcgctaaaattaaagatgtgcgttataaagaggtccgttgagaaacaggaaaaacagtgtgtggttttatttttctctcatcaccgcatatttacggtgatgagagatttgggggagggcaacagaaaaaggaggctatctggcttttgggtcatcagacaggctcttgaaagtcagatacggttgatctgaaggtaagtggccaacaatgaaatgaaaaaagcagcaatttcaaattgctgcttttgtgattcaggcgggattcgaacccacgacctacggcttagaaggccgttgctctatccagctgagctactgaaccaacacttttacggtttggcggtgcaaatatacgctttaatatttttattccaaaagaaataatgtttttttattcgaaacttcggatgctttgttgtttataagccgaattaattggtttataaagtccgtcgattttatggactttgagcgacgaaggagcaactttaagaactaattataagtctgaacacgtttcagtgacttttctgcacactttcatggaaagatttatttgccggaaaaagaatgaaattaaatcagaacatcttttgatttgttttttttaatcttacctttgttgaaaaggagtgagtgaagttatgtaaaacacagaatacgtgaatgtttcatgcctcttgtttgtaacttataattaaatttaacttgactgaaagttttattttatgtttgttagctcttagtattcatgtatatagttaaattatgagtaacgatcgtgtttactgttgtaataaagaggcaacctgtaataattatgaacggagtgagttggtcttttttgaacaggtgaaatttgagaaaggttttgtatgggaaaaatggaaaacttcgggcatttgctggatatttttattaagtggtgaagctggtgtgtctattgaagacgaggtagtattcgttgaagccggagagatgtttttgttgcctgctttgaaaggtaaattgaaagcttttactccacttgaatttttgtactttatttctgaccgtcccactgaatattgcttgaaaacagtttcggagcttggatgtttggaggggagaggggaattattggaaatcttacctttaaaccagctgctgaaaggatttgtggaaatgttgaccgtgtacctggaagatggggtggattgcaggtatttgttcgaagaaaaacaggaagaactatttgttttgatgaagtcttgttactctaaagaacaattgtcttattttttttataccctttctttgcacaaagagggagatttgaaaaaattgatcgaagataattgtttacatgtgaagtctgtggcagaattggctcagatctgtggttattcggtcagtagtttcaaacgggcattcaaagaaatcttcgatgaaccgatataccaatggatattgggcaaaaaggccgatcggcttaaagaacgtttgagtggagaggaggtaaacctcaaagagattatttatgaatttggtttttcttcaccggctcactttacaaaattctgtaaaaaatggttgggaatgaccccgacaaaatttatagaagaacaaaaaatgacgggagaacacattgatctataagttgaaaatgggaagtgatactgtttgttatatcaaatctgatttaaagaataaattctcttattttaagtttgaaaaagatactgtttttcaaagaaataaggcagataaaaataataatctggtttttattcttcatggagaaatggaagtgatctatggagatttgtatcccaggcttatttccggtggaaacatgatcttgctgactcccctttcccgatgtgtatgtaaagccgtatcgacggtcgaactcattattttggggttcggcactttgaatcatagttgtgataaatatatctttcaaaatctgactccttttttctctttgataaaatatgaattccgggaattggagattcgtgaatcactcgaccgttttctgcaattaatgcagaattatgaacaaaatcaggttcctatggctgatttggcttcaagaaaaattcaggaattgtttattattttgcatgcttactatacttcggatgaattggctatgcttttttatcctctattggggaaaaatatggagttcaaaaaactggtcgtcgactattatctacatgtaaagagtgccggtgaatttgcagaactatgtggatatagccagggagtgtttcaaaagaaatttaaagatgttttcggcgagacggtttatcagtggatgcagcgacagaaagccgaatatattaaacaccgtctgatgaccagtgaggtaaacctaaaggaattggctgacgaacttaactttgcctcatccgtacatttgaataagttttgtaaaatttggttcggaatgactccttctgaagtgagacaaacctttattctgaaaaaaaatctgcgttgaaattgaatgtgtaaaagataatattttttatataagttagaaatgggactgatctcttatatttgtaacatcggaaagggagaacagaggataagattactggtttgatatctttcctttagaatccgcaaggagcgtcgcaataggagataattcatacactcatacatcccttatttgtacatacacaacaacatgattgtcgaacagtaatcttccttttgttcttttcttttttatacttcttcgaataaagatcacaaatagcggaaaatttatcttttgaattattagagaatacttgaccgataagtatttcggattgatacccgaatattgaaataatcgggagacgaataaaaataaaacctgactttacgtcaggttttcaaagttgtccaaccaagattcgaacttggacaaacaggaccagaatctgttgtgctgccattacaccattggacagtattttgacggcacaaaactacgtctttttttgtcttctcccaaataaatctgaaaaaaatagtgccgaaagactggctttctgagggtgagtcatacaaatcactatatcggtataatagaagaggcggcccggtgaaatcgatcaaatagccatccgaaataccattagtaggtagtttgcaataataatccctattaatagggattgttgcaaatggattttccgtctattttcgcacaattatttgatgtttttagtgtttatttgttaaaacttgctttagggtgctaattattaattaatttatgtgggttatgaagtgtttttatattggggtctattttatggttggcaatattcttttctctaacgggcagacaatttccgggattgtgaaagattcttctgatgatacgcctgtcgcgggagtaaatatcgtaatgccttctctaaaaaaagggacggggacaaatgcccggggcgaattcttttttaaaaatgttcctgccggggaatacgaacttcatttttcgtttgtgggtatgaaagatgtcatcaggaaagtgaaggttgaggcaaacaaagatctgaagctggaggtttatatgcagatggatatgaaatcccttgaccaggtggtcgttgcagctaaaggggagaggaaagagatccatgacgtgaaacgccagggaaccccggttgccgttattgatgggaaacaattggcaggacgcgggactacgatcacggaggtgttgaatcatcagacaggggtaaaactacggcaaacaggtggtgtcggtaaccaaacaaaagttaatatccggggattggaaggaaaccgggttcagatctacatggacggctatgccctgaataccccggatggtagtttttccattaatgatattcctttgcaattcatcgaccgtatcgagatatacaaggggattgttccgcctgaattcgggggagatgggttaggaagtgcgattaatgtggtgacgatagatgccgaacacgggtattatgatttgtcgtatagctaccagtcttacggcgtgcataatcctacggcttgtatttctcattattttgataaagcaaatatggcttttactcttttcgcgggagggacctttgccagaaatgattacacgatcacttctccctatgtcaatgatttgaaaatcaaacgggatcatgaccgcttgaaaatgggggaattcggggcgacgcttaagtttccggatcattacttcgacaaggccgagttggaatttgtcgggtattacagttataaagaaacccagggtatacaaacgaatatccgtcatgcccggacaaaaatctggacagccggtgtaaaccccaagctggagaaaaaacattttttgttcgggaagctggatttgaaattcaatgggatggttacttatacgcatactgctttgatcgacacctcgtctttcctttatgatttttatggtggccgtgttcccaacacatatggcggagaagtgggatatgtcccgaatttgtcggatgacgggatgatggattatcgttataacctgaacttgcaatatcatttgatcccggacagaatgctggtcaatatgaataatgatttccgttacgtgagcaatgaaacccgggacaccgttgccgaccggtttctgaaaaaggattatagcggtttgaaatcgaatatatcgggaatgatcagttccgtcgctttacagaacaagtggtttcaaggacgtttgacatcggtgctgacgggacggcattattattatcgtttagggggaaaaacagtgaacctggcttatccgggagatgccgttccggcagagacgcataaatccgatcagtattgggggtatagtcttgctttgaaatacgatttatcttctcattggctgatgaaatttgccttggaacataatttccgccttccccgttacgaggaggctttgggggatcgtgtaacgacgctgacaagtacggagctgaaagccgaacaagctaataattataatctgggtatcatgttcgaccgttactataatgcaaattcccgtttacaattcgagtcgaacgggtatatcatgcaagtgaagaacatgatgtatctgacctctgttgtggggtattccaaataccagaatctgggcgaggctctgttgtacggagtggacggtgaaatcaaatgggatattgaccgtaactggtttgtatcatttaatgctacctggcagaaatctttggattattcgaaatatatagcgggaacaaacaccgagagtgagacctataaaatgcaattgcctcatatcccgattctctttttcaactggatgctggattaccggaaggataatccctttggtggtaaagggcagtatgccagggcgtattacgagggtggttacacggataaatattattatggatatgagcttagccgccatcaggattataagataccttctgcttgcctgcacacggtggggctggagtacggaatcatgaaccggaaagttttgtttggcgtggaatgccataatctgtttgatacggatgagatgactaatttcaattacccgttggcgggccggacagtcatggcgaagattcggttcacgacgttaaaatggtaatgtgcctgatcatttgaagtatataaataaaataaatcacaatgaaaaacaatttctttattctgggggcttttctgtgtacagccttgtttgtaacgtcatgtacggatgacaacaaagatgatgatgaaaatgagggtaaagcatcgattatcgtaggtattaacatgcaaccgcaggcggatatgggatatatcgttcctatacaggatatgaaggccggaacgatgtctttcgcaaatgcggttgaaaccaaaattactccttatctgatgtcttatcgtgattgggtattctacgtgcctggaacttcggagggtacgattgtaaaatactcccggcaagatgatggaactttgaaagtggaaggacgtttggaagtggcgacggctgctcctatgtgtgcttctatcgctttcgtttcggccacgaaagcttatgcatccgctccgaacgataacaagatcattatatttaacccgacgaccatggtaaaaacaggggaaattaatgttgccaggcctgaatacggacttgacggaagtagtactccgaatccgctggggttgatcctgcgggatgggaaactctatgtcggatgtggagaatttgaccagatgcctatttgtaaaagtggtgcgcatgtcctgattattgatgaggctaccgatacaccggaaaagattattcatgacacgagactttccgcggcatctatttttgattgtggtatgtttatagatgagaaaggggatctttacgtgacttgttggggatcttacggttatgttccggatcagaaattcggattattacggattaaaaagggggcgacggaatttgatccggactactgttttaacatgactgacatgaacgtggaaggagttcaagggggcaaattgcagtattctatttctaacttttatgccggaaatggagaattgtacgtcctggcttattgtccggcatttgccagtgccagtcctgattacatcaacgagaaaacgaactactgtttgaaagccgatttatatcattgtacgatgaaagcgttgaatcttcctcgcacgaatggatatagttgtgctataaataaatacggggatgacatcctttttggtttggcaacggagcaaaatggaacgggaattttcacctataatcgtaaaacagatcaatgtagttctgctccggttgtgaaaacgcagggaacccttatggacatacttgtgtttgaataataatctgtacttttcaagtacctggggctttccgcttttcatgaaccggaaagccctttttataggtgatattttggtgtaaaacaacaagaatttaggattgattcgtaaaaataaaaaacctgatgtgaaatcaggttttcgaagttgtccaaccaagattcgaacttggacaaacaggaccagaatctgttgtgctgccattacaccattggacagtgttgttttttatgacggcacaaaagtaatactttatttaaatatcacaaagaaaaaccggtatattttatgattttttgtgagcatactgagatcgtcggatagttcgtgtgatttgatatgtgactgaatatcattgattatcgaacggataaattcgcgggggtgtagttcctgattttgagtcactatctccaaaagacgttcccgggtataaaattcgttcttttcattttctgcatccgtaacgccgtcggtatatagtaatatacccgagccgctcacgaatcggtaggtgtactcctgataatcatgattttttaggatacctaaaggaagatcggattgcatttcaaagaaagctactgtccgatccggacttgtcagtaccggaggagtgtgacctgcattgcaatatttcattactccggttcggagatccagcattccgatgaagaaggtcacaaacatatcggcttcattcctttcagcaatactattatttaacgaataagcaatctgtgacggagaattgctgcctgaggaaagcgtacgtagcagactgatggtagaggccatcagaagcgaagcaggaatcccttttcccgatacatcgccgatagcaaaaaagagggtgttctcatggataaagaagtcgtataaatcaccaccgacttgacgggccggatagagtactgcataaaggcctatttcatgaccgggaaaaggaggaaaatttttgggaagcatactcatttgaatatcatgtgctatgcgtagctcactttctattttctctttagctgctatagtcgtttccaggtttttcatatattttgaaagcttttcctgcatttcactgaaagcattataaagatccagcatttcatcttgggtgtggatgaccggtagagttatgttgaaatttccctccgcaatggaatgcgtggaagctgcgaatatttttaaaggtctcgtaattttacgaacggttgtagtacagataatcaccaggagagccagaaataataccgaagaaagaatgatgatccaagtgaatcggtgtaatttgtcgaaaatatgagaataaggaaacaaggtagccatattccactctgtgccgaggatgggtgtaaaatagatgtaatattttacatgattgttgacaaatactcctttccctttttgcccctgcatcatgagatgcgccaactttgaagcattggtgtcctgaaggatttccgcttcatgaaggatatctttatccagatccgtgaaaaagtcgtttcccggatgaagtatatgccttccttcccgattgactataatgctataactgtcttcatagggtttgaccgagtcgatcagctcggtcagccaattcaaagagaggtcgaccgaaaaaataccgattacattattttggggtcccggagcggtaccgaataggtggaggtcaggatatcgttggacgaaagctcgtggtaaggacgactccagcgggagacattcctttcttttgagatccggtaccaatttttttgatagtaatcgtatttcgggtcgatttgtgtggtgacgacactatcgccactcatgtatgaataaggagcgaaataataccctttatccggaaaataatagggttcgaaagctatagcacatccgaagatctcataattgttcaaaacgacctgccgggtaatcgcataaatcgaatcggcatgagtaacataggaagggataatccagctgagattttcagggatcttttctatcgtcctcaataaacgagtcactttaagattgattttttccgccgattcgtcgattttcaggtaagcttggtgctcgatcgccctggaggaatagtgatagaacaagcaaaaaccgattccccataatagaaatgccgacgaaataaggtatatattgagtttcgctgcaaaggaatggttgatctgtttaaacatatttacctttcttttgcctgcaaatataattataatcataacaaaagctgcccggaacagagcagcttttgttatttaattattgttttttagacttcttttaatgctaaaagaaattttattatttcgtggcattctccaaacgtttcatcatcataaagatgaataatgcagagatcagacacaaaacgatgaggatagaccataatgcccataatggcatgtgaccccaaagcataccgatgatagaaaccagatagttaccgactgcagttgctccgaaccataaacccatcatcaaacctttgtattttggaggggctactttcgatacgaatgaaatacccataggtgaaagaaacaattcggcaaaggttaataccaggtaggtattgatcaaaacagaaggagatacgagtaaatcattagctacaacaatcgctccgtcaggattgggagtgggaagtcccatagaagacagagccatcacggtaaatcctaaagctgcgataaacataccgataccgattttacggggtgccgaaggttcgctgcctcgcttggccaaagctccgaatacagcaagagatacaggggtcagagcaacaacgaagaacggattgaagtgctggaacatctgaggaagaacttcaatgaaagaacccggtgctaacgacagatatttgtagactaatatgctgacagaaataactgcgacaactgccgatatcagtttggatttagcttctttggactggaacagagagaacaaactataaatcaaagtaatcacgaataccaggttgaaaacattaaagctcatacctatagcgccatcggcggttctggctgtataatcacgggcaaagaaagtaagggtaaggccgttttggtggaaagccatccagaagaagatcactacggcgaataccagtacgagagcggtaatgcgggatttggtttgttccggagttaattcgacaatattttcttgttttccgcttgctgcagcttgtttggtattgatatctgcatgtttgaaggtactcttgaatacctgatagatcaacatagatacaatcagagatatacaagccactgcgaaaccatagtggtaagaaagtgataattcgtcgatgtatttatgagcgaatgttgccagatctccgttgaatgcggaagcttgtgactgtgcgaaatgagtcagggtgtccagggaattagctgccatttgctggcctttttccagatattcgtggcaaagtgcaggtatatcaccttggtatttaaggcctgctttcgccatgaaattttctgtgatttttgaagcggctgtcggagcaaaaagagcaccgatattgatcgccatataaaataaactgaatgctgtgtcccgtttgtctgaatatttaggatcgtcgtaaaggtttcctaccattacctggagattacctttgaataatccggtacctaatgcgatcaggaaaagagccccgaacatagcggcaactccaaaagcatcccctccggtaggaatagcaagacaggtataaccggcaaacatgacgatgatacctgctgttaccattttaccataaccgaatttatcggccaggataccccctaagatgggtaaaaaataaactaaggctaagaaacccgcaaaaatgtttgatgtagctgctgaactgaagccaaattttgcttgcaggaaaagtgtaaagatagcaagcatcgtgtaatacccgaaacgttctcctgtgtttgcaagagccagggcatacaatcctttaggttggttttgaaacataatattataaattaaattagtaggttaaaaacaaaagtccccggggcaatgaatgcttagaggactttgttgttttagagcgttgttattattttgtgactctttcaagccatttaaccatacccaacataactcccatggacacgagacatacaataaagaatactgtccagcattgccagatcggccatgcattatacatgagcgggccaatccaaagcaacaggttaccaagagccgtagccgccaaccacagaccctgacacagacctagcatacttttaggtgctactttcgatacgaaagacagtcccagcggagagataaacaattcagcaaccgtcaggaagaaataggttgcaatcaaaacccaccaatgagctttgtttgccatttgttctgcaatgggtaataatttgaagtcgtttgcggagggataaccctttatcagagaaaaaacggcaaggaacaagaatgccgttcctgcaatgaacataccgattgcaattttgcggggagttgaaatttctttaccgcgttttgctaatcctccgaaaatggccatgatgacaggtgtcagcgcaattacgaagaacggattgattgcttgccatacttctggtgcaacggccgacgaatctacgaaatcacgggcaaagaatgataaggacataccattctggtgaaacgagaaccagaaaaagataacgatacccaatacagcgaacagcgcatacattctttgtttgatttctttcgccatagcagctttttcttctggtgtgtaacttacattttgagctgcaattttctttgcaggagtaggaaatgttttttgagagacgaagaaaataatgagagaaatcagcatcgcggcaacagatgcaatgaatgaatagtggataccttcattgaaaatctgtaaatattgagcgcaagaaacggtcaagtcaacaatggaacctccggctgaagttattaattgttgcaagttcgccaatgcttcgggagccatggcagcggcgttgttgatatattcatggcaaagtgccggaagttgtgcattgtaagtgaaaccgtttacacccaaccaccactggcgtaataccggtgcaatgaatggagcgatcaatccacccacattaataaatacataaaaaatctggaatccggagtcccgtttgtcttttgcgattttgagggcctccgggcctttcttggcagcttcggcttcgaaattatcatacatctggccgacaattgcctgcagatttcctttgaacaaaccgtttccgaatgcaatcaggaaaagtgcaaaacaggtaagggtcagcaaccaggtggtgttggctgccgtagcaagaattggaatggaaagaataatgtatccggtggccattacaacaagacctgttttaatagttcctttgtaattttgagtgcggtcagcaatcagacctccgacaagacttaaaatatatatgccagcataaaagaatgagtaaatagtaccactggcggcttcgcttaaaccaaatttagaacacaggaacaacaccaatacggcattcatgatatagtagccgaagcgttctcccatattactcagagctgcagtaagcaaccccttaggatgatttttagacatagataatgtatttaagttaatattaatccacttcggtcgcaaatgtaagaatatttccgtatttttcgtctttaaaacgattgagttaatgttatggaaaagttaaataaagtttttcgaacggctcagctggctgcgattgataaatatacaattgagcatgagccggtaagctctttggatttgatggaacgggctgccgggatttggacagatcgttttttgaaaattttcactgaagttgcaggagtggtcgtgattgccgggaatgggaataatggtggcgatggatatgcgattgccagattattgaatcggcggggagtgccggtcagagtattccggattgccgggacccaggatagaagtcccgattgtgaggcgaattatcggcgttggttgaccaggggaaaggtggaagaattaaagcaggccgatgatttggtgttacagaagggagaaatcgtgatcgatgctattttcggatcggggctgaatcgtccggtaaccggtttggcagcccggattatcaagcaaatgaatgcttctgctaaccgggtggtggctgtcgatattccttccgggttggcgggggaggataatacctggaacgatcccgaaaccattgtttgtgcagagtatacctttacttttcagttcccgaagttagcctttatgctggcggagaatgaaaagtatgtcggccggtgggaagtgctggatatcggcttacatcctgaaatcatcgctcggcaaccgaccgattggttttatacgacagaagatacggtaaaagcgattttacctccttcgccggtttttgctcataaaggtactaatgggaaaggactgttgatcgccggcagttatgggatgatgggagcggctgttttgggggctaaagcggctgtacgctcgggtatcggtttgttgtactgtcatattccgggtaaaggaatcgaggtgatacagacgactgtgccggaagcgattcctgatccggatgaatcggccgaacggttttctgccgtctgtaaactgagagattacgatgcgattgctgtcggacctgctatagggcaaggaccggagactgtcggtggattggaaaaattattacgtacctggagagggacgacgattctggatgcagatgcgctgaatattatagcggaacaccgggagttattggatttactccatgaaggctgtattcttactccgcatatgaaagaatttgaaagattagcaggaaaaagtgtaaatgattttgagagattaaataaattaagcatttttgcaaatcaatatcgggtgcatatcgtgttgaaaggagctcattccgttatcgctactccggatcgccggcttttcttcaatatgagtggtaatccgggaatggctaaaggcggggcgggggatgttttaacaggagtgctgctggctttggctgccaataaattgaatttgttggatttgctccggataggagtttttgcccatgggctggccggtgattgtgtcgcggaaaaagaaggccggagaggatgttgtgccggaatgatagccgagagaatgggagaggcctggaaaagattagaaaaataataacaattactatgaaaagagtttttattgtatcgttaatgttggtggtttgtctggctgccgcagctcaaaaaaagaaagaactgactacgttagtgaacgtaaattatactttacctaaagtagcctatgaagtagaggtcatcttggaatgcgaacgttttgttcccggaccctatcagaattatgccgagaaagaattgggagtccgtcctgaagcgacacaagtctccgaaaaatgggccataaaaaaaataaatgttcttccacagtatattccggatgaaaaggcggtgtattctgtttctgccaacggggattattggccggtgacactgagccttagtgctgaaggttttctggcaggtatcgctgccggtaaaggggaagttttcaatgaaaaaaaagagatgaagtatatcgccgaggccttgggggacgaagagaggatcgatatcatgaaactgaatacttataatcagctgaaagaagtgttggataccaattatacttatcaggaggtggacggtgagatgaagagaatttgggatccgatcgtacattatgctgttaagaccgatgctgacaatgtaaaagaagcagtaagtgagattttccggattcgctcggaaagagtaaaattattgggagccgaaaataatgttcctgatggaaaatctttagagatcatattgaaagaattcgatcggatggaaaaaaactacctgagtcttttcttaggtaaaagagaaactgtcaaggtaaaacgggtattccagtgtattccggaaaaggctaacgaaccggttgtcgctttccggttttctgaacaaaacggagtgacagatacgaaaaatgttgccgctcaggcttattttctgaagattgaagaggctgtggttccggcttcgtcaccggtgagtggaggaggtgaagcggctgctgtttattatagggtacctgctacagctacgttgaagttactgaaagggaaagaagaaataatgagttatcctgctattgttcctcaattgggagaaattaagaaatttcctgtggatgtgattagtagcgaagggttgatgctggaattttatccgcagttcggatccttgaaaagtattcggaaaaaataatcgctgatacaggctatctgtattggtattagtacttgaattatgtcgtggtggaataactggtatgtgagttttttgagttggcgggtacgccatatcaaagaaaggaattttatcgtcatcctgagtcttctggtaggtattatcaccggactggccggggtattcctgaaaaattccgtccattatacccaccagtttctgaccgagcgtttgcagatagatagcggaagtttgttgttttttattcttccttttatagggatttggttgacctccctgtttgttcgttattttgtgagagaagatatcagtcatggagtgacaaaggtattatatgcgatttcccggcgtaatagtatgatcaaacctcataataactactcctctatgattgccagtacaattacgattggctttggaggatcggtgggaacggaagcgacgattgtactgaccggtgcttccatcggttcgaatatggcccgttttttccacatgaactacaaggtgatgaccttgatgatcgggtgtggggcagccggggctatcgccggaattttcaaagctccgattgccggtatcgtatttaccctggaggttctgatgctggatctgacgatggcttccttggtgcctttgatgattgctgccatttcatcttacgttattgtatattttctgatgggcgaaggggtggtcctcgaattcgccgtacacgaacattttgccttggctaatgtgccgtattatattattctggggatattgtgtggattggtttctgtatattttatccggacgaatatccgaatcgagaaatttattaccgggataaagaaccaattcaaaagaattttggtaggaggagcattattgggcttgctgatctatatttttccgcctctctacggtgaaggatactcttctttggaagctttgctgaccgataatgcagatgcactgttgaacaatacctattttttcgatttccggaactatgcattcgtcgttgttttgtatgtgatcggtttggtatttatcaaagtagtagctacagctttcaccaacggtagtgggggggttggaggtgttttcgctcccagtttgttcactgggggagttaccggattcctgattgcttacctgatcaatatgaccggagtgatcacggttcctgtcagttattttgtattggcaggtatggccggggtgatgtcgggtgtcatgaattctccgttgacagctatgttcctgatcgctgagattaccagtggctatagtttgctggtgcccttgatgataacctcggtgacggcccatttaacggggcggggcatggagccttactctatttatgcacgtcggctggctatgaaaggagatctgattacccataataaagataaagccgtgctgactttgatgaagctgaataaagtcatcgagaccgacttacagacgatatccatagaggctactttgggggatctggtgaaaaaagtttcccgttccagtagaaatattttcccggtgatcgatgaaaacgaagcattgctggggattgtattgctggacgatatccgtaagatcatgttcaatcaggatttgtacaatgtcacctttgtccgcgactttatgacaactccacctacgattgtcgatgtgacggattcgatggacctggttatgaaaaaatttgaagatacaggagcctggaatttacctgtgatcgaggaaggaagatatatcgggtttgtttcgaaagcaaagatattcaacacttacagaagggtgcttcaacatttttccgacgaataatagaatcatatggatcaacattcaaaattggggtatcgggaaggactcgtttccgttattctgaatctactcttgtttgttttaaaatattatgccggtattgcatcggcctcgcttgctttgattgccgatgcctggcataccctttcggattccctgacttctttggtcgtaattcttggaattaaattatcctcgaagaaaccggataaggagcatccgttcggacacggccgctgggaacaaatctctgcattgattatcgctattctgttggctttgatcggagtagagtttatgaaagacgctatcgcaaaattgaggggacatgaggcggctgatttcggctggttggcttatctggctacggttgcttcgattgtcttaaaagaaggattggcccgctatgctttttatatcgcccgtaaaaccggtaacgctgctgtaaaagcggacggatggcatcaccggagcgatgctttatcgtcactgatggttttggccggactttttctcagcccctatttctggtggatcgacagtgtattgggtatgttgatatctttcatgttattctatgccgcctatgggattattcgcgaagcagtaaataaaattttaggagaagaaccttcggaagaagtgatcgggaaagtagaacagatcgtgaaagctgaaatgggaaatgtggcttatccgcatcattaccacattcatcattatggggaccatatcgaattcacttttcatatccaagtgcccggggaagagaccgtggaggaagctcatagaaaagctacccttatcgaaatgcagataaaaacagaattgaagatcgatgcgactatccatatcgaacccttgaaaatgtaactttataaacccttctatcgttgtaaaactagattataaatcacccgctaaccggctctgtcaggagaagcaggggagattagatgtggaaatcgcaaatctaaaattgggggctactattaatttagttgttttatacttgtatattaccaaaaaaaacttacttttgcgaaaattttatgggaacgctaaaaaaactatatagctatgtattggacactggaacttgcttcaaaattggaagatgcaccatggcctgcatctaaagatgaattaatcgattacgcaattcgttcgggagcgcctatggaagttatcgaaaatcttcaggatatagaggatgatgaagaaattttcgaaagtattgaagacatttggcctgactatcccagtaaagatgatttcttcttcaacgaggacgagtattgacggcttataagtaagctaaattattaaattacagcgcgataaacaatgaaaatttgtttgtcgcgctgatgttttatggtgttatatggtgcggtttgtttgtctaaattgcggtttttcttctcaaaaactgggtttgtttgtctaaaatacattacctttgcttctcctcaggaatattgaattgggaggaaaagcatatgggaagaccgaaaagactatatccattgggcaaatatcgccttcgcacgccgaaagtggttgacaaggaaaaagcctatcctgtcgagttggaatacacttggaacaggcaggtaatccgtaagacaacgaatgtctttgtcaaggttgcggactggaaccagaacggtaatcagggacgaggtgaaatacgtgcaagtcatggcggtgaatccaaacgacttaaccagttattgctggcacgtgttgaacgtatagattcgctacttgccgaatataacgaaaaacatcctaatcagataaccgttgatgtcgtatccggctttcttgcggacaaacctcttgcgcgtcgtgatcaagggaaggacttcgtagagtttacattggaacgtctttcttcagactatgcaagaaacagaatcggaaggagccggtatgaaaacggaaagagctgcatgaatatattccagacatttctgagggctacccgacagggaacctatcgttctgacagtatttatgtaggcgatatgactccggagctgttagacagctatatatcatggcgcagggaaatcaagcagaacagtgatgccactatcaaccactctttgactccgattctaaaagcgtgtgcatacgcctgtgaaatggggatgatggaacctgccgtcaatgcaaggattcaggatatgcgcattgtaactaaggtatcgctttctgaagaagaagcagagtttgacggcaaaagtctcagtaaggaacagatggcggcattgcttgaatattacaagacctgtacagaaccgcgcagaaaagaatttctggaaatgttcttctttgcgttccacgcctgcggtctccgtgtagtggatgtgatgaccctgcaatggaaacatatcgacttcgcaaggaaagagttgcggaagattatgataaagacaaacaaacgacatgtcataccgcttactgaacctgcattacatatcttacagcaatggcgggaaaaacgtgagggatgccggtatgtgttcaaccttgtaaaagagactttggatttggatgatgcggaggcactgtacaaagcccgtaacaatgccactaaatgcattaatcagtcactggccgttgtcggtgagcagatcggccttccgttcagtctctcgatgcacgctgcccgtcactcgtttgcggtttttgcgctgaacaagggattatccatgtcggtagtcagccgtctgctcggacatagcagcacggatattacagagaaggtttatgcccgtttcctgccggagacgctgtcggcggaggtggcaaaactaagcggagaattaatcaacttgactatataatcactgtgaaaagataaagaaacatgatatcattgccatttcgagttgcatgtatcctgatagcaggattccttattgtactggctgtaacctatatatacaagttaaacagccgtaaggtattctggggtgtagggctcactgccattatcggtatcctcatccttcttggattaggggtgcttcgtccatcttggggaacagaaaccggcacggctgtcattgtgggaatcagtaccgctatcggatgtgcaataacgctgatatatgcagcagaggacttgcatcaaaagaagcgaattaagggaaagaaaatcacagaaactgaatctgtgcaagaagatatggttccagatcgccataaagtgactttaccgtctcggcttgatactgaattggcaagaaagatctttgataaagccattgaagaagaatatatcattatcaacgatgaccattatgaatggactttgaacaaagtccttcttgcatatatgtgcggacgtatctattgcgaagattatcctgaaaaaacaatatatgatgagaagatgtactggatgcctggcagagtggaattatttccgggtactgaattagataagttatttaacatgaaagatttgacccaatcaaggcatactcgaaaaaacaaagctgcgcctacaggatttgagaaaattgacaagttatttgagtagccaatgtgctactctttttttgtttgacaagcagcaggttataagctcatcacctccgtgttatatacaactctaacacgatctctaacat

SEQ ID NO: 6014 - DNA, 23064 bp, Unknown
  gut microbiota DNA sequence
atttgaattgtgttgtaaatattattgatttgatttataatttaagcggttatatatttgtatcaaagaaataagaaatagtagaaatcaattaaaaataagaattatgaaaacgaaaaatttaatcggattggattcagagaatgctcaacaagtagtaaaccttttaaatgagttgttagccaactatcagatttattatcagaatctgcgtggatttcattggaacgtcagaggtaaccgtttcttcgttctgcatgctaaatttgaagagttgtacaacgatgctatcgaaaaggtagatgaaattgctgaacgtattcttactttaggtggtgtacctttgcattcttatgcagcttatactaaagtggctactttgaaagctaaagaaaatgttactgacggagatgcttgtttgcgggctgttgtagaggatgtgcaggtattgttgaaacaggaacgtgaaattttgagtgtcgctgcagagattggggacgatgggactcaggatgtgttttcttcttatgtttcaagtcaggaaaagctgttgtggatgctcgatgcctatctgaatcagaaatgagtaaggtaaaaggtataaagtaaaaggtggagagatcgattttccaccttttactttttactttataccttttacttcttctttcgctttgctttgtgtcacaaggtacacacctgtaaataccagtaaagcggcgatcggtttgtcccagctgaatacatcttgtccgataagaatcgctataatggaagcgatgatcggctgtaaattgttgtacatactggctgtcgtgggacgaattcgtttcaaagccataggaaccaggaagtaagcgatgccggttgccataatgactatataactcagtttcaggataacgaatgggttgctttctgtgccgaagactttagcttccggcagatcggaaataccgggaggaaaagagataagggctgaaaataaaaacatccatttcatcagagtgatggcggaataacgttgtgagataggacgggtgatgactaaatagatggcataagtgattacattaacgatgcaaagtaggttacctatccaattgccggatgaatcggtatttatagccgacgattgaaaaatgatcagtaaggcacccgatgctccgatcaaaactccggcagcttttttgaatgtgacgggctcttttaatatcagggctgcgatcagcataaccgcgagcggggtcatggctgcaatgatggtaatattgaccggtgaggtgtacagaagggcattggcaaaagatacttgtgcccctaccagaccgaataaggcaccccaaaagatcgtccatagatcccgttttccgacttcttctttcggagccagtaagccgataccccaaaaaacaagggtagcaaaaaccatccttacaaaggtaagagcatacggactgatccattccgggacaatggttttcgctatgggcgtatttaagccgaaaatcagattcgtagccagtattgctccatgtcccagccatttgtcttttgtcatcttgtttttttgttttctgcggtaaatataagataaatcggccgaataatcttatttctcgctattagtaattttactgacttaataaagttcttaaactttacagactcatttttttgttgtaacattgtggtttcggaaacgtttgaattattgtgggtaaatactaatattagaaaatgattgtctatgaaaaagatgaaattaggtctattgcctcgtattattattgctattgctttaggtattgtgtgcggacttttctttcccggttggattgtccggatttttttgactgttaattctttgttcggtaatttcctgaattttattattccgttattgatattaggcttggtggctcccggaatcgccgatctggggaaaggagccggacgtttgttgctgataaccgctttgctggcttatggttttactttgttttcaggcttttttacttattttacctgtgatctttcttatccctggttgttaaatacctccgataagctgtcggctgtggcggataataccgttgccttacaaccgtatttcactgttgaaatgcctgctgtcatgggagttatgtcggctctgatattggcttttacgttaggtttaggaatgtcggtgatcgacggcaaccggttgaagtcggttatggatgattttaaagacattatcaatcaggtgattactgccgtgattatccctgttttacctctctatattttcggtattttcctgaatatgaccaattccgggcaggttgccggagtgatgaatgtatttctgaagattattgtcgttatttttgtgatgaccgtagtcttgttgtttattcagttttttatcgccggtatggtcggtaaaaagaatcccctccgtttgttccgcaatatgttacctgcttatatgactgctttaggcacccaatcttcggcggcaacgattcctgtaaccctggagcaaacgatacggaatggcgtacgtcctgacttggccggtttcgttatcccgttgtgtgctacgattcatctgtcggggagtaccatgaaaatcgtcgcttgttcgatggccatcatgttgatgagtggtatggaaataaattttgcccaattcgccggatttattatgatgctcgggattgctatggtggcagcaccgggtgtgccgggaggtgctattatggcagccttgggattgttacagtcgatgttgggattcgatgaaactgcccagggattgatgatcgcactttatattgctatggatagtttcggtacggcgactaatgttaccggtgacggggctattgcagttattgtagaccggattaattccgggaaatagatacctttgtgaataccggattttttgcctctgaattatttctatatctttgcagcggaaaatcaaaataatatgaacttgaagtatatactgatcgtatggggagcgatgctattttgtgtggggtgtagtgaagatgacgtggattccagctactcgttcgatgtggccgggctgaaagctactgtgacaaatgacaaaggaagtgttgtcgagatgaatactattttattggattctttgcaacaacagggatttgtaggtgaagttagtttctctgaagaaacccgggccgaaaacgaccgtttggctgaagaaaaatttgcagagaaactggaaaatatcaaaaatatcaaacccgcccgtttgttacagcttctacccggagaaagggtcatggtaacttttgattatctgttgaaacgcggaaaagatgtgctcgaagaggaagaaataaccttagatgaggctatcgcgttgtagggaacggattattgtccgtatccaatggttctgtcggtaaataattgttgtacaacgtataccgaatcttcgtaactacctgtataatcccaagcagataaacacgacggcttgtaccattcagaaaaaccgcttcgaatttttttataaactacattccgtagttgaaccttcaatcggtcgattttgaaaataaatattaatcctgatatttattgttgtaattttgttaattatttactatttttgcataccgaaaagtataaaaatatgccggatttgaaagatgaaatagtgaataaatcttttttccaatttctgaacagaggatataaagcttgttcgctgaaagatttggagaaagctaccggtttgacgaaaggtgcgttttattattattttcggaataaagaagaaatactgaaagccggtatcgaaaagtatttgtccgtagtcagtgagataagcgaagaagagtttttggaagtcggttcattgaaggcctacatagatatcgtagtggcccggaaagaacgaagagctgaacaattacaacagatgttcgacttttttattatagatatcgctttttttcagttggttttggaagtagcccctctctttccggaatatcgtaaatggattgacgagttgtctaaagatcgtttgtcccgttgggaatatatgatcttgaaggcgaaacagcagggagagatcaaaggttcgctcgatacttcggtattggcgcgtaacctgatgtcggtgtcgaccagtatgttgaatatcgagttgggtaccgataatttgcactttatgttttcggatatgcgtatgcagtttgaacaatattatttattgataaaaaaatgaataatacccgtcggcaaatcatagaaaccgcttttctgctcttcttgaaaaaagggtttaaggctgtgcggctgagtgatatagaacgggctgcgaaaattacccgcggtactttttattatcatttcaccaataaagaagaagtactgaaggagggattgtattcttattatgccttgctgaactcaaaaagaactgaagaattcgggcatatttcgacattgcgggaatatgtcgacctcactattcagaaattgaccgggatacataattattcagcacggacattcagtagtgaaattcctgaaattctttgcctttcgttgatcgtggaagtgatcgccctattccccgaatttaaaaaagtggttttggcttcgaaaatgttgcgactttctaagttagaacagttgatattgaatgccaaacgggccggagaattgagaaatgatgtggatacctctattttggcaaagaatttgctgaatattagcgtcggtgtgataaactatctgatcatgcatcaggatatatcttatgcattgtcggcggtgagatcacaatatgaacaactttattctctggctgtcggagaataatttttttattgaaatacataccgaaaagtataaaacaaattacgttataatagatagaatttattattcaataaccgatcatatgaagaagttgatttgtggaatattaatgttaggaacgattgccggtgtatatgggcaaaaagtgatgagcttggaagagtgcaggctgttggctctggaaaataacaaaaagttgaaaatggccgatgagcagataaacgcagcaaaagctaaaaaagaagaggcttttaccaaatatttgcctgctttggatgcgatggggacttatatgcgcaatcagaaagagatcaatttattatccgaagatgcccatttgcctgtcggtacgatcggacaagacggtaaatggacgctcggtaaagatcagattatgatcggagcagacggaaaacctgtgatgaataacggccaatatgtccctaaagattatgctctgttgcccaaagaggcgatgaccgtggatgatagaaatatggctcttttgcaggtaggactgacacaaccgatttatatggggggtaagatcagagcctataaccaactggcagggttgtccgagaaattggccgagagcgggagagaacaggaattgcaaaatattatccaggaaaccgacgaagcttattggcaaatcgtatctctggtcaaccgacagaaattagccgttaaatttgtcgagactttacagaaattcgaacatgatatcgaagtgatgtaccgaaccggcgtatcgactaaggcggatatgctctcggtgaaggtaaaactgaaccaggcagagatggctctgttgcgggtggaggacggtttgagtctggctcgtatgaatctgaaccaaatctgtggattagctgtagattcggtttataccctgcaagaagaattattgaatgttttgcctcaggccgaaccgaagtggttgaatatcgagcaggtatatgataaccgtccggagatcagtagcctgacgctggcaacggatatttaccggaagaaagaaaagattgcccgttcggcttatctgccgacagtggcttttatggctaattattttgccatgaccccttctttcttcgatgggataagtaccggattcgacgggatgtggagtgtcggtatcggcgttaaagcacctatattccattggggggcttcccggaaaacggtgcgtagtgccagggcggagaccagtctgatgaattttaaattacaggaagcccgcgaaaagatagagttacaggtaagccaggcccggttgaaggtcaaagaagctgcccggaagatggaagtggctgaaaaaaatcaggtgaaggccgatgagaatttgaagtatgccaacctgggatttcaggaagggacgatcccggtatccaatgtgttggaagcccaaacggcttggttggctgctcatgccgatttgatcgatacacagatagaaatgaaattgtgtgaagtgtatttgcaaaaagcgtatggtatattaggcaaagaatagaaattataaacgaaaagatagtatggaaaagatgaatggaaaattggtgacttttaccggaatcattgttttggtgcttttggtggcaattttcggttttctgttttgggagccgaaacctgagtatattcagggagaggctgaggcaacggaagtacgtatttccggaaaagtgccggggcggatcgaaatattccgttttaatgaaggagaacaggtgagccggggggatacggtggctatcctggatagtcctgaggtgctggccaaatatagtcaggccgaagcggcggaggctgctgcccaggctctgaacgaaaaggctgaaagaggtacccgctccgaacagatcgtaatgacttaccaaacctggcaaaaagcaaaagccgctgccgaggtagcgaaaaaaacatacgaccggatcctgaaactttatgagagtgaggttgtgccggcccagaagaaagatgaggccgaagctaattacaaagctatgatggctaccgaacaggctgctaaagcccaatacgagatggcacgcaatggtgcacaaagagaagataaacaagctgcagaggctcaactgaaccgggcgaaaggggctgtcgcagaagtggaggcttatgtcaaagagacttatttgatctctccgatagacggagaaatttccgagcggtatccgaaggtcggagaattggtcggtacaggggcaccggtgatggatattttggatttatcggacatgtgggtatcttttaatgtgcgtgaagaccagctgaacgatttcagggtaggagaaacatttaaagcttttgtgcctgctttggataatcgcgaagtggaattgaaagtcacttatctgaaggatatgggaagttacgctgcctggcgggctaccaaaacgacagggcagtatgatgtaaaaactttccgggtaaaggcaaaaccggtggacaaagtagatggactgcgtccgggaatgagtgttttgaaaaaattatgagtacgctcggtttgttatcggctttaatgaaacgggaattcagacgtctggcttcccggcggatttattggtttattctgattttagctccggcattttgttttatcttttttgccgatttgttgaaacaggggttaccaatgaaattgccgatagccgtggtggatgaggataatacatccttgtcacggcaattggtgcgttctttggatgcgatggcccaaaccgaagtggtgatgcggacggctagctttaaagaagcccgggaagcgatgcaaacaagccggatctacggtattttccatataccggcgaatttcagacaggaggtgtctgtcggtaaaagacctgaaatttcattttatacaaatgagacttatctgctaccgggctcattggtctataaaaatatgcgcttgcaggccgctttggcaaacggggctgtacaacagaccgtattgttggcaaaaggcgggggaggaccgctattgaaagccaggctgtcaccgattacagtggatacgtttcccttgaataatccctggatcagctatgccatctatctggcaagtattttaatgcctgctttcgtttttatgtttgccatgtttaccgccacttatagcatcagtcaggagactaaagaaaaaacggcagccgattggttgcgtcgaagcaatgattctattgtattggctttgctgggaaagctattgcctcaaacgctgatctttgtcactaccggcttactgtatctttctatattgtacggttatttacattttcctttgaatagtggattttttcccatgtttttagctatgttgctgttggtactggctgctcaggggtttgctatttttgttaccggtattgcacggcgcaatcggatcgccctcagtttttgcgggctttggggagttttgtcattctctgtcagtggttttactttcccggttccggctatgcctcagctgatgcagttgatgtctgatttatttccgatgaggcattactatctgctctatgtcgatcaggctttgaacggtattcctatggcctactcctggaaaccttatctggctttggtattgttcgttctgttgccgttactgactttgcctaaattgaaattggatttacaggaaaatcgttatttaccctaatgggaggttatgatgaaagatatctattttatatttcggagagagttttacctggtttttcgggaccatgcagtacttactttctttatttttctgtgtttaggctatcccctgatttatacttttatttatagtaatgaggttgtaagacaggtgcccgttgctgtcatcgatcagtccaagtctcctttaagccgtgaatttttgcggatgtgggaagcttctccgaatgtgaaagtcgtagcccactgtaacgatctcggagaagcgcagcttttcatgtggcagaaagaaatatacggtattttagagattccggcggatttcagtaaagatataaatcggggagaacaggcccatgtcgctttgttttgcgatatgggggctttactcaattataaagctttacttcaggcgacaagcgatgtggctatcaccctggggaaagaaatacaggtagaaaatttaccttatgcttcccgcattcagcaagaaataaccgcctcgccggtagagatttcggaagtcaaaatgtttaatcctcaaagtggttttgcttcttttatcatcccggcagtattgatcctggtgatccaacaatctttattgttgggagtgggaacgattgccggaacagcccgcgacaggaatccacgccatagcctggtgcccgtcgataaacattactgcaaaccctggtgcattgtcatcggtaaagcctgtgtttatatgccggtttattttgtgatgggattttgggtgttctttattgtaccccgtatctttagtttaactcaaatcggcgctaaatcggaattgatgttattcctgttcccctttttgttggcttgtgtcttttttgctattacagcttcttttttaagtagggagcgggaacagccttttttattgtttgtctttacctcggtgccgctcatgtttatttcgggtatttcgtggccgaaggaggggattgccggttattggatcgccctgtcgaaaatttttccttctactcccggaatcgacgggttcgtaaaaatgaacaatatgggggctacccttggagaggtgttgccggagtatctaaatctctggattttagcgattatttattttattttggcatgtttattgtattatagagaaattgttaaaagtcgtaaagtacgttcgtaaacgaataattaataggtgtgtactatgatcagacattatttattccctgtggtgggaattatccttggattttctgcttgtcgttcgtcggaaaccaatgaaaagcaggtcttgatggtgaagaccgagacagtaaaaaattatgagaacgaattacaagtgacctatccggggcgtgttaaggctgcggccgacgtagatctggcatttcgggtagccggaccgatcatccggattccggtgcaggtgggtagttttgtgcgtaaaggagaagtgattgcagagatcgacccgcgggattatgaattgcagtataaagctaccgaagccgaatacaaacagattaaatccgaggctgaacgggtgatagaactgtataaccgtaaaagtgtacctgaaaatgattacgataaagcggtgtatggtttgcagcaaatcacctctaaatataatgcgcataaaaatgctttgaaagatacccggcttgtcgctcctttcgatgggtatatccagaagaaatatttcgataccgacgaaacggtggctgccggaatgccggttatatcgatgatcgatacccgttatttcgaggtagaaatcgatgtgccttccagcgattatgtccgtcgtcacctttttaaccggtttacggcagttgccgatgtctttccggatcgggtttttccgttggaattgatcgatgtgacgaaaaaggctaatctgaatcagctttatcagatgcgtttgcggttgactcctgatcctgctattcctttggcggcaggtatgagtgtgaatgtaacgatcgattatgaagcgggaggcgacaatttgacagtggttccattgagtgctatttttcaggacaaggaaaaatcgtcggtatgggtgtatcggccggcggataaaaaagtgactcaaagacaggttaaaatccggcaaatattgaaagaaggcagagtggttttggacgaaggcctgcaaagtggtgaaatcgtagtcactgccggtgtacataaactgaaagagggtatggaagtcgagaggttgaagcctgttgccgatacgaatatcggtggtttgctgtaaacggtcgatccggcctgaaactgttgtcttttattaattctgattggaatgaatcttgctgaatatgcattgaataatagggcactggtcaaatttctgattgcagtgcttgttgttggcggaatcttttcgtttgtctctatgagtaaactggaagatccggagatcaaggtaaaacaagctctggtcgtgactgtctatcccggagcttcggctcataaagtggaattggaagtaacggatgtgctcgagaaagaaatccgggcgatgggagatattgccagtgtggagtcgaaatcgatggctgatctgtctattattacggtcgagttggagagtacggttccccctgccgaattggaacaaaagtgggatatcttacggcggcgggtgacgaatgcagcttcacaactgcccgacggatgcgtgactcctgtggtaaaagatgatttcggggatgtatacggcatgttctatgccatgactaccgatggcatcgccgacgaagaaatggttgagtatgccaatctggtgaagcgtgagttacaggatataccgggagtgagacgggtggatatttatggcgaccgaaaaccttgtatcaatatagatatcatacaggacaaaatggctaatctgggtgtacatcccgccgagattttagctaccttgaacaaccagaataaaacggtttattcgggatatttcaagacgggaaagagtagattgaggataggcgtagacgatagttacgaatcgatccgtgatatcgaaaacctgttgattcagggacatgaaaacgatcagctgcgattgcgggatgtggcttcggtcacacggggatatcaggatccttcccggaatgagatgcgttatgatactgttcgtgcactagggatatcgatctctatggaaaaaggagggaatattgtgactttgggcgaaaaggtggatgctcgtttagagcaattgaaatcttcccgtatacctgtcggcatcgattttcaaaaggtatttttccaacccgatcgggtgagggaggctatcggtacttttatgatcaatctggtggagtcggtgctggtggtgattctggtattgatgctgacgatgggattccggagcggtgtgattatcggtaccggtctggtcattatcgttttgggggctttcgtgattctgtatttactcgatggaactttacagcgggtttccctggcggctttgatcgttgcgatggggatgctggtggataatgcgattgtgattgtcgacggaatcctggtggatttaaaacggggtatccctaagcctgccgctttgaccaatattgctaaaaagacagctatgcccctgttgggagctactttgatcgccatactggctttcttcccgatttttatgtcgcccgatacggtgggggaatatgtgcgggatttgtttatcgttctggcggtgtcgttattattgagctggattttggctctgacacagattccgatccatgccgattattccttaaaagtgaaaaatgagcatttgagtgaggaacaattatacgatagcgggatgtatcggtggttcaggaaattcctgacctatatgctctatcataagaaatttgctgtaggagcggttgtcatcttattggctttgagtgcctggtgtttccaatatattccgcagggattcttcccggatttgagttacacccagttgtatatcgaatataaagtgcctgaaggggggactttggaagccgtccagggagatattgcagaaatcgaggcttatttactttcccgcccggatattacacatgtgacttcgagtttcggcggtacgccttcgcgctacaatctggtccgctcgattgctttgccggcgatgtcgtacggtgaattgatcgtcgactatacggatgccgatgccctgaaaagttcgattcccgggctacagcaatatctcacagaacattatccggatgcttatgtgcggatcaagcgttataatctgatgtatgaggatttcccggtcgagttgatgttttgcggacccgatccggctgtattgaagagcttgtcggctcaggctgaacagatcatgaacgatgaaccgacggctactttggtaacgaataactgggagcccgaagcgccggtattgatggtcgattattaccagccgatcgcccggcaagccggtttatcccgtacggatgtcggcttatctctgctctcggctaccgatggattacctgtaggctcttactacgaaggaaccacagctatgcctatttatatcaaaagcgtagataatgaaggagaagaaactgctgcgctggaaaatattccggtttggagcgtcctgccttcgcttaccggtttggatggcgagacgataaaagggcttttgatgggaactgtcaagaaagaagaccttttgtcggaagtggtcggttctactccgttgtcacaggctacccggggagtgaaaatcgagtgggaagatcctgtcgtttggaggtataatggacaacgggccataaaagcacgttgtaacaatgcgcagggatataccgccgagagtgtacggggcaagttgatcccgctcgtcgatacgatcaccttgcctgagggatatacgaaacaatggctgggcgaacacaaagcgagtagcgaagccatgcggtatctttttaaaaatgtgccctgggctattgttatgataattgttattttgatcatgctgtttaaagatttccgtaaacctacgattattttcctttgtttgccgctggcagctatcggcattgtcttcgggatgctgatcagtggaaaagatttcggttttgtcgctattgtgggggccttgggattgataggtatgatgattaaaaatggagtggtattgctggatgagatcactttgcagattgcttccggcaaagggaggttagtggctttactggattcgtcgtcttcgcgtttccggccggtaatgatggcttctttaacgactatcctggggatgattcctttgctgggcgacgacttgttcggttctctggcggtcactataatgggcggattgctggtaggtacggtgatcactttggtgtttatacctgtattgtatgctttattctttcccatcgaaaaggaagataaggtcggagctttgcataaaagcgataatgaacaattggctaatgaatgatcgacgaatgatgaaaacaacgctattaatcctgacagttttattcttttccggagtttgtccggctcagatagtcgagctcgatttacagaaatgccggaaaatggcggtagaaaatagtaaaaaattgcaatcggcagaacaacaaggtcaaaaagccggttttgacaaaaaagcttaccgggctaatttcctacctaaactttcggctacaggtttatatgcctatgtacacaagaagatgaaattcgatatcgacggggggtatctgccggtatacgatgtgaacgatgtcggacaggcagtgccgctgaatagtttgtatatgcccgaaggcaaacctgtattgggagccgatgggatacccctgttcaaacaatatgcatttatgccggatatcgacctggctttgggtattgaaaatgcttacacggtaggagtgatgttggaacagcctctttatatgggggggaaagtgcgttctgcttttcgcatggcttcgataggtaaagaaattgcagacctgaatgtgaaatataatcaggcggaagtacttgccgaagcagatgcggcttattggcaatatctgaaagtctgtgaacaggtcaaagctgccggaaaatacctcgaagttgtgaaagaattggtgcgtaatctggaagatgcttatcggacggggatggccgcacagaacgatctgctgaaagcgcaggttaaacaaaatgaggcggaattgatggtacaaaaggcacagaacggtctggctttgtcgggaatgaatctttgccggattgtcggggttgatctgatgagtgagctgacggtcagggatagcctcggagaaggtatcgtttccggcctgtgggaagaaggggataatatcaccggccgtcccgaatacaatatgttggaacggcaaatcgaactgaaagaaaaagaagtagccttgacgcgttcggattttttgcctcaattgggagtctctgcttcgtatggatatagtgacgggattacgttaaacggcaaatcggacggtatcgcttcttttgcagctttggcttcgttgaaaatacctatttatcattggggagaaggacgtaataaagtcaaagccatgaaagccgaagaagagatggtgcgtttgaaaaaagaagaaaccgagcagatgatgcagctcgaagtggcccgggcccgctataatgtcgaagatgctgctacccgggttcggctcacacgacggtcactttctcaggccgaagaaaacctgcaggtgagtaagaatcgttttgaagtaggaatggagacccttaccaattacatggaagcacaggcacaatggcagaaggcttggagtgattggatagaggctaaggctgaacttcgtgtgaatgaaacctattatttgaaatctaccggaagacttagcgactaagtctccggtttttctataggattttgctcctggatttcttcttccggtgtttttttcggttttttcaataacgtacgcaggtaaaacagccgtaccgtttccggagagactttatagcgcattgcaattttctgaaacgagaaaccttcggtccttaaatctttgatttcttgttcatgttcgaataacttaccggcccgcagactgcctttgggacgtcctaactttattccttgggctctgcggcgtgccagagcttcgcgtgtacgctgagaaatcaacgtacgttcgatttcagcacatagaccaaaagcgaaagcgagtacctgactgttgatagaagaatcgaatttatatccttccttaatactgtgaatggtgatccctttttcaatcgattgatgaataatgttcatgatattcatcattttccggcttagccgggaaacttcggtaattatcaagacatcacctttttgcagttttttgagcagtattcctaattctctctcactttctttttttgttccactcacggtttctgtacaccacatggtaattttcagttcttgccgatggcagaaattaattacctcgcttttctgattcagaatggtttgcttatctgtgctcacccgcagataagcagcaactataggagctctgtccttcagttcctgtttctttttttcgggcatagttgtttagatcagtatgagatactgttaatgctttttttctcttttagttcacaaatatacgaaagttggccagttatgagaaacttttgtgaaaaatgagatctgaaaattaagagatttgaacagtttttgtttttttaacttaccgatgggaaagaaataaaattagttttcaaattccacctacttcgtgaaacatatattcgatgtcgtaagtatatattaagactttaatattcagtatataataaataaatgtcagatacgatgagaaaaagtaggaatagaattatgaagatgaaatggctggtatggggttgcatagcagcatcgatagggattttaggatcttgtcggaataagcaggttcaggtagatattccgcaattagtaaagacagctcccgtgaatggacatgatgggatgacttctgtcacttatcctggaaaaattcaggctgcatcgaatgtgaaactggccttccgggtagccggacctatccgtaaaatttatgtaaacgaaggacaatatgtgaaaaaaggacaattattggccgaattggatccccgggattatcagattcaatttaatgctactcaggccgaatatacccaggtgaaaggcgaagcagaccggattatagagttgtatcgccgtggaagtgtttcggtgaatgagtacgataaagctgtcgctgcacgtaaaagggtgaccgctttatataatgcacaccggaatgcattgaacgatacccgtttgaaagctcccttcgatggttatgtacaaaataagtacttcaacgctcctgagattgtgaatcagggtactccggtggtatcgatgatcgataacgattattttgaagtggacgtcaatatcccttccggagattttatccggcgtgaggattttatgactttccacgcgaatgccgatgtttgtcccgattcgattctgcctttggaactgctcgacatcactcagggggcaaattacaaccagttgtttacagctcgtttccgtttaaaacggaatccggttctggcgccaggtatgagtgtctccgttacaatcggatttaagccctcttcagaagcgatgagtattgttcctgtctcggccttgtttatgaaagacggacagtcgtttgtctggttgtataatgagcaggacgaaacgatcgaaccggtgagtgtcgccgtagaacgcctgacaaaagatggagaagcaattgtgagatctgctttgaggaaagggcaaacggtgatttctgccggtgtcaatgatttgaaggaagggcagaaagtaaaacttttacctcccgtcccggcttcgaatgttggagggctgttgtaatgtaaataggaatgtcgggctttcagaccggtataggactaaataggaaaatcttaaattatgaactttacagaatatgctttaaaaaataaggcgctggtttatttttttgtttttgtattggtagtcggaggaatttattccttctttaccatgagtaaattagaagacccggccattacggtgaaacaagctatggtcgtaactactttccccggtgcatctgcctggcaggtggaattggaggtgaccgatgtactcgagaaatcgatccgttctatgggagacctggatcatgtagaatcgcgttctatggacgatatctcacttattctggtcgaattgagcagtacggtaccattagcagaattacagcagaattgggatatcctgcgccgtaaagtggcgaacgtacaagctcagttaccggccggtgcccagccttcgacggtcatggacgatttcggcgatgtatacgggatgttttatgcaatgacatcggatggcttcgattatcagaaaatgatggactatgcccagttggtaagacgtactgtgctggatatcgacggggtgagcagtgtcgacatatatggagaacggccggcctgtatcgatatcgatattcaggaatcgaaaatggccaatttgggggttcatcctgccgagatcatcctcaccctccgcggacaaaatgcaacggtctattccggttactataacagtggggaaaaaagagtacgcgtaggaatagacggcgatttcaatggaattgaagatatccgtaatctcctgatccggggacacgaagaagacgatatccgtttgggagacgtggccgatattaccaaagggtacgttcagcctcagcaagagggattgaaatatgatacgctgccggctatcgctatatcgatagcgatgcaaaaagggggaaatatcatccagttgggaaaagtaatcgatcaaaaattggacgaactgaagcaaaatatcattcctgccggtataaatttcgagaaagtattttttcagcctacccgggtaaaagatgcgatcagtgtatttatggtcaacctgatcgaatctgtattgattgtgatcatcgtggtgatgttagccatgggattccgtagtggttatataatcgggatcggattggtggtagttgttttgggttcttttgtgattttacatatgatgcacggcactttacaaagggtatccctggcatcgtttattgtagctatgggaatgctggtcgataatgccatcgttattaccgacgggattatggtggatatgaaacgggggattcccaagccggatgctttggtcaatatcacgaagaaaacggcttgggcattgttgggggctactacgatcggtatcctgacttttttaccgatctatatgtcgcccgatacaaccggcgaatatgtccgtgacctttttatcgtattggctgtatcgctatggctgagctggatattggcgctggcttatgttccgatccaggccgaccgggcttttaaacccaaagtggtcgaaccgggagaacccgataatccgttcaatggcagaatttaccggcaatatcagcgacttctccgttttgccatccactatcgttggatctggattgtagctactgtgattttactggtttttagtgtttacggttatcggtttataaaacagggattttttcccgacttgagttataatcaattgtatatcgaatataaaatgcctttcggtaccaatcctgagactgtcgaaaaagatttggccagtatggaaaaatatttgatgagtcggcctgaaatcaccgccgtaaccacaagtttgggtggaactccctcgcgttataatctggtccgtacggtggccgagcccgctttaagttatggggaactgatcgttgattttacttcgccggcggctctgaaggaacatttgaatgaattgcaggcttatctttcttctcattatccgcaggcatatgtgcggatgaaacagtacaacctgatgtatatggatttcccgattcagtttatgatttcaggtcccgatccggcagtattaaaatcactctgtgcacaggttgaagggatcatgcgggcagattcatcggtaatgctggtaaccaataattggggcccggagactccggcgatgcgggtggattatcaacagcagactgcccgggatgtaaacctgagccgggaagatgtcgggttggccgtactggctgctaccgacggcttgccgatcggttcttattatgagggcgaacatcctttaccgatctatctgaaaagtgtgaacgatcagggacaacgacccgggcagatcggtaatgtcccggtttggagtatggttccttcgacgaatggaataggcctcggtacagtgaaagagttgatgaccggaatgatcggtaccgatgatgtattaaaacgattgatcggttcagtaccgctcaaccaggctagtagtggagtggaagtcggctgggaagtaccggtcgtacgtcgttataacggacagcgttctattgctgtacaatgtaataacgctcccggatatacgactaccgcagccagaaatagcttgctcccgaaaatcgaggcattggatattcctcctggttatactacagcctggcaaggcgaatacctggcaagtacgcagtcacagttttatttgtttaaaaatgtaccgatcgctatcgtgctcatattggctatattgatcgctctgtttaaagatttccgtaagccactgatgatcttgttgtgtttaccgttggccattacgggagtggtggccggaatgctgatcgccggtaaagaatttggttttgtggcgattgtcggggccttgggattggtcggcatgatgattaagaatggggtagttttggtagatgaagtcgatattcaaatccgttccgggaaagatccttttctggctttggtagatgcttctacctcccgtttacgtccggtattcctggcggcgatgacgactattttgggaatgatccctttggtgaacgacgatatgttcggggctttggcggttacgattatgggaggactgtttatcggaacaatcattactctggtgattttaccgatattatattctttatttttccgtatccgtcctgctaaacacggagaagaagaacaacagcaacaacaacaaatacgaatcaattggaggtaatatgaaggcacttttaatgattttgatcttttttcctggagttttatcggctcaggtggagctggatttacagttatgccgggaaatggctattcgcaatagtaaggagatggaaatcgccgaccggcaacaccggaaggctatgttcgataccaaatcctaccgggcggattatttgcctaaattgtctgctgtcggagtcggattttataatcagaaaaaatataattataaattgaaaggaggatatcttcccacttataaaccgggagagaatgggcaattggaaccgaatgtaatgatcgatcccgcaacccagaaaccggtgattggaagtgatggcaatccggttttcaatgaatatgcttttttaccggatatccgtttacaattgaagttgagaggggtttatatggctggggctcagctcgaacaaccggtctatctgggaggtaaagtccgggctgcacatcggatggcacaattgggagaggacatcgctgtcgagaatatccggttgagccgttctgaaatcgtggtagcgacagacgaagcttattggcaactgttgagagtcggcgagcaggtgtccgctgccgagaagtacagacaggtcgtgaaagaactcctgcaaaacctgcgggatgctcaggtggtcggaatggctacacccaacgatgtactgaaagcccaggtccgctacaatgaggctggcttgatgttgcagaaagcacagaacggacaggtgttggcgagcatgaatctatgccggttggtcggcctcaatctgcaaacggaattacacctgcaagattctttgacagataagatagatcctcgcatctgggctttggatacttctgtggaacagcgccccgattatacgatgttggctcaggaagtagacctcaggaaaaaacaagtcgatttgacacgggctgattttttacctcagatcggagtgaccgccggttatggctatggaggaggattgcaattgaatggagatgatgaggcaagtgctactttctcggctatggcagcagtgaaaattcccgtattccattggggagaagggaaaaataaagtaagatccgcccggatggaggaagaaatcagccgtctgaatcttgaaaaaacaacggatttgatgcgtctgcaaattacttccgcccggttttctgttacagatgcccaaaaacgggtagagatggcccggaatgccctgtcgcaggcaaaggaaaacctgaaaatcagcaatgaccagtatcaggtgggtatggaaaacctcactgccttgctggaagcacaggcacagtggcaagaaacctggagccagtggatcgatgcgaaagccttgttacacctgagtgtatcccaatacctgaaagcgattggaaagttggactgaagataaattcgaagactacttatgaaaattttgatttgatttttctttttgaatttattatctttgttttattaattataaattttattaaatgaaaagaagactaatgttatttgtgtttcagtgttaattatgggaattggtattattggaagtaattagagtgtgaatgagcatactgctgactttttagcttttgctaatatggaggcattagctcgtggggaatctggaagtgggatcacttgttggaggactgtttcgatgaatggggctggtaggcctgctcattacacttattgtggaagttgtgatgctgtattggcccgggaggttgctgataaagattattgtcctcgttgattttaaggggtgtcaaatttttttgatcaccccctcatttatttgtatctctatgagaaatctgttttgtctgtttttgggtgtggtgctggccatagcttgtacgcataaagagttttattcttttacaaatgagaagaatttagaaatgatatcggttaagatcgacgagattcttttggccgattttatgataaagaaagggaattatttgttcatgatcagtacccgatcggattctatggtttatttgtatgctttacctgatttgcagtactgtaaaagttttgggataaaaggaaaaggtcccggtgagtttatcttgcctatgtttgtagaagctccgggaaatgatgtttatatatggggatattccgacgttagattgattcgttgtttttcagtagattctaatgcacatattactgtaaagcaagattatcatttggataaatacgaaacttttaattttatgcatttgatccgggattctatatgtgtatatagtttaatgcctacacag

SEQ ID NO: 6015 - DNA, 33959 bp, Unknown
  gut microbiota DNA sequence
ctttggtaaaattatacgatttgaaaaatgggaaaaatatgggggaattgaaaattggatctaaaaatagggtaaattcctatttgtccgatggagatggggtgatggctgccaatgattcggtgattattgtcgcttatcattataaaaagcagatcgatatttatgatgtcagtactttgaaactgaaaaagcgattgatcggggattaccgccctcaaaaattaacagacgattttacagaaaataaatatcattatgtagatatagttgccggaaagaaaagattctatgctctataccggggatgcagaaataaagatgccaaagaaaatagtgatattctggagtctttcgattatgatggaaatcctgttattaaatataaattcaatgatttaagtcccgatattttttatgtagatgatgaagctgctgttttatatggttataagtccgcatacccggacttaatgctaaaatatgaattagaagaaagacttccgacttatcaggtcgatattgatgaaaaacaaagctttcgttccgtgtgccgaaactgacgtttggcgattactggttggaactgcccacgcgcttcagtaaagggcagttgacttatttactatatggcaaagaactgtcttcctcaggctcttacctgaagctgtgggtgaaaaaacgattaaaaataagttttgacggcaaaaagaaactggagaatttcgatgtcctgggacatgtcaataagttctgtcggctcaaaattagcaattatttatgaagggggtactttaaacctaaccggatgtatggatagctgagttacccgctcggaatagttttctgtaagaaattgattttaaatctgattctaatataagagatcaggaaaccttctttcattgaaatttatggttttcagctccggtttagcttgccatgcaatgataacaccgcagacgaataggtacaaaaatctcctgcagagttctgtatttgaggaggataaatagaacatctgcaggagatattttaatttgaaatccgatgttttattttacgggaaattccggtattgccgggacttctttcttttcggttttcagtttttccaggatcacttcgatggctttgttcaattgttggtcttcgccgttgaactccaggtaaggatcgttttccaacagaatatccggatctaccccgtgaccttcgatgataaagccgctaccgtcagctgcaaaaggagcataggagggggtgacgatagaacctccgtcgactaccggaatggtgccgctgtaaccgactactcctccccatgtccggtggccgatgaccgtacccagtttattgaatttaaaacgataggggaacaggtctccgtcggatgccgagtattcgtttaccaataacactttcggtccgaggaaagtgcctaccggacttaccgaacccgaagtctggttggtatgcatcgtataaaaatgaggggtacgcatcaggcgctcggtaatcatcggagatacatttccaccgccattgccccgatcgtcgatgatcagggcttttttacccaattgcgggtaataatgcttgacgaattcgttcagcccgtcgacacccatgtccggaatatggatgtaacctacttctccgttggtggcttcactcactttcctgatgttattttgtacccaattgtaataataaagttgcgattcgtcgctgagtggggttactaatacctggcgggctcctgctgtttcaggccgggtattcactgtgagttctaccgttttgccagctttgccgatcagttcgctaaagagattctcggtttctttcagcgatttgccgttgatggccaaaatataatgaccttcttttacctccacgccgggcatagtcaggggcgaacgggtcgcttcgttccagttggctccttctatgattttggtcactttaaaataacccgaaggatcttttttgaaacgggcgcctaacaagcccatcgggattcttgcgggtgtcggatgttcaccgttggcagaataagcatggccgacactcagttctccgatcatttctccgatgacataagtgaggtctgtccggtgattgacatgaggaatcaggactttgtatttttcatacactccttgccaatctactccatgcatatttttagcgtagaagaaatctcgcatttgccgccaactttcattgtagatttgcatccattcctgatgatagtcgatgtattttttcaggtccgaagtagaaatcgggtgatttacacttaccggggcattagggatgtcgatgacctgaaaagccctgcctgattgtgcaattgctttttcataacccggaccgaaaatgatccggctattcagatctgtttccttccggtctttcaggttatatatactggtattaccataacggttgaaataaacctgattaccgatcatatgcagatcgtggtaatttcctgctgagactggtagttcgataatccggttggcgatattcgtatagtcgtattcatttttcggatgctctttcgttgcttcggatttcttggtctccctggtgggcggtgtttgttggggagctttcggattgtcgttttccggagcaaagggaatggtggcatcttgggtaagaggcaaaatgtatattttattcatattgttgtacacatggttccattccgtactactgtaggtcgggttgaaggtacgggcagatacgaaaaccaggtatttaccgtctttactgaaattcggtgaactgacattataccaaccgtcggtcatttgatgtttttctttgctattccggtcataaatgatgatgttatccatctctttttccggttggatgtaggtgatataccggctatcttgtgaccagttgaacgagttgatcggtccgacaccggaactggcgataacttcggttttcccatcgcttacctgagtcagattaagggtattctttttttcactccaaagaatggagcgggaatcgggagcccatttcagatcgaagatataggttttcaaatctttcgtcagcattttttcttctccggtaaaagcatctctcagccagatattgaattctccgtttttgtccgagatataggcgatccattttccatccggcgaccattgcggattgcggtcgttggcatttgaggaattggtcagattataggtaataccggattttgccggtagggtgaaaatatctccccgggcggcgacgacaacccgttctccgttaggggcaacgtccattctgctgatttgtccgctgacatccttccattccggtcgcgcccaattttggtcgttatcgatctcgacaggaatcggggaagccttttcggtccgggtgtcgaatttatagaggataccgccttgttcatatacgatctgatctcctcccagggctgggaatttgatgtcgtagtctttgttgaaggttaattggcgggtagtcttatccgataagttataaacatagagattcatgatgtcgtcccggtcggaaatgaagtatattttattcccgtctgcggaccacatgggaatgatatcctggcggatttcgtctgttattttctgtgattggtgtgtgtcgaaatcataaatccgaatgtcgtcggccatacctccctgatatcttttccaggtacggaattctctgaatacataattgtaagccagttttttcccatccggggaataagatgcgaagcctccgtttttgagggggatttcgacagcttctcctccctcggcgggaacagtcattaattgtccggtaaagtcgttgaaagtgaattgccgggtgcggaacaggatatgtttgctgtccggggtccagccgatgacgatgttgttagggcccatccggtcgcctaaatcatcccggttcagggttgcggtataggtcagacgccggggaataccacctgccgaagggatcacaaatacttctgtatttccgtcgtattgcccggtgaatgcaatgtattttccatccggtgaaatacgtggaaacatttcgtatccgatatccgaagttaatttgcgggctgttcctccttgatcgcttaccgtgtataaatcgccggcatacgaaaaaacgatctgtttaccgttgatatggggaaagcggattaaacgtgcttcttctgctttgccgatcgatacgatcagaaaacaaatgaatgtgaatataaaagttctcatgtgtgatgaattataggtttgaacacaaagataacaatgaatatttaatataaagaaataaaaactgcagagtcataataaataattacaaagagaaaaaaaagcttggtgagaatatccctgtaattttatgctctgcagaaaacgaaaggttcgttttttggtcggtttacgacttgggagggtcaaccgacaaatcctatgattatgatcgttcgataactaaatttttgttgtatccgtagaatggtttataacctgacaaaggtaaggtgaaatctatttttttttgaatatcggtttcggacattgtggtggacaaatagagaaataatgtttagttaaataattgataaatatgtgtttaatgtttttaaaatgggtggacactccatttcaatttgttttttgtctacccaattttaatctttttatcggttagaaaatccagtttataaatttttcagaaactcatccagatcgatttctttttgaagtttcgtcgagattttatgcgccagtcggttttttctctttcgcagggcttcggggcttgcgtggaaaatggtggtcatgtctgtcatcctccactggtggtgaatcatactggctaataataattcgtctgtattacattcgggaaacatgcgttgaaaccggatactgaagttaccgtcaaaattcgtcaaccggtagattagtcgcccggaagaatttgctttttgctggattaaagcttcgtaaagtcttttgtaactttccgaagataaatgatggaggcttttttcccgatttagcaggcgttccagttcatcataggcaatatgattttcggtgatgaattcttttgtcatcataaaactccattcccggtgtttgattgtttcggataatttttcatactggactttcaatttccggtggcggaagtaaaggaaaagagagataagggaaaaagtaaataggcaaatgatgatgagtaacaggatttgcgagtagtttatcatcggggtatgggagatgccggatgaattccggactgaaaggagggtgtctttcaatcggagggtttcgtctttccaataaagggcttcggcataatttccatgttgtattccgatattggcttgggtttgacaatagctgatgagacggcagatcgaatcctgagttaccggtgtagatcgcttgtctagccatgaagacgggttaggggtgtgggttgcacatgaaattatcagtgtcagtataaaagtgagaaagataggtttgctcatgcgactccgtattttgtttgcaaacatatactatctttaacggattatcaatgtttttccggttcacttttttaaagacaataatttttaagcaaaatacacaactttctaggttaactatttttcttttatgattctgcttcctgaataattatgtgaattttcgatttgtggattcccttttataaccaagcgggaatgcccgtataaatcataggtcaaccgttggtttacttgtatctcggctttggctccgatggataattggatgtccgcattttgagtttccaattcccgggcttccagacgggctgctgttttcaaaatggcttgtaagttttgggcttctcctttgatctccaggattccggaggtgcgtgcctctgcctgaatatcttcggcttttagtctgatccggatctggcctccggttgttgcttccagacggattgtccggaggttccagatttgaggccaggcatctattctggaatggttggaggctttcagactcccgagggtcggcatactgatcaatacattcatcgaagcgtatttgacgatatttacgctgtccggaatataaatttttaataccttgtttttgaccgtagttttaatataagaaaacaggttatcgtcagcctctacggtgatcggttccatttctccccggacgatagcgacatcgattccccgggaaatttcgatactggtgaaatctgctgtttcacgctgttgtgtcaggacatatcccgaaccttttacatttttctgcccccagacagcagaaatagtcagatagaaaactaaaagtaataatcccggtcgtttataaattttcatagcgttgaatttttctctgtttaacgcttttatccggatccgggttcggtgagaataaaaaaactgccgttgccggcagtctctcaagtttgtggtatagatagtagtaattggttataagtttatccggcattgataaatttcttcaccagtgcctgaatattttcaggatggttactgatgtcttgccgtaaggttttatcgtgatatgaatttagtttgtcgatcattccatcgattaagctggcactgaaaacgccctgagcttcatatatggctctttggttagcgaggcattcggccgattctgcacaagaagtcggtagatggctcaatcgttctgctatatgcttatgggcatcgtcgaaaatgttgacattgacataccgttcctctgcatatgggagggcatcgggcatttcgaaaccatgccgtgcggctactgcaagtccggctaataacaaatacacatcggccgatccgtccggacaacgaaattctatggtttgtttagtactcaggtctgcatggcctgcttgctcgagaggattggcatcggtgatcatttcattggctccctgtgtccaacccagaggtacacgtaccagcaccgaacggttacggtcgccccagcagatattggtcggagcttcctgatgcggtaccagacgaaaataagatgtcggatttgtattaccgaaagctgtcaaagaaggagctatttccaatataccggcaatagcttttttggccgcttccgtaagttgaccgttttcgatatacatgttttttccttctttcatcagacgggtatggatatgtaatccgcttccggcttttcctgtcgtgatcttgggtgcgaaggtcaggtctaccccatattgataagcaagtgtccggagtatccatttggcgataaccaactggtcggcagcttcttctatatcgaccggcaaaaattcgatctcattctgttcgtattgcaagttaccgatcgtgaaattcccgacttcagaatggccgtatttgatttgtcctcccgcttgtgcgatggcacgcattgcttcctttcggagattggcccatttgcagaaaggcatagattcatggtatcctcgctgatccggtgtctcgaataagtcttctttctcgctgatgacataatattccagttcccccatagcctgaaattccataccggtaactttcttaaactcttcgtgtgccttgcgaagggtatactccggagcgctctccaaaggtttaccgtctttcgtatagtaactgcaaagaatgtctagtgcaggaatatcactgaaagggttcaaaaaggcagtccggtaacggggtatcacgtataaatcgcttgaaccggcctgtatataaggaaataaactggatccatccacccgttcaccataggtcagaatgctatccaggtgttccaggctgttaataatgaagttcagtgttttcaatcgtccgtctgctccggcataacgaaaattgatcatttcaatatcgtttttcgtcacatatcgaataatatccgctttggtgaactctttttgaggcttattcaagaatttcaccagtggattgggattaagtatcgtatttccttccataaatcctttgttaacagttacggagcaaaactatgaaaatttttctaaatcgagaacgtttgcgtaacaaattataagttaaaattcttttatttttaggtattgttagtttttgtcgctcttcttctcggcaaatgacggaaaaaaaaagaaggtataaatctgatttgtggataattatgcatttattttaaataataattcgattatattcaagtgtttttccgggatggtgatgaaataattgcataaatatttgtttataataaatatttatgcatatctttgtcctgttgtttgaatgaagaggttcgttcaggcacaatttagaaatatcaatataaatcattaaaattttcaggtgagatgaaaatagatgttatggttgcttcggtcgggcatttgaagtatgtaaaagtaataaacgataccattgatgaggctgcaaaagcccgggggacgggtattgcacgaagaaccgacgaatacatcgccgataaaatcaatcagggaaaagcgattattgctctaaaccgggaagagtttgtaggattttgttatatcgaatcctggggacatgaaaagtttgtggctaattcaggattgattgtaaagccgtcttaccggggaatgggagtcgctaagcggatcaaaaaagctgctttcgatttgtccagaaaaaagttcccccatgcaaaattattcggtttgacgaccggtgaacaagtgatgcgtatcaataccgaattgggatatgtaccggtgacctttgctaaactgacggacgacgaacagttttgggcgggatgtaaatcctgtgtcaattatgatatcctgctccggacgaatatgacgaaatgcttgtgtaccggtatggtgtacgatcccgaagttgctgcaaaaagagaagcggataaaaagctggaagagaaaaaacaaagcaacggaattgtaaaattgttgaaaaaagtgatttaatagtcaggataaaaccatgaaagaaaaagtagtactggcctatagcggaggattggatacctcttattgtgtaaaatacctgagtgaagaattgggcctggaagtatataccgctttggcaaataccggaggatttaccgaagccgagctgaaaactgtcgaaaaaaaagcttatgcattgggggcgaaggaacatgttaacctggatgtgacagaggattattatgagaagtgtatccgttatatggtgttcggtaatgttttgcggaataaaacctaccctgtatcggtgagctccgaacggactttccaggcattggctatcgtgaactatgcaaaaaaagtgggagcacaatatatcgctcacgggagtacaggagcaggaaacgatcaagtgcgtttcgatttgtgttttgctgtttttgccccggagatgaaagtaattactcctacacgcgatctgagactttcccgggaaacggagatcgggtacctgaaagcccatggtgtccattccgattggaagaaaatggaatattcggtaaacaaaggtatatggggaacttctgtcgggggaaaagaaactttacattccaatacgaatttaccggataaggcttatccttctcctctcgtgaaagaaggttgtgaatcacttgagctggaattcgggcagggagagatcgtaggagtaaacggggagaaaatttcccggatcgctgccattcgtaaaatagaagagatcggtgccgcctgggcgatcggtagggatacccatgtgggagataccctggtcgggattaaaggacgggtagggtttgaggctgctgctccgatgctgatcattaaagcacacgaattgctcgaaaaacatacactgacgaaatggcaacaatattggaaagaacaactgggtaattggtacgggatgttcctccacgaagcgatgtactcagagcctgtgatgagggatattgaaagatttttagaaaatagtcagcaaaaagtaagcggcaaagtattcattcgccttcggccttatcatttcgatctgatcggtatcgagtcggaatatgatctcatgaattcgggatttgccgagtatggtgaaatgaataaggcctggacagcagacgatgtgaaaggctttactaaaatattgtcgatgcctttgcggatatacaatgtagtaaatggattataaccctgaaaataaattgcaatgagagtaggaattgccggagctgccggttatacagcgggggaattgatccggatactgatcggtcaccccggagcagaactcagatatattcagagtgaatcccaccagggattgccggtatataaagtacatcaagatttgttgtattcccggcttgttttctcggatatcgatttttcagatattgacgtactctttctctgtatgggacatggggtgtcgggaaaatttctgaatgttcatccgatccctgcaaatgtgaagattatcgaccttgggaatgattttcgtttggaaaaggagtccaacggttttatttatggcctgcctgagttgtcccgtgaagagattagaaaggggcgatatgtagctaacccgggatgtttcgctacagccatcgagctgggacttattccgttggcttcgatcgggcgcttaccggaagagattactgttgtggggattaccggatcgaccggtgccggccaaaagccgacagcagatactcatttcagtaatcgttgtaataatctctccaattataaggttttcacccaccggcatttggatgaaatccgggagactttggtgagagcaggagcaaaaggcttccccgatttggcttttgtaccggtgagggggtgccatacccgggggatactggtcaatacggtgattcgtacggatattacgatcgaaagcattacagccctttataaagcttattataatacacatccttttgtatatgtctctgacgaaccgttgtatctgaaacaagtagtgaatacgaactactgctatattcatatctctaagcaaggcgaacaaatgctgatcacttcagtgatcgacaacctgctgaagggggcttccggccaggcagttcaaaatatgaacttgctttttggcctggaagaaacaaccggtctccgtctgaaggccaactatttttgactgaaagcctggaagcgatgtttctttcagctttttacctttaccttttttattatgggattattcgaagtttatagtttattggatttggaaccggtaaaagccaaaggagcttacctctgggataaaaatggggataaatatcttgatttttatggaggacatgccgtgatttccatcggtcacagccatccggtatatgtggagaaaatgactcgccagctgaatcggatcggtttttattcgaatgcggtgaggaatcctttacaggatgaattggctttgctattgggaaaagtttccggttatccggaatacaacttattcctttgcaatagtggagccgaagcgaacgaaaatgcgttgaagctggcctctttcattacagaccggtccaaaatactggctatgagagctgcgtttcacggtaggacgagtgtggcggtggcggtgacggataatccggccattcaagcacccttgaaccgatgtcatgaggtgacttttattggattgaacgatcggaaggcattggaaagcgagctggagaccggtgcttatgctgctgtgattgtcgaaggtatacagggagtcggtggtatacaaatgcccgataccggtttcttgcagtcgatgcgcgaactttgcacctctacaggtactctgatgattgtagacgaagtacaatccggatatgggcgtacaggtaaattcttcgctcatcagcatgccggtgttttaccggatatcatcacgatggctaaagggatgggcaacggctttccgataggtggtttgttgatttcgcctaagattaaagcccgtaaaggaatgctcgggactactttcggcggaaatcatctggcttgtgccgctgctctggcagtattggaggttatacaacaagaatatttggtcaataatgctgccggcttggggaaatatctgattcaggaattgaagaatatgccgggggtgaaggaagtacggggaaaaggcttgatgataggagtagacgtgaaaatttcacaggaagaggtccggaagagattgatctccgaacaccggataatgacaggatatagtggaaattatacccttcgtttacttccgcctttgatcattacccggaaagaagtggatgaatttttgaaggctttccggcaaacgatggacaatgggatggctcggttacaggagaaggtcggcgagacctgtagtcgctgatcggtacctggcagcctggtgtcttcggggtacggatcactttataaacttaataaattctttatgatcagaataataaaaatcggtggtaaactgatcgagaacgatgctgtattgaacggtttgtgtgatgaattatccgcctgctaccgggatagtgtattggtacatggagggggaagtatggccggacaattgtctgcgcgtttggggatcaggacccgtatgatcgatggccggcggattaccgaccgggaaaccctggaggttgccgtgatggcctatgccggatgggcgaataaaaaactggtcgcagctttacaggtacggaatgtgaatgcctgcggcctgtcaggatgtgaccaaaaagtgattctggcacataagcgggaggtgaaagaaatcgattggggatttgtcggagatatcgatcgcgtggataccggggttttggccggtctgttgcatcggcaggtgatgccggtcatttctccgattacatacgatggagcgggacaactcttaaataccaatgccgatagtgttgccggagctgtggcggttgctctgagtcggatcgatgataccgaattgatattttgtttcgataaacccggcgtattgctggatgtaaacgatgcggattcggtgatcccggtgctcgataaagaaaagtatgccggatatttggaacaaggagcgattcatgcagggatgatccctaaactcgataatgcttttaaaactataaaggccggagtaaaatcggtgcgtttgacggatccctgccatttggacgggggaacggttttaagataaaagacgaaatatggagaccatagaacttttaaagaaaatgatttctattccttcgttcagcgggaatgaagaacgggtagccgatttgatggtagctacgtgggtagaacatggatattccgcagaacgaagtggaaataacgtatgggtaaaatcccggaatttcgatccggtaaaaccgacgattctgctggatgctcatttggataccgttcggccgaatggaaactgggagaaagatccgtttactgccgtagtggaagatggaaaattatacggcttggggagtaacgataccggtggtagtgtagttgccatgatggccgcttttctacaattggcagaaaagaaacaggcctataatctggtttgtctcgagtcggcagaggaggagaataccggaaaaaatggcatacagcgtattgtcggcaacttaggtaaaatcgatttggccctgatcggtgagcccacaggcatgcaggcagctattgctgaaaaaggtttgatggtcgtcgattgtgtcgcgaaaggaaaatccggacatgcggcaagaaatgaaggactgaatgctatttacgaagcgatatccgatatcgaatggttcaggtcctaccgcttcgggaaggaatctcctttattaggtaaagtaaaaatgactgtgaccggaatcgaagccggaaccttacacaatgttgtaccggctgaatgccggtttatggtagacatccgggtaaatgaatattatacgaattccgatatttacgagacgattcgcagaaatgtgaaaagtgaagtccggccccgttctttttctctcaactcttcggctattcctatcgatcacccgatcgtattgcggtgtaaggatttaggcttgaaaacctacggatcgcctacaacttccaatcaggccgttatcccttatccgtcgctgaagatcggaccgggggacagtgcccgtagccatacggccgatgaatatatcggattggatgaaatagaggaaggaatcatgctctttgttaaattgttggatggcttttgtttttaagcctatgtataatcggtcggttaccctactggtatcctccggaaaatgatctgggagggaggctgacaggggatcgttaaaattaaaatgatactcatatgaaactttgggataaaggatacgacatcgatcgtttcaccgaagaatttacgatcggtaaagatagagagttggatgtaatgttggcgaaagccgatgtattaggtaatatggctcatttaaaaatgctgcatcatatcgggctgatttccgatggtgaattgaaagatttggcgcaagggttgaaagatatcttcgctgaaatagaacagggaaaatttcatatagaggcggggatagaggacatccattcgcaaatagaatgcctcctcacccgaaagtgtggggaagccggtaaaaagattcatacagggcgttcccgtaatgatcaggtactgaccgatctgaaactgtttacccgtactgccttgatcgatgtgctgcaacaggtgacctccttgtttcatttgcttatggaaaaggcagaagccaacaaagatattctgatgccggggtatacccatctgcaaatcgctatgccttcttcattcggcatgtggtttagcgcttatgcggagtctttggcagacgacctgttgatgttgaaagctgcttacgatatggtcaataccaatcccttgggatcgggagccggttatggttcttctgtacctttaaaccggacgatgacgacccggttattgggattcggcgatctggcttataattcagtttacgcccagatgcaaagagggaaaatggagaaaaatgtactctttgctttggctactgttgcgacgacactggggaaactggctgcagacgtgtgtttgtttgcttgtggaaattttggttttctcagacttcccgatcggtttaccaccggttccagtattatgcctcataagaaaaacccggatatcttcgagttgatccgggcgaagaccaaccggattcagtctctgcctacacagatggctatgctttgtgcgaacctgacttccgggtatttcagggatatgcagttgagtaaggagatatatttgccggcatttaaagaactgaccgattgtctgtttatgacagagatggtgttgaaagaaatcgaattgaatccgctgattcttcaggataaaaaatacagttatctctttacggttgaagaagtaaatgacagagtcgctgcggggattccttttcgcgaagcttaccggatggtcgctgaaaaagtgcagctcggagaatataggggggatacttcccggcctttacatcatacccatgaaggaagtatcggcaatctgtgtttgcagcagattcgggagaaatttgaacgccatagttcggaatggaagccggagcaggtgtggcgggcagaagcagaattaatggaatagttccacacttttccacactgttggggaatcgattccccattttttgaaatatatcgtttgggataatgatttgatttttaggcttttgtatccgctctggccattgctgttttttgtggcatatatttttcttgtcttctatataaaacagaaaaaactttaaaagacaaggagcatgaaaaatataaagagaacattatggatcgctattgtggttggggcgtttacattatctgcatttgccgtagatctggtccctacttcagaatccttactccagaaagtggaaaaaaagaacgaagtacggacagaattgccccaggctgtcaagtcggctgtgatttcaaaatatgtcgcttacgctattgaacagttttcttttgaagagaattcggtctataaactgattctgaaaggcgatcgcaataaattgatcgtttattacacggcggatggggaatatctgagtcaggaaaccgttaaaaccgtacaaatggttgccttgatatagtttctgatacctaaaatgtaggtttattctattccgattccgggttttgtgccgtcagattggttcgtttggaacggtcaggttaggctttccttcactgaccggcggaactcgcttcgctcagacaccaccggtcgggcgttcggaaaacctaacctgaccctcgttcctgctccaatggtcttccgccacaaaaccctgcatctcacgttaacacgacctggcaaaggaagaattagaaaaattttatagaataaaataccggctcacctctatcggattatggataattgggttactttaccggaaaatcttttttcgctgaaatttatggttttcaggttcggtttagcttgccaggcagtgataacgtcagtcggaggtgttcgtgttcggggaccattggagctccggcgagtgtcgtcttgctttttctgaacgaccgaccggtggtgtctgacggaaacgtaacgtaaagttttttgcgcagtgaggagttccgccggtcagtgaaagaaaaaggtagatgaccgacagaagcgaccgcgtccccgaacacgaataccgaagacgaacaaggaccggaataattctaccttttaagtaggtaccaagatttcaataggtacaagaaatacattacatcggtcaaagtagattcgctttggccagttcccaaatatttctcacgctatcccggtcatacttccggtagggttctccgaaccgttcctccactttcttcaattcttcccaatccaccaaacaagcatgcttcttatgtttttcgtccttattcaccgaaacaaagtcgggaatatcgctcaaatgccagacatcccactcgtgaacaaacaaggtggcattccaatgcaggtgttctcctttggccaaattttcaaaccgctcgtttcccaaagcctttacatattcctcttcagtagaccattgtgcaaaatcctgaggcgtaagcccggctaattgcaacttggtataaatatgggaggcagccgaaatattggtcatctttttaatcggcgacaacgcttgccaaggcacctgtttctccacagctttctgtgcattgtaataggcatggatcttccgggcagtcatctcccgactctcattgatgataatatcttcagtgtaaatattgtcgttactgccatataaacaaatttctttaaaacattccttcgcttgctgaatataactgtaatctcttgtattatagacatctgtcaaaattttaatctgatcgttatcggtttcccttgaaatgaaatgcgacaattcgaccgcagtctttatattcaattcatcttctcccaaagcgaccagaatgtatttcaacccggccaacttatctttcaacaaattgaaaaactcactactattcacttccgcctcgtgatattcgagctgataattctttaagcccggataataatgttcgaaaagacccgccttgcatttcatctctttatcgataatcgtagcccggaaagtcgatccgacaaactgcccctgttctatcattgctttcaatgcctcactccccatattcccaaatccgataatcagcatactgaaatcagacaaagcgacagctttagaagtttccagtttcagggcattcacaggaggataattcgtgatcaattcctgagccgccaacttagaccggttaaaaatatgtacttcgacattcaaaggaccgattttttctgcaaaaagatcgatcagttcttccgaatcggcattcacataaagccttaattccttgggtaataactgcaatcgccggatttccccgatcactttcagggacatgtgaatattataatcttcattctcggacaagaaaaacatccggcaaaccgatttatcgaccaatttggaaatctttaattcgtcgaaagcaacctcttcagaaaaatcttttttcaggaacaccgcctctgttttactgattttttcaaataaagattctttatcccggagacggggtaaggacaaatttatttttgggaaagccaccaatttgtgttttacattcttatcgataaaaagaataaaacgcttcctgtcttttttcagtaaatcttccgccaaagctacagctccttcgttcaaatcgaaaaagatataactgtctttcggggtagagagttttaatttcagccaggacaggaattgtttgccgaacaattgcaaaacgaccagaaagctgaccaaaaatgccgcaaagtgaataatagaaaaagcgaacatataagtcgcgtttgtatgcatatgatgcctgacttcgagtaaatccgaatgcaggaaaaacatgtgaaacgtggacaaaaaagaacggaccaccaaggttatcagcgattctttcgtcccagcttcccaataaccgatgcaataaattacaaatcctgccagggcagtcagtggaatcaagccccaatccctgaacttgtaaaacgatcgtttatccttcaccaaccacagacaacacaaaaacaacacaacgataaatcctgccattttcaggatttcaaaaatcaaattctccatcatatcaaccatttaattattcctctttcaacatcagttcactttattggcttgttccacaaatactacaataaatcagagcgcccgaaagcgctctgtacacttttttaccccactgtaagagctttcctaaaactacagtttagctccgcatccgctacaaaagagagcttcagcaggcatcgatttaccacattgggtacaaaattttcctcctgccggagcagcggtgttattgttcgtattccggtaagcttcgcgggcaatggtatcggcagcaatcatcatcactttatcgtccatttttgcctgggcaatcatcccggaaatctgggtaatcaataccggccagaacaaaaacatagaaatcaaagtcggaaccgcctgttgtccgaaaatcccgactccggcatcgacccgaatctgttcgtttgccggataaatatggactttcaatgcagttttcattcccaatacagctttaaacatattccctttcgtaatcgagatatcatacccaccgctaatcagatcctgagcctgcacctggtaaccctcattagtaaaagtcccggttatatctttaactatagccggaataatctccggtgaagcaaaaaatgtctttgttgatttaaacgttcccatagcctagcttttaaagttttaaatcctgaatttccttgtactgatggatagcatacaatacactcatttctgccaaaagattctctacctcactcaattgaccgggcgaaagagtctgttccaatttttttaataaattaaccaccagattagcctgatttgtcagctcgtcgtctgttacgatctgatcttccattattttcctgaatgtcggccgctgagcgaccaattcatcgatgttcagtattccttctttatcaaacaacatattcttttattttaatttgaaaccacaatgtttacaataaatccaatccttttctaaaggctttccacagttagggcaaatcagtccgtcttgttccaattttatatttttcaatattcgctgacattgttctgttttaccccatttcagaatctcacgtacccgaattgccgtaaaaggatgagaagctcctaaaatagcataattctgtaacaatttatcccaagtattgttttgcagcgtatcataataatcggcttgttttacaaactcttcgacattcacattttgagtaatctcccgcggaccaccggctagccgaagctgtacttcgaccactttctctatactccctaaagcgacagcacctgcacgatctgccgacagttcacttcgcctgctccagtattgcaaagcccaatacaccggcatcactgcatttcccagtattcccatacgttctatattcctgagtaaagtcgaagccagggtatggtaaagcatgtgccggcaagcgatatgtccgcattcgtgggctataaccgaagagacttcttcatcggtgaggtattccagcaatcccgaagtcacagtcaccatcgtccgggtatcccccatcgcataagcattcggataaggatccatttcgagataaaactcaggttctgaaattgagagcctttgacaaatcggaggcaatttctgataaatttcaggcagctgagtcggtgaaagccgaattttattcgccatattcataccgtgcacaatctgctcgtcataataacgcataaacaatttcatcgctgctgcaaacccagggatagcttccatattccggcgtgcagcttcatcttccggatgaatataatcagcaggtcttaccataacttaacttattattttatactaatcatataatatttcgaatctttccaactatcgataaaacgatccaaaggataataccggacaggctcttccatcgcaacatcgtagacttcgacccgaggcggttccgaataatctatgttacgaacgaggactacgtgatcgggtatttccccaatccagcgatcctcgaattcctcctgttcaagattcccgctcagctcaccaccatcgacacaagcaatgacatcgtgcccttgttctaactcccggaacaattcgtttatctcccggcagaagcgtctctccaccttcaatccgaaactctcgaccaattttccgatatatttcaaaggagtccctttctcctcctcataccaatgctgcttcagcgcaatctgtatcagttcctcttccgtcacctctttccctcgcttttgtaatacagcaagttcagaacgaatcacacacagattccgacaagacgatgcagcaaaaaacaccggaatatcgagactattgcaagccacctcgaaagcctctctctcttgtccgtcatgctgcaggacctgccatattttcagattctcctcaggagtagtattcccatccagataagcagccaaaagctcatccgataaagagtccagacgatcaaacataatgttcctcctctcttattactgctattaactgttttacagcccgatgccggatgttatacaaattttccacagttacattcatttcccgggctaacactttcgggtcgaggtcctttaactccaaatcgaccaacacctgacgatatcgttcattattcattttacgaatagcattccagacgtccatcttactgatcagttccggtaaaaaatcaaaaactttctcttcttcttttattggagccgattgattccgataatccatcagtaccccttttcttttttgaaaaaaacgtacagcaacaaccgtcaaccaggtcgtcagtttactccggaaatcgaactgccgaagtttataccaattatccgattgcaaataaagatacaactcgttgatcagctcgtttttatcgagttgacaaggacaaaaccgatgcagtatataattgaacatcggcgtacatttatcaaaaaacaaataacggacaatctcttcatcaccgataagtaaccgatcgactaattccctatcactaatcagtgcgtaatctttttcctccatatcccattaatcaccataaaaaatactccttatagcacaatttgttttagtattgcaaatataaacattcgttcatttttccaaaattttaattttgtaaatatctgatttttcttctcccgaagcgatgatttttttctaacaaatatttgtttcaccgaaaataagcattaaatttgcgacctgaaaattttcctcaggggtacaataagcggttcataacccaccccatggtattaacattaaaacaacaaaacaaatgtacgctattgttgaaattgcaggacagcaatttaaagtagaaaaagaccgtaaggtttatgttcacagactggcagccgaagaaggcgctcagatagaattcgacagtgttcttttagtggacaatgacggtcaggttaagatcggtacaccgaaagtagaaggcgcaaaagttaccgcaaaagtattgagccacctgaaaggggataaagtgatcatcttcaaaaagaaaagaagaaaaactttcgaaagaaagaacggtcaccgtcaatatctgactcagattcaaatcgaatctatcaacgcttaagctctgtagagtgattttattattttgtaacttctaaattattaatacgatatggcacataagaaaggagtcggtagttcaaagaacggccgtgaatcagaaagcaaacgattaggagtaaaaatctggggtggacaatttgctaaagcaggaaatatcctggttcgccaaagaggtactgtacataatccgggtgaaaacgtaggtatcggtaaagatcatactttattcgctctgatcgacggaacagttgttttcagaaagaaaagaaacaacaaatcgttcgtttcagtggaagctgccgcagaataaactgaaaagatatgaaatattaaactcctgtattctgcccggatacaggagttttttttataattttacccttcgaaaataaggaatgagtaacgatagaaggtggaacgattaacagtcagcttacccttgaatacattgtccgtctgaaatcgtaaatctaaaatattcaaattatgttgaatctgaaatttatccaggaaaataaagaaaccgtcatagagcgcctggctgtaaaaaattttgatgcccgtgaatccgttgaaaaaatcatcgctctcgacaaccagcgaaaatccttacaacaggaggcagaagccaaacaggctcaaatgaatatcatcgccaaagaaatcggtaaactgatgcaatcgggacaaaaagaagccgcagaaaaagcccgccaggaaacggccgatctgaaatcagctattgcgggattgaatagccggcgcaccgaagtcagcaacgaattaaccgacattttgctccgcctgcccaatatgccccatgcctctgtggctaaaggaaagtctgaagcagacaatgagatcgttaaaattgtcgacaacataccccaaaagcatgaaaacgatctgccccattgggaacttgccaggaaatatgatttgatcgatttcgaaaccggtgtaaaaatcaccggtgccggttttcccctgtataaaggcctgggagcacgactgcaacgggcattgatcaatttcttcctggatgaaaatatcaaagccggttatcaagaggtacaaccacccctgatggtgaatgccgactctggctacggaaccggacagttaccggacaaagacggtcagatgtactatgtcaacgaagacaatctctatctgatcccgactgccgaagttccggtaaccaacatttaccgcgacgtcattctggacggagaccagctaccggtaaaaaataccgcttattccgcttgtttccgccgggaagccggttcttacggcaaagatgtaagaggattgaaccggttacatcaattcgataaagttgaaattgtccagatcacccgtcccgaagtatcctacgaggccctggaaggtatggtgaaacatgtggagagcctgctgatcaagctaggccttccctatcgcatcgttcgcttatgtggtggagatatcagtttcacctctgccctgactttcgattttgaagtctattccaaagcacaggaaaaatggttggaagtcagctctgtatccaatttcgaggaattccaggccaaccgcttgaaattacggttcaaagacaagggagataagaaaacgacaacctgccatacgctgaacggaagttccctggctcttccccggattgtcgctgccttattggaaaactatcaatgcgaagaaggtatacggctaccggaggtgttgcagacgtttatggggacagagatgataaggtaaaaagtaaagactaaaagtgatggactaaaaaaagccagaggcgatgggttaaaggttaaaaggtattagatgccgaaggcaaagaatgggagctatcttagaagttaaaaatttgacttagaagatagctcctttactttttaaaataggaaatagctgagaaatccgtatctttgtaagcaaatgtatcggggtttatgaaatttattgtcattctttttttgctattcacttctatttatacactggcccaacaaagtgattctcaattggcctatacctattatcaagccaaagaatacgataaagctgccgaaaaatttttgaaattatacgaacgcacacactcggcaaattttctggattattatattatctgcctgattaatggtaaagaatacgacaaagccgaagataccctgaaaaaattactgaaaaccgacgatagcaataaagattttctgatcgacctgggctatatctatcaacaacaagggaaaaccaataaatcggaggaatgttacgggaaagcaatcaaaaaaattattccgcaaaatacagcaatcattaatctggccaataaatttaaaaatatccgggaatatagctgggcgatcaagacttatcagcaaggccggatacttttgaaaaaaccggatgcctttctgaaagaattaggggattgctatctgatggaaagagattacgaacagatgatgcctctctttgtccgcaccctggaactgaacccggggagtatcgacaatattaccgcccagctaagttttgcccgttcgaacgacattgtcaatagtatagacccggtgatcgaaaaaacactgaaatccttatgccagaagacggattatctcccggtttttgatgaattggctgtatggtataatctacaaatccggaattatctcctggcacttcaacatgctgtattattaaataacaagtctgaaaataaactgcatatttttttgaatatagctctcgatgcgataaacaataaagctttcgaccaagccaccatagcttaccaaaagatcctcggcaaaggcaaggagaacaatccgttttaccttccggcccgtaaaggtatattgacttgtcggtatgaacaactccggcaaagtcctgccgaccgttcagactacctgcaaatagccggagattgtgagaaatatatgcaggaattcggttatactccgaccaatatagacattctctctttattggccgagctctatgcctatcgactccaacgaccggattcggccgatcgcttgctcgataaagccatccggatgccaaggttaaattccaacactttgagtcagctgaaatcccaaagagccgatctattgacttttatggacaatccctgggaagcgactatcctatatacccagcttgaaaaggcaaatccgaacaatgacatcgggtatgaggccaaactgaaaaaggcaatgttagcttattatgcaggtgatctcttgtgggcaaaagctcagttcgatgtattgaaaggagcaacaagtaagctgatctctaacgatgctatccaaatgtcccatttcatccatatgaattatgaggcagaaggggataaccgggatttagaaaaaatgggacgcacagaatatctgctttataaacaacagtttcaagaagttctcccccgattggacagcctgatcgggcactgttcgccgggtatctccgattacgccaccctgcaaaaagcccggtcgctctgcgcatgtttccaggatgaagaggctgccaagttactaagcgaattaaaagatcgttcggaacaagtatatatcaaggccgaagctttattccaacttgccggtctgaagagaaaacaaaaagaactgcaacaaacgaaagaattgtatcggttactcgtcaccgattattcgggtagtgtttacagtattgaagcagccaaactctgccgggatctggaagccggagaacaaacagaggtaaataacctttaaaacgaattttatgcgaatcatttacaataccagttttatcatcgatgaagacatcgaaacagcatggatcggttttatccggaagaactatatttccgtacttcagaccaaccgcctttgtgaagatattatcttcaccaaagtatcgatcgatcagcccgaaggtaaaacttattccttacagttggttttcaattccgaagaacaacaaaaccactttttggatgaatggctgccggatatagaaaaaaagattatccaaattttttctaatcggtatttatgctttagtagtatattgacagaaatctaaagttatggaaaaattaattatgggaatcgaccccggtaccaactttatgggatatgcgatcatcaaagtattcggaaaaaaccaaaaaccggaattagtagtatcgggaattgtagatatgattaaaattacagacccttatatcaaacttcagcggatattcagccgtaccctacaagtgatcgatagttatcaaccggatgaactggcgatagaagctcagttttatggaaagaacgttcaatccatgctaaaactcggccgggctcaaggggttgctattgcagctgctctccaaagagatatccccattttcgaatatgctccacggaagattaaaatgagtgttaccggttcgggaaccgcctcaaaagaacaaatcgcccttttactaggtaagtttatgactttacacaccacctcagaaatgctggacgaaacagatgctattgctatcgcttattgtcattatctgcaaagttgtaatccgctgacttcagcagggcatacctgtaaatcctggaacgatttcatcaagaagaatccggataaactagtctgagcaatcttatttttcagctttccggcatattgatctatctcataagatacgaaaggaagaccagcgaacttttacttatcaattacctccatataattaaacagataaagtcatcaaaaaacgtaggttcattttttttctttctattccgattccgggttttataccgtcagaccggctcacctctatcggattatggataattgggttattttatcggaaaatctttttttgctgaaatttatggttttcaggttcggtttagcttgccaggcagtgataacgtaagtcggaggtgttcgtgttcggggaccattggagctccggcgagtgtcgtcttgctttttctgaacgaccgaccggtggtgtctgacgagcctgcgaggagttccgccggtcagtgaaagaaaaagctagatgaccgacagaagcgaccgcgtccccgaacacgaacaccgaagacgagtaagtaacagaataattctacgttttctcaggaacaatggagaaaagaagaacaaactttaattcgctccttctccaattctcaggttgtaagtataaacaccaccgcctaatacgcatttaccatctttattttccagcatgatcaggatacctttgcatgtgattcgatatgcctttttggcattcattttaaataaatggtaaaatcatgtccttaatagacagtttaaaaaaagatattcactatatagaaagcttaaatagttgtatgaactgtggagtttgtacagctatttgcccttctgccgaattttacaattatgatccccgaataatagccgacacagtccaacgccaggacgaagagagtatcgaagggttactgaaatccgatacgatttggtattgcggagaatgtatgtcgtgcaaaacccgttgtccacgctgtaatacacccggcggaatcatcatggcactacgcagattatcacaggaaaaaggatggtttaccgaatctgaaaaaggacgtcaacaatttgccctgaaaagaatattgggaaataacatactgaattacggctattgcgtcactcccgatatcgtgaaaccggaaatgcatccggaacaaggtcctgtctgggaatggatttatgaacaccgcgacgaggtatacgaacgaacacattcgaattacaaacaaacgggagccggcgccttaagaaaagtcgacgacgactcgctcaacgaactgaaacaaatcttcgaagtaaccggaggatcggaattcatggagaatatcgaaacctattccctccaaaaagccgaggaagaagggatggacccggaaagttattttctgcatacttatacggataacaatgggagacatggggggaggtaaaaagcgaaaggctagaagctagaggctagaaagaaagaagggaaaaaagagagaaaaggagaaatacagaaagaggaaaaagaaatgaatctggaaggtaaacaacaaatatggaatgattatcagaaagagattgctgatgatcggtattattatgcgagaagttgtattcgtcagactttttttccagggtccgaatgggcttatctggatatactgaataataaattgggaaaaactgttctcgacgatccgcgacacacgacttgcacaggtatcggttatcattccgatgtcgtaccgatcgagactatcatgaccgtcgtcgcccgtcattttgctttgatgactgaagccggattcgaaaatatgactccctcctgcattacttctttcggtatttatacagaaatcctgcatacctgggagactcatcccgaatgggaagaaaagacccgggaatttttatggaaagcaacgaaacgggaattccaaaagccgaagaacctggcacatacttccgatgtcatctataaattcagaaatgaaattgcagctcagaaaaaatatagtctggtagatatacacaccggacgccctttgcaagtagtcgaccacatcggttgtcattacgctaaaatgtttcccagcaaaggcatcgggggggcagaatttcctgctgtattgtcgggaatggtctccgcttggggaggccaaccggtcgactaccccgaaagacgacactgttgcggattcggtttccggaattacctggtattagccaaccggggattctctgtcgcaaattcgaaaaagaaattcgaatccatgcaaccctatgaaccggactttattattaccaattgcccgggttgtgccatgtttctggacaagtggcaatacaccatcagtgaaatggaaggtaccacttacggtccggatggttacggtatccctgttctgacctatgaagaagtggcggctttggttttaggatacgatccctgggagatcggcctgcaaatgcatcaggtcagcgtcgagcctctattggataaaatgggtatccgatatgatccggaggctaaatataaaaatatccggggtgaggatatgggacatccccagtgtcccacttatctcaaagtctgatctgccccactccattgtaaacaaccgaatatagaatgaaaaacaaataatatgtgtgttatcattataggtgcaggacccgcaggatgtgaggcagcctaccggctggctcaggcaggtgaaacggtagaattgatcgaaaaagaaagcgaaaccggaggaaatctgaataactggtatcaactcttccccgaccggaaacaagcccgtgatctgaatcaaagtctccgccaaaatatacaacgccctgatattcatctccatttgggaaattatccggtcaaaatttcacggacagaaaataataaattcaccctggaactgaacgacggagccttattaaaaggagatgccttattggtaaccagtggcttccgcctatttaacgcccgccggaaagaagaatatgggtatggcatctacgaaaatgtgatcacttccgtagaactggaaaatttcttcatcaatcatcacatagccacctctaccggtcagatccccaaacgaatcggattgattcattgtgtaggctcaagagacgaaaagatttgtaattaccactgttccaaactctgttgcgtaacagcagtcaaacaagccatcgaacttcgtgagatgttgccggaaaccgaaatactatgtttttatatggatatgcgcatgttcggtccgggatatgaagaactctaccgggaagcacaggaaaaatacaacatcaaatttgtacggggacgtttgtcggaagcttctgaaaacagagaaaaacaattgcttattaaagtcgaagatacactggtgggtaaacctttgaagatgaccctcgatctgatggtgctaatggtaggtatggaaccttccgaaggcagtacgcagctcgcttcgatgctcggcctcgacatagctcccaacggctttatccgggtcggagacccccacacgggaaccaaccgaaccaaccggccaggcatttttattgccggatgcagctcctctcccatgaacctgaccgacacactcaccgatgcacgttctgcagcgatcactatcggagaatatctgaaaaataacgaaaacaagcattaatcttcgaagctgaatttctatgaacttttggggtttttcaatatctgaagcgcgggtcatcgattatgataaaaatgataaaagtctggtaacggccatgacgaccgaggttcccagtagcaagctctgtatcggatgcggaggctgttcggccacttgtaccgccggcaatctgaccgaattcaatatccgtaaactgcaaatgctggtgaaacgaggtgagaccaaagaagtcggtgagcacctccaaaaatgtatgttgtgtggaaaatgtctgctggtttgtccccggggagtagatacccggcgcatgatcctaaccatgctcaaatatataaacagcctttagctctttaccttttacttttttactatgtattacgatccttttgtacttcctttcactatcggtctgaatatcctcctgatctatctggtcatcaaatatgcccgttggattcggaccttttctccagaagacaaacgaacgatccggcgaaatcttttcagcctgaaaaccctgaaagccggtaaagaagtattcctggaaagtcttgtacatcataaaatcttccgtaccaatccttttctgggatatatgcacatgtgtttcggattaggttggtttttgctgatcgttgtgggtaaaatcgagtcgttggtgtaccataccagtattttcaatccaccttattttgctatatttttccgttattttcatccggcacaggaaacatttccctatagcagcacttttgctttcctgatggatctgatcttgttgatgatcctctccggattgactctggcttttctgaaacgaatgtattccaaagcacttggtttgaaaaaaacaaccaatcatcgtcctttcgacttactcatcctcacggtattgtggttaatattccctcttcgctttctggctgagagtttcaccagtggagtacgcggaggaggcagttttctgactcattcggcaggtaattttttcgacactttcttaccgatcgaatcgctcgcttatccggcctggtgggcttattcttcggctttagggctttttttcctgcttcttcccttttcccggtatatgcatatcccgacagaaatcgtttatatttttctgaaaaactggggaatcaaacaagggaaacaatttacaggaatcagtcagtttcaactctattcctgttcgcgttgcggtatttgtatcgaccgctgtcagctcggcacttctctcggtcacaccgatacccagccggtttatttcttgaaaaaactacgtcatgaaaaagaacataccgtacaaatagcggactgtctgatgtgcggacgttgtgaggcagcctgcccggtagatctgaaactgaatgcattacggttaagccaacgtaccgattacacccatattacaaaatcgacctacgactacattcagccccaaccggccctcccggccaaagtagcttatttcgccggttgtatggggcacctcaccccatccgttatccaggccatggaacatatcttccggaaagccggggtcgattacacctttatcgaccaacagacaggtatctgttgtggccggcctatgatgctggctggtaaccacagtgccgcttcggtgatcgtggaaaaaaacaaagcccggatcgagaactcaggggccggattactggtcacttcctgcccgatctgttacaagactttccgggaagaataccgattgaacctaaaggtcatgcaccacaccgaatacctgaacgacctgattcggaataaactcatcaccccacatcaaagcgagctgaaaaccgtattccacaatccctgtgaactgggccgcggatgtgatgtatatgctgctcccgatcaggtactgcaaaccgtcagtcataaattagcaaccgtctatgatggtaaaaattcattgtgctgtggcggatccctggccaacatacatatcgatcccggacaacgtacccgaatcagtagcgatgcggtaaaagcctatctgtcttatcaaccggatcttttagtaacagcctgtcctctatgtaaaaaaacttttatgaaaaccgacacggcagttcctatcaaagacatcgctgaagtggttgcagaaaactgccggtgattttatatattttatgttttactttatactttttacctgatccgttagccccttaaacttatattttatatctttatcggggtattagaataaagaaatatgctttggacttcatcacaacagactgtaatcgatcaatttatacaagaaataagaaccatcggatggtttaaacaggtcggagaaccttctgaaaaatattgggttatcgacacgatttgggaagcttgtgatacttatggccatcaaatgctcgaagtttggggacaaaatagtgagctcatcgaacaaaaagcactgcgacagctgaaagacgaacagatagacgccatattcgaggcagtcagtctggctattggcaatgaagtctacgaagctttatgcgacctggaggataaaatcggacaagaaaccggtgaagatcaatccggaatcgaggaagaaattttagatttcatcaaacgtgataccgcctgggcttgtatcgaaaggcttcttggagaaaaagggtttttctcgcgtattctcgaaatcaaccaaaccggacattgggcttgctcgtgggtcggaaaattcccgaagggaaatttcattattctataattttcaggaggtgccagccgatggtgtaattgtaaccgtaacctgttatccggaaaaatttcatatatttattatatatttgctcaggaaaagattacgatggaattttcagaaacagaaataaaagcacttgcccaaggcgacacaaaagtattccacaaactatatgaacatttttttgtcgccttatgcatattcgcccgtagtttttctctaaaaccggaagaagctgaagacattgtacaggaagtattctgccgaatgtacgacgaacaccggctgttcgaggggttgaatactctgaaatcctatctttatacagctgtacgtaaccgcagttttaactacctccgggatgaaaaaagacgttcaatccgggaagcacaattcctgaataatttaaaagcggaagaagaaggctacaattcagccctggaaaatgaaatctatcgccaactcaaactattgctggaagaactacctgaacagtgcaagaatatctttcaacgcaccttatcgggagatacttctgaaaaaatcgctgc

SEQ ID NO: 6016 - DNA, 77206 bp, Unknown
  gut microbiota DNA sequence
tgaccattggagctctggcgagtgtcgtcttactttttctgaacgcccgaccggtggtgtctgacgagcttgcgaggagttccgccggtcagtgatagaaaaagccagacgaccgacagaagcgaccgggtcgacaattccgatcaccgaagacgaataagtaacgacagaataattctacctttaaaccaagtatcatccgatccttcggatctctgcaccgatcgcattcaatttttcatcgatatgctcatacccccggtcgatctggtcgatattatgaattgtactgactccctgagccgatagagcggcgatcaacagagcaataccggcccgaatatcgggagaggtcattttggtagcccttaactgtgattcgtgattctgtccgatgactgtcgcccggtggggatcgcaaaggataatcttagctcccatatcgatcagcttatctacaaagaacaagcgactctcgaacattttctgatgaatcaacacacttcctttagcctgggtagcgaccaccaggaacacactcagtaagtcgggtgtcaaaccgggccagggcgcatccgcaaccgttagaatcgagccatcgataaaatcctcgatcatataatgctcctgacgcggaatatacagatcgtctccgcgttcctcgatccggataccgagacggcggaaagaatcgggaatgattcccaattggcgtatattcacattccggatggtaatctccgaacgggtcatcgcagccaatccgatataacttcccacttcgatcatatcgggcagacaacgatgatgacaacctttcagctcctttactccctctatggtcagaagattcgaagctatccccgaaatccgggcgcccatcgcattcagcatcagacataattgctggatatatggctcacaagccgcattatagatcgtagtaattccctctgccaataccgcagccataataatattagccgtacctgtcaccgaagcttcgtcgagcaacatataacatccccgtaatttctcagccgaagcccggaagcaaccttccgaactattataatcgaaagtagcccctaatttctcaaaacccaggaaatgagtatccaaccgcctccggccgattttatctccaccgggcttagggatcaatccacacccgtagactgccaatagtggcccgagaatcatgatagaccccctcagactgaccgctttattataaaaatcttccgtttcgaaataatcaaagttgatatccgaagccttgaagacaaattctccatgtgcagggtgtccgacctgtacgcccatcccctgcaataattcgatcagcttcaaaacatccagaatctcagggacattggatagggttacctcttctttggtcagtaaacaggcacagatcacttgtaatgcctcatttttagctccctgaggacataattcccctttcagtcttcttcctccggtaattgcaaatttactcatatcgcttatttaaaagaacggcaaacgactgccgaaaaacaaactatccatatcaacaaactctgtatcaacttctaatcgccaatcatcactcctaaaccgcccatcaatttaaaatccgattcaatcattcaaagttatcaaaaaaggcgtaaaacaaaaataacttcaattttatattgtcttaaatcaattatatggttacatttgtaggtattgtaataaatattcaaaatattcggagatgaagagctttttgaaatataccctggcgactattgtgggtataatgattgtccatgttattctgttttttatttttatcgggtttatcggagccatcgcttctttttcagaaaaaacagttactgtaaaaaataatagtatcttaactattaaactggaaggagaaattctggaccggacttccgacaatccgctcgacaatatcgattttctctcattcactccaaagaaaaatccgggattaaataaaatattagccagcatacaaaaagcagccaaggattcgcgtatccagggaatttatctggacctgaccgaaattcagggaaatttcggagccctggcctttactcaggaaatccggaacgctttacaaaaattcaaggaaagcggaaagtttatttacagttattcgaatctgggatattcccaaaaaagttattatctggctaccgttgccgacaaaatctttgtaaaccccgaaacacctttgttgttaaccggaatgagcagtagcatctctttttacaaagagactctggccaaactgggcatacaacccgaagtagtgaaagtcggtaaatttaaatcggccgtagagccttttatctccgacgaaatgagtcccgccaaccgggaacaggtacagaaatacctcgattcttcctgggggacgattgtgaaaggaattgcagaaagccggaacatccccgtcgattcgatcaatgccctggcgaatcgtttcgatttctacactacccgccaatttcaggatttcggtttcttcgacggtgttctctacgaagatcagatgctggccttattgaaggagaaatgtggggtaggaagttcggatccattgaaccagattgctctgaccgattatcagaatgcctcggttccggaagtaccgatcgaatttaataaagacaaaattgccgtcgtatatgcttccggagaaatcggactggagcaaaaaaataataccatagggccggagctcgcaaaaacaatccgtaaaatccgggaagacaatactgtgaaagccatcgtcctgcgcgtaaactcaccgggaggcagtgccctgacttccgacattatctggcgggaagtcgaactagccacacaaaccaaaccggtgatcgtttctatgggtaatgtagcagcttcaggaggatactacatttcgtgtgcagccgacaccatcgtcgccgaaccgacgactttgaccggttcgatcggaatcttcggtatgtttttcagtggcgaaaaactgatcgaagataagatgggaatccataccgatgtagtcaaaaccaacgatcacagtgatttcggcggaagctatcccctccctttaccggtcagtaaccgggctttaactccctacgaaaggaatgtactgcaaaactatgtcaatcaggggtatgaaacctttctgagccgtgttatgtccggccgcggtttaacccatgacgaacttcatgccatcgctcagggacgggtatggaccggagaagatgccctgaaaatcggtttagtagatgtgttgggaggattagaagatgcgattcggattgcggctcagaaagccggtatcgaaaaatacaacctgacggaatatccggtagtaaaaagtccgatagaggaattattcgccgagtttacgacagaagtaaaagcacgcctgttgaaagaagaactaggcactttctatacgacttgggaacagatgaaaaataaggtagaaaaccagggattactggcacgtattccctatgatattgcattcaactagcaagttcacgagctatttatcaacaaaaaccacggccatggcatttgtcaaaataatattgctgccgctcagtgttatttatggtgttgtcaccggagtacgtaattttctttttcatatcggaatcctgaaatcacaaactttcaggattccggttatttgtgtcggtaatatcactgtaggaggtaccggaaaaacgcctcatacagaactgatcatctcggagctaaaaaagaaattccgggtagcctgtcttagccggggatataaacgcaagaccagaggctttatcctggccaacgaacattctaccgccgctgaaatcggagacgaaccgatgcagatcaaaagtaaatacccggatattctggtagcttgtgatggtaaccgagtgagaggaatccaaaaacttcttgccttaccggaacctcccgaagtgatcctgctggacgatgctttccaacaccgatatgtacaagccgacaaaaatatcgttctgatcgattataaccgtccggtacacgaagattgtctgcttccggcaggccggttaagggaaagcgtacaagcactgaagcgagctgactatattatcgtcactaaatgtcctaaaagtatccaaccgatagaaaagaggattttatccaaacacttaaagataaagccttatcaacaactcttcttcaccaccctggaatacggtaagatcaagcctcttttcccgcaatacgaatctatcgtaccggaccgaagtagcagtatcctgtgcctgacaggcatagcacaacccggtccttatatcgatcatttgaaaactttcacctcggatatcaccggaatccggtatccggatcatcatcatttctccaaaaaagattttcagcagattgcccgggctttcgaatccatcgaaaatccgaagaaatatatattcaccaccgaaaaagatgcggtgcggctgaaagcttgtcccttacccgaagaattgcaaagggtgatttattatattccggtggaacccgtatttatcgaccaagacgatttactattaaacgaaatatcagaatatgttaggaaaaatcaaagatagtgcagcttatatttcccgttttctggaaggggaaaaatatcggatcggtatcatcctgggtacaggattaggagaattaggcaaatcgatagaaataaaacatacgattccctatgccggaattcctcatttcccggtatccaccgtccaaggacacaaaggaaatctattaatcgggaaattcggcgggaaaaacgtaatcgcaatgcagggacgttttcatttttatgaaggttatccgatgcaagaagtcacttttcctatccgggtattacatgaattaggcgtgaagtatctcttcgtttccaatgctgccggtggtgtcaacactcaatttctggtgggcgacctgatgatcatcaccgaccatatcaatctcttcccggaacatccgctgcgagggaaaaacatcgacgagctcgggccccgcttccccggcatgaccgatgcttatagtcccagaatcatccggctggcagaagaatgcggaaaaaaattaggtattccgttacagcacggtgtatatgccggcctgcaaggtccctctttcgagacacccgcagaatacaactggatccgggttatcggaggagatgctgtaggcatgtccaccgtacccgaaatcattgtagcccgccatatgggtatggaatgtttcggtatgtcggtaatcaccaatagtacggcttcaccggaactgatcaaaaccaaccacaccgaagttcaggacatcggcaatacagcccaaccccgcatgaccgctctcttccgcgagattattgcagagctgaaagagagttgatgagtttaaagagttactgagtttaaagagttgtagagttagtaagttataaggatatcaagttaattcaactctataactcattaactcttttcatatatgtatgtcctgcccggactcccaaagaaaaaatagaaaagctcaaaacccacttcaccgtgctagcgctgatccggtcgacaaccgacaacatcatcgcccgctacgtgatgagttacacctatagcgaccgtttcgaaaaggaactggcacgtgtaaagaaaatggcagagatcttaccggataaaggggaaaaataccttcgggaaatgaacaataaaaaacacatcccccctggcgcccctctaccggaaacgatccttgaaaatgtacggggagaaaaatgtcaattgtcggacctgaaagggaactggcaaatccttacaagaaatactggagaatctgaaatagttcaggcgataaacaactcgatcacgggcactaaaatggcggtcataatgcccatcacaccgatggctaatccgctgatcgctccttctaccgctcccagttccatggccttggcagtccccagaccatgggctgcagaacctaaagccaacccacgcgcaatccggcttttgattcctaaacgctccagaataaaaggaccgaccaagccaccgaaaataccgacgacaatcaccaccacggccgcaatggccggtatccctcccgaccgttcagcaatactcatcgcgatcggagtagtcacagacttcggctctaacgaagcgatcaaagcatgatcggcaccgaaataccgggcaataaaaatcacgctcaataccccggttatacaaccgacaaataccgaagtaatgatagaaacagcattttctttcaattgggcgatctgttcgtagagtaaataccctaatacgacaactgtcggtccaagcataaaactaattatccggcttcctttttcaaacgactcgtaggaaatccccaggaaatgagtgatcagcgccaatacgggtatagataccaacaacggattcaggatactcagtcttgtttttctgaacaaccatacagcagcgagatacaccccgatcaccaaggttaatatgaatatttcggaatttaataaaacagtcataagccaaacagcatttacatttctaaatcaacggtcttccgcccctttccgatgtttctcaaaccattgttgtatcgaagccacgacgacgatcaccaccaccgtactgacggcacaggccaccaataccgcctgccaatactgagataatatatctaaggcattcacaatcccaaccccggcaggaacaaaaaacaaagccatgttatcacaaagaaaccgggcaacaggcttgatacgttcaggcttgacccacttcaggcataaagcggtaaacaacaacatcatcccgatcacactcccgggaataaaaccgttcaccagccatcccaccaactcgccgagcgcaaaaaagaaaagtacaataaaaatacctggtaacatagttaaagtaaaaggtaaaaggctataagctaaaggctaaaagcaataaactaaaagcaatgagcggattagcttcgaaaaccgatacaaaaatataatattcagcccaaagttatgctccatccgattatttttgtcccagcaatttacgaaaacgttcgtcctccttaatcgctttcaccctccagcctttagcttctagcttttagcctctagcctctagcctttagcttttagcctctagcctttagcttttagcctctagcctttagcttttagcctctagcctctagcctttagcttttagcctctagcttattgctttcagctttttaacctctagcttttcatcccgatccctgccccgaacctccccgctttctccccttctctccgataggagaagaaaaggtccggatgacagaccgagcacataccggccacttctatattttcatttttcaccccacatgccagcaattctttacggttagcttcccacaaatccacctggtattttcccggttgctttcccagaccaacgatcgcctgattaccgggaaataactgttgaaacacccgggccacttcctctccgacttcgaaacaacatttcccgatcgaggggccaatagccgccactacccgttggggatcgcatccgaaattttcctgcatcacccgcacggtttccacgactatattagccgcagtacctctccatccggcatgtactgcggcaaccacccttttctccggttcgaacaggagtaccgggacacaatcggcagacaacaccatcagacatatccccggctgattcgtcaccaaagcatccgttgccggaatacggctttccctatccaaagcccctctcccggcttcctcagccgtaacgatccgcactgtcgccgaatgtacctgccgggcggtaatcagccgctctacctcaaatcctgcagcttccgccaggctcctgcgattatgctgtatgatctcaggattttcccgatcggaaaatccgatatttttaactcccgaagagacaaaatgcatcaattccggataagcggataaattccggaaccgataaaaagggaaatccccgctaagcagtttctccatatccattcattttagatcgacaaaattagcccaagttcggataatccccaaagtttaagctccaaaccgtcataaaagtaaactttcagccgattccaacgtatgtttaagaaaaaaatatgttacaggactatttgacattaaggcaagcatacctcacccgacccgacacccggactcagatacatcaaaattatgtccggaatttgtttttatacgaaactttccggttgggcggacacaaccttccaccgacaatattcgagaacatcgtcagtaccggtaaacctcaatcgacagagacaacccgtcaagcctacgatctttggcaagcctggcaatattgtgaaaaacaagcagcccttcgccagcctttagacctcacgtttgtcagagcggtttctgcccgtatcatgaagcataccggtggcgaaacgactacttctgtgggacgttacgatacttcgttaggagatttccgcctcggcgaggattatgacgaagtataccctttggctgatttccgtaaaatccccctcctgctcgacaatctgtgccggactaccgaggtacaactaaccgaagccggtgtaagcgagaacattaaaattgtggccaacttcatgtacgattttatgcatatcaagccattcggttattgcaatctggaaaccggtatcctgctcatcaactttttggaactgaaagaagagcatcccctgctcatcctgtttgccgacgaccgggcagaattactcaatgccctgaaacggggaaaaatcagtgagacaccggaaaccctcgaagcatttatcctgcatgaacagattaaattcttcaatagggaaatttaaaagtaactcattcaaaaccagcatcgaaaaaaagtcttcatttttctttgtaattaataatagatgagctatctttgccgtccgataatggaaagaataattataaaattttacatacaatgaaaaagggcatacatcctgaaaattacagactggtagtatttaaagatatgtctaatggcacgactaccattactaaatcaactgcagcaacaaaagaaaccatcgagatcgatggtgtagaatatccgttggtaaaaatggaaatctccaacacttcacacccgttctataccggtaaagtgaaattggtggatactgccggtcgtgtagataaattcatgaaccgttacaaggaccacatggaaaaaagaaaaaaataatcgtttctctctaaatgaaataaaaaaagcgaaaagaagacttttcgctttttttatttccttccctctattccctaagcaaaatcagcattcggaacaaaatgctccctactcgattgtggcacaggatttgtgctataggtaatgaatcctatttttacacaaaacattgacaaaatgtcagttgttactcgtataaaaatttataaccataaaacaagagaggacgaataaatggataaaataaatctgaaagcagtgttattacagaacatgggagaagattcggcagatttcctacccatcatgggggacgagaaagaactgctgaacgataatatgcagattcctgacacactgccaattttaccgctacggaatacggtattatttccgggcgtaatcattccgatcaacatcggacgggataaatctttaaagttgatcaaagattcctaccggcagagtgccctgatcggagtagttgcacaaaaagataccaatactgaaaatccggatataaacgatctttaccagatcggaacagtagcttctatcctgaaaatactggaaatgccggacggaaccaccacagccatcattcaaggcaagagaaggtttttattggaagatatcctttacgacgatccttaccatgttgggaagatcagtttgaaaaaagaagaaggggtacctgaaaacgatccggaatacaatgcgatagcagaatcgttgaaagatatggcttccaagatcgtcaaatattccagccatatccctaatgaagcaggttttgcgctaaaaaatatcgagagtatgctttttctgatcaacttcatctcttcgaatacagatgtagattatcagaataaacaagagttgctggaaatcgacaacctgaaacaacgggcgatcaaactactggaaatcctgagtaagcaggtgagtttactggaattgaaaaacgatattcagaagaaagtaaaaatggatatcgacaaacaacagcgcgaatatttcctgcatcaacagatgaagaccatacaggacgaactgggaggtaatccgaccgacgaggaaatcaaagaactggaggaactggccgaaacgaaagaatggaacgggaatgtccgggaaattttcaacaaagagctgaacaagctgaaacggttgaatccttcttcccccgattactcggtacaatccaattatttgagggaaatgctggacctgccctggaatcacctctcggaggacaacctggatctggaacatgcacgccaggtactggatgccgatcatttcggactggagaaagtaaaagaaagaattttagaatacttagcggttttaaagttaaaagccgatatgaaatcgccgattctgtgcctctacggccctccgggagtaggtaaaacctccctgggaaaatctgtagcccgggccttgaaccgcgaatttgtacggatgtctttaggtggattgcacgatgaatcggaaatccgggggcaccggaagacctatatcggagctatgccgggacgaatccttcagagtatcaaaaaagcaggaacttctaatcctgttttcattctggatgagattgataaagtgggtaacgatttccggggggatcctcaatctgccctgttggaagtgctcgacccggaacaaaacggcagttttcacgataattttctggacatcgactatgatctgtcgaaagtgatgttcatcgccacagccaacgacctcagcacgattgcaggtcctttgcgcgaccggatggaaatcatcgaagtgacgggttacctcatggaggaaaaacgggaaatcgccaagcggcacctgattccgaagcaattggaaaaccacggaattacggccgggcatgtaacgatcccagacgagatcatcgacctgatcatcgagaaatatacccgcgaatcgggcgttcgtagtctggacatgaccatagctaaaattatgcgccatgtggcccggaaggtcgctatgaataaaaaattcacgattacgctcgacgaaaataaggtgaaagaatatctgggaagcccgattttctcccgggaggaatatcaagggaacgaactacccggtgtcgtgaccggattagcctggacagccgcaggaggagaaattctctatatagaatcgagctacagcaaaggcaaagggcatcttagcctgaccggtaacctgggagaagtgatgaaagaatccgctactttagcactcgaatacatcaaatcgcatgcaaaagagatcgggatcgacgaaaagatgttcgaagaaaacgacatccacgtccatgttccggctggagctgttcccaaagacggaccttcggcagggatcaccatggttactgcactagtatccgccctcaccggccggaaagtgaaaaaagccatcgccatgaccggagaaatcactctccgtggcaaagtattaccggtagggggaatccgcgaaaaaatcctggccgccaaacgagccggaataaaagagatcatcctttgcagtgaaaacaaaaaagatatcgacgatatcaaaaaagaatacctgaaagggctgaaattccactatgcggatcatatcaaagaagtgctggaaacagcgcttctaaaagcataaaggaatctcctgtgagacctatggtttttagttataacggcgatagcagtccgacttgacttctgaaccgttgtaactatttaaaagtatgtttacaagtataaatatatataactacctaaaaaaaaactcatggaaaatcaagaactgcaaaccacccggaatcaatcgatcgttacaatcggtgattggatcattacgatgatcctgatgtgtattccttttgtgaattttattatgttattagtctgggctttcagtgccggtactcctgtcagtaaagccaattgggcaaaagctactcttatctttatgctgatcggatttgtattggtgatcctgttttggggagccatcggcggactactcttaagcaatatgtagacacacgtaaactcaaataatgatattaagatccccggtcttaatatcattatttgaaccgatatcctacaactaccgtatttccttcctccccctgctcccggtagattttcatgagatcggggtgagcccgtcggtaggcctcccattgttcctcattcaaggaggctttcaagcggtccagcatcatacagtaatcagaagagggaaaataaaaatacatataatcgtcgcactgacgcatgcccgggttccagttatggtataatcgcaacactgcattcggtttatatctgaaatttcccaccgacaacaaatcatcgtccactaaatcataattacaggttacttttttcaacttatcataaaccaataaataatatttttgattcactaaaactacaatcaaaacatatttattattttccgacatctcaattacagtcaaataattatctgaatacccagcctttccgcatagacgaaagtttttaaaagaacctttatctaaataataacgtaaggtaaccgtatcttccgaaacctgataaatactattgtcgatatcagaataataacaaaaggtatcattcactacatacgacttattccttacagcatatttccctaccttctgacctgggaaataagaaatttttaactgtccgctcttccagtttaccagattcaccaaacattcctcagaccgatatgtcgatccacaaacaggtgtgtttagatatactgcacaactatcattcagcatccacttaaaataccccactccatattcataagaaggatgctcggatttcttctgccaaagcaacgttccgtccaaagcatagcaatgaaaacccaatacatccccggctaatacattcgaatcaggggtcaatacaatttcatgcggcaaataaagatattcatccggtccacggccaaaccggccaagagtgtgctgaaactcaccggcagaatcgaatacgctcaaggttaccacatcagtcatgccctcggtcactatggaagtcgcaacaatccgatcccccatttttacaaagtctccgattctattacatacgatccctttaaaagtcagcacttcatatccatcgaaaagcctggacatcttcaatgtccgggcttcatcaggcttaaaacgaataaccggtaccgactcttcctgcatactcccggaagaacatgccaccaaacaaagccctataagaaaaacaatcgaaaaacgatacaacataggattattctgctatgaattgacactgaggcccccaaaaaccttggaaacaaacgcaataaccatatactgtcgttgcattttcaccgtttttttcaaaatatccggagatacaatactcttcttcaggtacatttttatcccatattttttgttcggcccaggccatcaaaacaaaaaacaaggctattcctatcaaaacgaatgattttttcaatgctgttttcataatacaaatggtttagattaataattgcaacatattaatttatattaataaaaacaactatttctaaataatttatcaataatgcccgaaaataaaaattttccagtgattaaagtccgataataaaaaccattccgaagctgatatccaaccaattatagcgccaccggctatcggtcacccgtttgttggaaactttatccctcatatacacttctttatattccaggctcatcaagctaatatccaaagccagatactctttgagccgcgcccataagcccggtttcaaggtagacacccataattcgtgttttccatcgtgtccttttttcagaaagctttttccccagccatatccactggttccctgcaggtataaccggactcccccacgaggagcatacagccggaaaaatccacctgtctccagtgtatactggtgtccctcgtcatccatcatatattcgtaagccagatcggctcccaaggcgatattattcgtcacaaaataacctggcgaaacaatgcctttgatggtatatcccagattgacaatcttcccgtcataggtcactaatttcccgcctccggtgtaattcaaccgggctccgatcgtcatttcgcctccatattgtgctttgagggtcatacccaagcataaaaataaaccgaagaacagtattttcttcatgatctgttttatttacctgcacaagctattcattcaagctctgcgtcaacttcttcaccagcttatacttattaaaaaattccttcaacacaacccgcagaaccgtataggacggaatcgccagaatcattcccaaaataccggccatactaccggccatcaaaatcaccaaaaatatttccaaaggatgggcgtgtacactacttccataaataaaaggctgaaaaacaacattatcgatcagttgagtcaacaacatcgctatagtcatatagatcaacagcggcaacatctgatcgtaaaaatccagccccaaattcaacacgactcccacagccaatccgaaaaataccccgatcataggcccgatatacggtatcacattcaaaactccggtcaccaaaccgatgacaaccgcattactaaagcccaaaccgacaatcgtcagtccgatcgtattcaaagccataacccccaaaacttcgagcaataatccgacaaaataacggaccagtaatttttgtatggaatccaaagcattccgggcctgttcttcgaagcgggaaggaagcaccgccatcaccatccctgaaaacaagcggctatccttcagaaagaaaaataaaataaacgtaatggaaaagagagcgacaaaaatatccgtcatcgttccggctaccgtcccgaaccaggttttcagctgaccgacattaaacactttactcaataaatccgtcacataagcatccacatcctgatcctcatccatcaaaccgtaatgcttcataaaatgtccggcatcctcgatcgggctttccaattcggaaacgatattagacacacttacattgcccaacgactgaaattcacggatagcgagcgggataatggtactaaaaaaaagaataaataatccccaaaggcaaatcaccgtgattccggctttcaaaccatcaggcaaacgatagccccggatcttcacccggcctaataaatcgataatcggcctgccgataaaagaaatgacagctgccactaaaatataaacgatgacagaaaaaaaataccaggaaaagaaaattgccccagctaatgcgacaattcctaacacatatttggtgactgaattcattccgctcccttttttcaattgcttttctcctctcttaattttccaaaaataaataaaaacctttgattattttcttaaatacctcaatttttaaaaagatcgatcaaaaccggaaatgaaggggtttatcctgtctgtattccataatatctccacggatccaccaacttaaacacccaaaaactctttgaacacgataaactttataagcctctgccccctctaaaccgattttttttttaaagattcagaaaaagagcgaagaagattaggttatttttaaaaacctttatatctttaatacgttaattttagatcgaaacaaaccgtttaaaaacatgttcatacgcctttggcatatctattatgatggtttcagccatttacccaaatggggaaaaatattgatcgcaatagttgtggccaaactattggtcctgtttgtggtatttaaattcctgctcatgccgaattatctcaatacgacctatacgacggaacaggaaaaaagtaatcatgtactcaacgaattaattaccaaaccttagcttatgatatcagaattaaccactacaactttggtcgaatggtcacgctggcaatttgcgatgaccgccatttaccattacatgttcgtacctctcactctggggttatcctttctactggctattatggaaaccatgtgggtcaggaccggtaaggccgagtggttgaatgccaccaaattctggatgaagctttttgcaatcaacttcgccatcggtatagctacggggctgatattggaattccaattcggttccaactggtcgaattattcctggtttgtcggggatattttcggagctcctctggccatcgaaggtttgttcgctttctttctcgaagccactttcttcgccgtcatgttcttcggctggaacagggtaagccgtcgttttcatctggtttccacctggatggtattcatcggttccaacatttccgctttgtggatcctggtagcgaatgcgtggatgcaaaacccggtaggcatggaattcaacccgatgacagcccgcaacgaaatgtcggatttctgggcggtactactctcaccgacagccatgagtaaattcttccataccgtcacctcggcttatacgctttcggcttgttttgtcgttggagtaagcgcctggtttattctgaaaaaaagacatttcgaatttgcccggaagagtatcctgctggcctccgttttcggcttcctgagtatcatcgctacgatcttcacaggcgacaccagtgcccaggatgttacccgtacccaaccgatgaaactggctgctatggagggactcaacgaaggagggaaaggagccccgtttaccttgatcggcttgacttgcaccgatcctcaattaccgtccgaacgtatgaaaacggtaaaatacggtattaccattcctaaacttttatccttcctggggtatcatgacttcgatgcctatgtgcccggtatccaaaatatcatggacggctacacctccgaagacggaaaagtatatccttctatagagcaacgcatggccaacggccgtctggcgatagatgcactgaaaacgtacaaacaagctgttaaagacaaagacgatgcgctggctagccaatctttacagacactacgggccaacttccaggatttcggttacggctatctcagttcgccttacgacacgatccctcctgttcctctggtattctatagtttccggctgatggtaggtctgggcatgctattcgttttgttgtttatctgctcctggtggtatgccaagaaaagaaaattcgaaaaattcaagttcatcccctatctggctatcgcgtgtgttccgttggcatatatcgcttcgcaatgcggatggatcgtagctgaagtaggacgtcaaccttgggtggtacaaaacctgatgcccacgaatgtggccatcacccgcatcgcttcgggttgggttgtcaccaccttctggatgttcgccattttgttcaccttattattgattgccgagatcggaatcatgttcacccagatcaggaaaggggtaaaagagtaaaaaatgaaaaatgaggaaaccataacggcctgaaaagttatagtcctcacaaacgataaataataatggattatggatttaaatatattacaacattactggtggatcttgatctgtatattaggaggtttactggtattcttattgtttgtacaaggaggacaaagtcttctttataccataggaaaaaataaagacgaacgggatttgatcgtcaataccctgggacataaatgggaatatacgtttaccacattagtggtattcggcggagctttcttcgccagttttcccctattctactcaaccagtttcggaggagcctatgtcgtctggatgctgatcctcttttgttttgtcttgcaagcggtatcttatgaataccggaataaaaaaaacaattttctgggcagtcggacttacgaagtattcctgatgatcaacggattcgctgcacctcttttgttaggagccgctgtagctactttctttacaggttcccctttccgtctgggtgtaatgcatgatgtcgaatggatgacaccctggcgcggtctggatgccttgttcgtcatcaccaactatttcctggctttagccgttttcttcctggcacggacattagcagccctttattttatttttactatcgatgatccgaacatccgcatacgcagccaccggcaagtgaaattcaatgccgtaccgttcgttctctttttcctgttgtttatcggttttatttttgccggtgaagggtatgcaatcaccccggaaggaaacattgcattagtaccctataaatatttttataacctgatagaaatgccgctgaatgccttgatattcattatcggagtagcaggagtactctacggcatcatccgaaactggatatttccccgatggacgaaaggaatctggtttgcaggagccggaacggtattgaccgttatcgctctgctgattctggcaggtttcaaccaaaccgccttttatccctcatatgtcgatcctgattcctcactgactatttacaacgcttcttcgtccttatataccctgaaagcgatgtcctacgtatctattatcatacctgtagtaatcgcctatatctggtatgcctggcggacgatgacccggaaagccatcgacaagcaggaattagaagaaagtgaaaataaatattaatccaccgatccctcccagggagggatcggcattatgccgcacaggcaatgcaaaaacttttaaaccatatccggtgccacgatcctcgttcccctaactaaccggataattcagtaccgatgataccatcaaagaacgggaaatgaaaagtctgaaaaccgatctcacccttttctgattttcactcaaagccttatctttgcgcaactgaaaaattcatacgttcatgaacagaattaaaggtatcctatatgctatcgtctcctcttcgactttcggactggcccctttttttacgctgaccctactaagcttcggctattcatcttttgaagtattgacctaccgttgagggatcgcttccctttgcctgatcggattcggcctattggccgggtgtagtttccggttaagtaaaaaggatttcggggtcgtctttttgttaagcctgtttcgggcaacgacctcattcagcctggtgatcgcctatcagaatattgccagcggtgtagcttcgacaattcattttatgtatcctttagctgtagcactggccatgatttttttctaccatgagaaaaaatccggctgggtcatttcggcagtactcctatccattctcggagcaatcctcttatcttcaggcaatatagcaggttataacgccaacgtgacggtaggtattatttgcgcctgcatctctattttctcttacggaggttatatcatcggagtccggaaaacacgggctgtagcgatcaactccaccgtactcacttgttatgtcatgggattaggggcgttgtttttcattatcggcgggtaccttacagaaggcatccggttagaaacccaaggaaaggtatggctttatattctaggcctggctttaccggcaaccgctatttccaatatggccttagtcaaagcaatcaagcatatcggtcccacattaacttcgatcttcggagcgatggaaccgttgaccgctgtttttatcggtatagttgttttccatgagacttcaacgataggcggtattttaggcatgctactcattattatagcagtcttcatcgtcgtcgtcaaagaaaaccggaagtaaaaggaaaataaccttaggaatccggaataaaatcgtagatttatacctgtaatatgtatatcactgcctaaattcgaatcaaggcttaaggattcttttaacagaactttcagtttacccgactgtcgggtaaactgaaagttcctaaacaacaaaatcctatttttgagttcagtatttccgaatcggcgtaatcaccacctggaaagtatagtcctgataaggcaacagataaggttgtaacggccaggcaccccagctattgatacatcccaatcccatttgtttcaggtcaaaagacaaggtggtcaatccacgtggtttcaattctccggaatgccgctgatctttgtcccaaccgtcatccaggtcttccggtaaataattcaaagcagaggctgagaaaggaacatccgaacgaatagccaaaccacgtccatcgatatcggtcagtttccaccaacggatatccgatttcgtaccggattcctgcggacggatataaggataatactgatctttcaccaactgacggtaacggcccaaacgctgactctcattccggtcgtcataattctcaacaggtccccggccataataatcgatccggtcgaatctgcccggcatcaccagttgcataccgaaacggaacaggtggggcatatctttcttctccttatcgacagcaagctgttcactgatccgaatctccccatttccaccgataagataagtcatggtcaatacagctgccaatcggggtaattcataagtggtcaccacctgaacccgattgccttgttcctctgccttaaagctcttcaatttcaatccgggattcttccaatccacaaagcggcggtgaagattcgccccgaaatcattatctgtcggagcccgccagaaattgggccgtaaagcatatccatattcgatcatctcatacccattcagactgatcccctctatccaaccggaccattttccaaaagtcacctgtacttctccggcactcacgacagcatgtaccaaatcttcatacagagaagccttttgcccggtttcggccaattcaacctgaaacaaaggataaggggcaatctccaattgttcttccgcaaccgcataacctgccggaagtaattgccgggcttgtttcaggcgataggtcacattcagcagaatttcaccttcagcaggaagatccgtttctttataccccaatacgaccgattgtgtctgttgcggggcgatctgcaaatccatcacaaccccctgtctcaccggctctccattctgcaacaattgccactccaggtaatagtccgaaagatcggtaaagaaattctcattatacacatttacgattcctttcctaagagctgccggtgtagtccatatcgactgatacattttccgcacttcatacatatggggattcggcacccggtccggactgatcaaaccgttgcagttaaaattcttatccgaagcatcgtagcggttgtaatctcccccgtaagcataaatcattgcgccgtctgccgtatacttccgaagtccctgatctacaaaatcccagataaaaccgccctgcaaattcgggtatttccggatcaaatcccaatattctttaaaaccgcccaaagaatttcccatggcatgcgcatattcacactgaatcagtggtcgtgaatccccactcttagcgaaattttccatccaattcaggtcggcatacatcggacaaacaatatccgtatgagctctgcgtcctgcctgttcatattgtacaggacggctgccatctctctgtttgatccagtcgtaacaagccacaaagttcggtccgtcaccggcttcatttcccaacgaccagaaaataatcgaaggatgatttttaaaagtctccaccatccgctgatttctttcgaggtgagccttggcataagccggttccttggccagtgtccgttcgccataccccatcccatgagattcgatattggcttcacacacgacatacaacccatattcgtcacaaaggttataccattcgggatcgtccggataatgacacgtccgcacggcattcagattattctccttcatcacccgtatatcctcgatcattctctcccgggatacctgatatccggtcaaaggatccaattcatgccggtcggctcctttaaacaagaccggctgcccattgacccatacctgccccaattctttcttcagttcgattttccggaatccgacccgttgcggaacaacttccagcacttttccggcattattttttaaagtcagcaacaaagtatacagattaggctcttcagcactccattttgccggatttttcactgccatttcggtacgcacaattccttttccatcgggcttgacactcgttttttctacgatatttcctgctttatctttcaattcgagttccactgtcccgctgttccgggacacttgggccacgacattcaaagacccgtcacgatacgcctcatccaaatcgggagtgataaaaatatccttcagatgtaacggattccgggcatacaaccaagctccccgggcaataccggataaacgccaaaagtcctgatcttcaagataactcccgtcacaccaacgatatacctgcatcgcgatcaggttctttcccggccgtacataaccggttatatcgaattcggctgccagcttactatcttcgctataaccgacaaattttccattcacccatacatataagttcgaagtggcagagcctacatgcagaaacacctgctgtcctttccatgaagcaggaatttcaacggtttttcgataagagcccacatgattattcaccgtttctattttcggaggatcaggtgtaaactgattcgaccaggcataacccgaattacggtataagggatctccgtatccattcatttcccagattccgggcaccgggaagtccacccaatattgatcctcgaaatccaaccgataaaagtttacaggccgttcggtttgatcctttacccagttaaacttccacatcccgttcaacgatagaaaattggatgattcttctcttactccttgctcagccatttccctggaaggataagcaaaataatccgcccttgccggtgcacggttgatcgcattcaactccggatcgagccattccttcttttgagcaaacgttgtcatagaaaggcataagcctagacacaataacagttttttcataaattataatattaaatgccaatttattctgctcaaaaatagtcaatattacacctatcgaggtagaaaaagaattaaaaaaggaagaaaaatatacgaatagtctgaaagtggttgtatgaaaccctcattccagcgtcattttctctggtatacaaatgtacatgagggtttcataacatgcttgtcattcattattgccgatctgcattttcgttaggaatacacgactcgggtttttatacaaatgtttggcaaaacctttacggccactttctgtcacaaatccacacgtagcattattcgccatagtcaacttatctactccgtccgatatcaccagcccggataactctttttccgttatcaacataaagttcaaagttattcctcccataaacttcgttgtattcatttcagaagctttataatcggtatatcccagcccgtgcataatatcttctgtctctgatgctgccggattcaaacaataatatttagaatcgttgtcaacatacaatatgacatcgatctcactcaaatgagctttataatcggccatatcataaaccacatcttctgtcggattatacagccatgccacgttctttccagtcattgttatgccatggcggttattgatgtacctgatcatctcaaatttctgatccaacacttttgtggttccgtcattccgggtaactttcagttttatgcccagacttttaccacgcagcgattcgtcatccggcataatcaacggatatttcaccaatacggtagatatctcccgggaaaaatagccttcactatccaaggataatgctttatcttcatccaccatagcaaaagtaacgtcttccacgacaggccggattccatcttccgaggtaatctcgatccggctcaattctcctttactggttgaagcgacaaactgaaatacaactgtttctcccggttcggctttaataggattattggtttctatgacggtaaggttcagctccccattggattccaatacatcatccatagaacagcttccccataaaaacaaaaccggtaacaataataaatatatctttttcataattctatactttaatcgattaaagtggtttttgttctacactggtattatgctcaaactcagcacgcggtatcgggaaacaaagctgatcgtctttttcataattatcgttccaggttttcaacagccgtttgcctccgactctcatccgcacggcaagatagtacaaggctccattctccataccgatttcccggagattttcattgaagatttcattcatcagactttcccggtccggataatccgatgctttcaacggcgtagctcctgcccggttacggacaatattcaggacatccaccacgtctttcacaggactgtcggtccgtaacatcgcttccgccttgatcaggtacatctgagctacacgcatataatacatcggacagtcgccggtggatacataatgcttcttccagatttgtcttttatatttttccccgttcagattagtaaattccagagaatcgaaagtcacttcataccggggatcctcttccggaaaaaccgcaagatacgcactcgacggttgataagtcccgccaccgaacattttaaacaaactccccacattgtcatccatcgcaggaggattcttcatgaaacgggtaaacaataactctttcgagtcatatccatgctgaaaaatatcagcataagtatcctccattccaaactccgcactaccgatcacttcatttgccaaacggatggcttcgctataatcgccatcagccccccggttcatcagtaagtcggctttaaaagctttcgcgaaagtagcacacacacggtacctggaataaaatgccggagcatattttatggcatagtccaaatcttcaaaaatcttttcataagattctttgactgtagctcttgcctgattgttgttggaaagcgaagaaggttccaggcgtataatcgtccctaaccggctgtcgagatcccagaaatatccgtatttccgtaacaaaaaagcatgcgcgaagcccctcaggaaacgggcttcggccaacatttccgtcttacggttcggcccgaaagcactttccggtaaacgatcggtataatagatgaaattattggccgaattcacaatcttataaccactcttccagggattctccgcatcagaattatcatccaatacctgcaaacggggtaattgttccccttccgtttttgaacgataaaaagctgtaggatctaacaatcctgtacggaattcattatcacaaatgtaataggcactccatgttccccatccctccaggtaggagtataccccattcaaagcgacctttgccgaagattcattggtaatcgcattatctcccaccaaatcatgaggcggaatttcattatcgaacatactgtcacaacttcctaatgtcagcagcaaaagtatcaacgacaaactgctatatatcttattcataatcatgcttatttaatagttacttttactccgaaattaaatgttcgcgttgtcggatacatatcgttatcgacagaagcgccttcgatcgcatccgtactgaaagactccggagaaggacccggataagaagtaaaggtatacacattatttgcagaggcaaatatgctgacattaccgaaaatcctggttttatccacccagtgccgcggcaggctgtattcaagatttatattctgtattttcacataagaagcatcgtataccgcattatctccaaagtcattataataaaaattatacctgatgctcggatatttattcgaaggattctcgggtgtccaccttttcaacgctgtgctctgtgtattttgattctccgccatattgaacatattggcttctcccatccagattttctgcgcaccatggctaaatgttccctgaacacttaatttcaatcctttccaggacaaacgggtagcaaatcctccctcaaaatcgggccgggaacaaccgatcaccgttttatcttcagtggaaccggagactttatttacatacccatctccagacaaatctacatatttcaaatcgccgggcatcgttttccgtccgtaagcctcctggtaaggttgatccggattcaaagcctcataacggttcacttcctcctgtgtctgaaaaataccatctgtcttatacccgtagatcaaacccaagctcttgccttcctgaatcactgtatttcccagataactgctcccaggataagaaacatattcggcatcgatatccgtaattttatttttattcttcccgatattaaagccaacgaaccaattccaatccttattatcaataatattagcttttatttcaaattcgatacctttattctcgatattggcaaaattaatctgtgtagtctccaggcctgtactcaacgccatagtataagcatacaacaaaccatccgttttctttttataaaaacctaaagttccggaaatccgctggttgggtaagaatccaaaatcaagtgccagatcgacctgttcggtagcttcccatttcaaacggtcattcccgatttgtgaaggccgggtggcaggctgattctcatagtccgcattttcataaagtgttctccagccatactcaccgacataagcatttccggttttaccccatcctcctctcagtttcaggaaagtgaaaatattcgattcccgcagaaaatcttcttccgacacaatccaggccgcagccactgacgggaatttaccccaacgatatttaggggcaaaccgggaagaaccatcggcacggaaagtacctgtcaacaagtaacggttcataaacttatactcggcacgggcaatataagaaaacatcaccgaaccgacagctgaaccacctttccctccataatccaccaaatcactgccttgccagattccattctgtacctcatcgtccgggaaatcccgtaacttaaaataggtattattctgccggtccttattatatacgatggcccctaaagcgttcaggctgtgtttctcattaaaagtcttgttgtaagtcaaccggccttcgaactccatggtttgcccggcagaatatgcccagcgtccgacacctttctgatctccccaataaccactaccctcttgggtattactggaagcataagaactctcttctcctttccggcgttgatacgtatactgggtcaaaagtttcaattccggcagaatctgaaattcaaggttccccgtcaatctgaaattatcctgactataagtcgtcgtattttccgtcatctcaataatcggattcttaacataatacaccttccctccggaaatataaggatgcaaatacaaggacccatcttcattataagccggtatatccggtcgtgctgcagctgctgttgacaaagaagcgccgttcacatgccggtcagaagtagtaccggagaattttgcattcgcttttatccatttattgatatcggcatcaaaacccaacgtataagtatatctctgaaaatcagcagcttttaccattccttcttcgttagcatatccaaaagaagcataatatccgaaatcctggcttccaccccggatggagagccgatgttgctgagtagagccattacgcatgatatgtttcatccagggagtatcttcttcaccgaaatatccgggagccgtgaccttctgatacatcggatacagatttacatcctcaaacccatcggctttagcggaatttgtgatcgcctccaaaaacaacatcttgtactcgtcagcattcagcgtatttacatccgataccagacgggtagcactgtaatcataactataattaataatcggtttctgatttctttgtccggctttcatcgtaatcataatgactccggcagctccccgggacccatatatcgctgctgaagaagcccccttcaaaatatcgatactctgtacatcatcgggattcaattcattaatatcgaaatccgaaggcataggcacattgtccacgacaatcaacggagccaaagctcctgtcagggaaggtacaccccgaatttccagccgggcagcgctacccggcgaaccgtcgccattcaggatactcaaaccggccacctgtccctgcatcatatgggcaatattcgttgcagtagactcctcgataattttagagtcaaaacgggctactgctccggtcaaatcttttttcgtagccgtaccgtaaccgatcaccaccacctcatccagatcgctttgatcatattccataactatattgaactccccgttcccctgaacagttaattctttatttttcattccgacataagaaaattgtaacaccattcccgctttcggaatatttaaggaaaaatttccatcgacatcggaggcggtacctatcgtcgtgcctttcaatacgatagttactcccggtaaaggcattccttccttatcagtcaccttgccttttaccgttacttcttcgacatgctgcggtgttgctggctgttttaccagtataatataatcgtccatgaatttatacgacatcccctggccttgcaacacttgtttcaatatctcttccagttctacatcggtaaaatttgcttttactttcttactcaaagtcaactgatcgtcattatacacgaccgccttatttgtctgacgctggatttctttaaatacctcttttagtccggtttcacccaaccgcatagtcaaccgttgctgtgaccaaacctctgccgagactgaagtcgcaaaaaagacacacatcaaaaagggtaatttcatcacccaaaataatttacgcggcttgttttttggcagagcaagccaccaattcgcactttttttcataaatttgtaaattaattattaaatttatttccccaaggggaagatttgtcggtgcgcgcttccaacacgcaccgattttttattttctatttactacaatagtcctctcgttcaaaacaaattgaacattcgtaatctcttctataatattcaaaacataacgtatatcattatatttcttaaaagcaccggaatatttcaaagttttcagttcttcagcaacaaaaaagaaatccacatcgtaccaacggcccagcctgcgagtgagttcttccaaaggcatcgaatcaaaattcaggattccatctttccagtcgacatactgcgacacatctacctttctaaccgttccccgccgggtagtcgtctgataaacatattgttcatcaggttgtaagatctgttgccgatggtccgtctgcaccccgacctttccatgcactaaagttactgccgcctccatctcctccggataagccatcacattaaatccggttcccaatacggtcacgctcattcccgatgtctccaccagaaaaggatgtactgtatcggcagctacttcaaaataagcttctccctccagaaaaacctttcgttgtccgcctgtaaatgctaccggatatttcaatttcgaagccgaattcaaccagactttcgtaccatcggataataccagcttatattctccactccgcggaatagtaatcgtattgaaaagcatttcctcctgctgcatatccccggccttttgttcatatgtcagttccccttttctctttcggatcaatgtcccatctttccaaagcgaatccctgcaccattcctccaggttcacctgttcgccactagccaatgtcaacacggccttatacgatccaggcaggacagccggctgttgcgccatcggcgacatttcactactccgatcttcccacggcctttcgatcagtcctatagcgatcccgatcgtaaaaaccgcaacagcggcataccgccaaaaataatttccggacaaaaggaaacgccgtttatttccggacaatttctttttcagtttttccatatcctcccggacacgttccggattccggaatacattctctccctcacctcttttcaaacgctcacgtatccggcaatatctcatatagtggcgttcatcctccgccaaccacacattaagtctctccttttcctccggcgtaattgtttctgacaattcagccgtaatcaagcgtgctatctcataatacgcagacaaatctttcatcgcttatcaaatttgtatataaaacacacagctgataaaaaagatgaatgaaaaataattttttttgaaaaaaaatggtttatccttgtacctcaaaccaggcaagtaataacaataacgatcctgtcaattctttccgcaggatattcaaagcattgtatttcagggtttttacggaattaaccgaaattcctaactgatcggcgatctcctgatttttatctccttttacaaccaaacgcataatccgggcagattgtgccggaagacgatcgatagccgaataaagcgcttcaatagcttcctcttcaatcaccatcaaatcgaaatcggcatctgtttcttccgaaaacctcccggccagatccacctctttccgatggtcccggatatagttcaggcactgatttctgatagtaatatataaaaaagatttcacagctgcaaaatctctgaaatcttcccgtttattccaccatttgataaaagcatcctgagcaacatccttactcaacatttcattattaaggtaatggttggcaatattacacaatcccggatacagactcacaaacaaacgttcgaaagccttcatgtcaccggaacgcattttccgaaaatcctcagcctgtttttctagcatcttaccttaattaacctaaacaaaaatattgaaaataagaaaacaaaaaaaatataccctgaaaatcacgaaaaatttaggaaaaaaacttccccgaaagttaaatgaaaaactttcggggttcagtagacagattaaataaaatagatatctattcaaataataaaaactttcgtctccacgacaagtttattccatataactggaattatcccagcaatgtgtacagagctgttctttaggtaaaccgatcgctttcacgagatcgtccaagcgctggaattgcagagaatccaactggagatgctggcacatcaccctcaccatctccttatatttctctgaatccggatccgagtaaggtttcagtatttcgtccgtcagttcggaagttccttccaggtcgcggatgacacggcgggcaaataaatcaaaggtcgaacgggaagtggagaaattaagaaaacaacaggggtagatcaaaggaggacaggcgatccggatatgtacctctttcactccgcattcacgcaatttcacgacattgtctttcaactgggtaccccgaacgatagaatcgtccaaaaaaacgatccgggcatcccgcgtaaacgcctcgttcggtaacaacttcatcttagcgaccaaatcacgcatattttgattttgcggcataaaactccgcggccaggtcggtgtatatttcacaaaaggtcttttataaggaatccccttctcgttggaatatccgatagcatgtcccacacccgagtccggaattccggcagcaaaatcaagagtcaattcatcacgtttcgccatagcagccccacaacggtaacgggcatcttctacattgatcccttcgtaataagcagaaggatagccataataaacccacaaaaaagaacatatctgtttcctgcaaccggcagcaataatcggtgtaatcccgtctttcgaaacccgtatcgcttcatgcggtcccagatcacggactatattatagcctaaattggtaaacgaagagctttcactggccacaacataaccgaattcattcttaccgataatgatgggagtacggccgaacttatcacgggcagcataaatacaactgtctgtcagaattaaaaaagaacaagaccccttgaccatacggtaaacgttctctataccttccttgaatgtctctcctttgttgatcagaatactgactacttcggtcgggttgatggccgacccggacatttcggcaaagtgaatcttttccttcaacaactgagcggatatctcttccagattatcgattcgccctaccgtcactacggcaaaacgccccaaatgcgaagttaccgttatcggctgcgactccatatcactgatcaccccgatccccaggtaagaaccaatgaaacgtcccaattccggctcgaacttattccggaaataagcactttctatactgtgaatcgaccggacaaaatcctctccgttataaaaagccataccggctttcttcgttcccagatgtgaatggtaatcggtgccgtagaaaacatcggcaacgcactctttgcgtgatacgcaaccaaaaaatccgctcatataattgtagtcattgatttaaggctacaaaattacaaaaaaagtaaaaagtagaaagcagaaagcgttcaaattctccccgcaagagcaggttcttataaagcaagttatccggtaagaaaataaaaagcaagatctgttttcaaaattccaaaataatacttacatttgcaacgaaaatcacatctatatgcgtaaaaagccgatctactaagcacagaaggagtgcctggagatttttttgcctgtatcgggtgtattcaaaaaaagagttatgaaacgacgaacgtaacatctttggatgttaaacatttgaaaaacaacattttaattcggattatccgctaaagagggtaaagtatgtccgaacagttctttgacatgttgtgtttttcaaaataaaatgtttaactataaaatccaaatgttatgaattcaaaaagtcgttatgaattagccgcttcggtatgtcgcggaaaagtatggctcgacaatacagccctggcagccattagccgaatgtaccggaaacgaatagaaaatgcaacctctaaactggaagcgaccgtcgaacaaggacgctacgcttcattcagaatcgatcaggcgctcgatcaccctaaagcctcccgtcttgttttacaacaaatgattgcttcattggaagaggtcatcggtcaattatttatttttgaagcaggtagccgcatcaatacgaaccgttatacctgtcttatttcacaattccgggaaaaacaggctttagccaagcgcgcacttgagcattcagataaaaacaataccccggaagtgtttgtttagcaaacttttcattatttttgtagggtctcttcggggacttacatatttcgatgaaagtgtttcgcttttatcctgtgctgaaaatctggtaaatttaaagtaaacaaggagaagcaatacaaaacactcatcacttgcacgttattgcgtcaaatcacgtaatacagtcaagtgtggggtattgtttatttgtttacaggtttaccagaaccttcagcacaataaaccgataactccacactttctttatattaacgaatcactatcccggagttagatagtagctcaaacatcatgaaaaaaattttattccatttatttctgctggcctcattatttatggcagcttgccatgacgataacggaggtccctcttctattgtcatcgacaaagatcagcaaaaccagacagcttacgccgacgatacagaaaaaaccatccggttcgaagcgacagaagcctggcataccgaagtcgactacacagcaacaaaagcaacggaaaccgtagaaaaatgggtaagtctcgatccagccagtggcgaagcaggcgaaatcaccattaaactcgccttatccaccaattacaccggtactgaccgaaaagcgacgatccacatcatttgcggaggtacgacgatcacggtcatcatcgaacaaaaaggagaaactgaaaacggagaggtgccggatgaagattctccggccgatggagtacgtaaaatctctgaaatcattacttccaccgacggcgaaccgaatcacatcgtatttacctacgatgaacaaggacgtgtacaagaatactcactgtataaagaaatctccggtcagaaaaaaacagaatacgtgacgactctgacttactcagaagaccggatcgtcaagaaaacccaagcttacaacgacagttatacgacaggaacaacaacctattcgctatccgaaggccgtatcggcaaagcaagggcggaaaccgacaatttcgattgtgacacctggtactacgactcagaaggcaatatgaccaaatatatcgaaagatatacgattacgatgggaagtgtcgatcaggaaggaaatacaggagcaaccgtcgaagttctcgattcgactgtcaccacttatatctggcaaaacggagtggtgaaaaccatgcattactatccggaagacaatgtttccaacgatatcatcacctcggaattcgaatattacgacctggatgaaatccggccattaccatcggtaataaaactacaatattacccggaagaactggcgggtgaagatctgactttatttggttataacggtaatgttcctgcccggttcataaaaaaagtaactacttcgggagaccggtggaataaagacaatggcacgactacttatcgctatgtaaccgattctaaaggatatgtggtccaaatctacagcaaatgggagtccgcgcagggcaagaccgatgcagaagaaaaactggaatgtgaaatcatttatgaataattctacggcaatgaaacattacttatccttattcaccctctgtctgagtattattttcctatcctgcaacgatgataattcttcggacagcatcagcatttcaaaagatcagctgaaccaaagtgcctatgcaaacgcctcggaaagaggcattactttcactgcacaagaagcctggaagactgaaataaattacaattcggctacgaaggctacagatacttcgaactggatcaccctcgacccacccagtggtgaagccggaacagtaaccgtaaagattctcttatctcccaattatacaggaaccggccgtaaggctacgatccggattatctgtggtggtagtagtattacggtaacgatcgaacaaaaaggtcaaaccgaagaaggaaatacgcctatcgatccggaacgccctgatcagtacaagaagttggtcagtaaaatagagataaccaacacacattacggttcttccggtaatctgacccataaatcggaacgccttttcacttacgatgaactcaaccggatttccacctatgaggaatacgattatacggacaataaacgtatgctggactggagtgattcctacagttattccggcaatacgatcacttgtctggaaaaagtcgaagatcagaatcagatattcgaatataaaaccatatataaactggacgaagaacaaaacgtaaaaacatggacctgtgaatataacgaaatcggaaaaccggaaatcgatcagggtgaactgtcttatgaaaacggatacttttcaagctcaagaactgaagtcagcaattccggaccaacgacagaccaggctatttgggtagacggtaatctggtaaaagcaggagaaaccgatgagccacgtgccacaacgaacatagaatacagccatatccccaataatagtaacgtcgatttcaattacctgttatcccagaccgaatggttggattgcctggcattcgaggaatcaggcataaaagccttcggctgtttcggaaaacggagtgcttacctgatgagcaaagaaaaagacgggtacaacaatgacgaacatgtcttcgaataccggacagacaacgaaggctatatccgggaaatcaccgttacaacttacgatggccaacaccaggtaagcagtaaacgtattcacaccatcagctacatcgacgcaaactgattctatcgtttcatcgatcggaatcattcccctatcttcccgctgaaagccgattcgcttcatatagagaagatagggtttctttatttcgccataacaaccggggaagcgtctgatatgattcactttgaccggcgatcaaacggcttttacatcataaagtcaactttgttagcgccggacattctttatttaaagtttattttataattttgcagcttgttataaaaaagtgtgctagtcatgaaacggattgattttcaaccggtattattcgataccctaaaaaattattcgaaagaaaaattctttaccgacctgatggccggaattattgtcggaatcgttgctcttccattagccatcgctttcggtattgcttcgggggtaagtcccgaacaaggtctgatcacagccataatcgcaggatttatcgtttccttcctgggagggagtaacgtacagatcggaggaccgactggggcctttatcgttatcgtttatggtattattcaacaattcggtatcgagggtctggcgatcgctaccgttatggccggaatcatgttggtcttgatgggagtatttaaactaggcacaatcatccgctttatcccttatccgatcgtcgtcggatttaccagtggtattgcacttaccattttcacgactcagatcaaagatctgttcggattaaccatggacaaagtgcccgccgattttatctccaaatggattgcttatttccacagtttcgacacaacgaactggattgcactaggggtaggaatcggaagtatcctgctcattatcgtcactccccggttttctaaaaaaataccgggttcgttgatcgccatcattgtcatgaccgttatcagttatctgttacgccatcacctgaatatcaccggcctggaaaccatcggcgaccgttttgagatcaatgccagcctgccgactcccaacggcttagcgtttaatatcgaaaccatcaatcagcttctgccggcagctttcaccatcgccattctgggagccatcgagtctttattatcggccaccgtagcagatggagtcaccggacataaacacaattccaatacagagttaatagcccagggagcagccaatatcgtagttcctttcttcggagggattccagccaccggagcaattgcccggaccatgaccaatatcaataacggcggcaaaactcctgtagccggtttgatccatgccgttgtattattattgatactcttgttcctcggccccttgaccaaacatattccgatggcttgcctggccggcgttttggttatcgtttcttacaacatgagcgaatggcgtacattcaaatcattgatgaaaaactccagatcggatgtcgctgtattattgactactttcttattgaccgtcattttcgatctgaccatcgccatagaaatcggtctgttactggccctggtactctttatgaaacgaatgagcgaagtaacgcatatcacggttgccaaagatcagctcgatctgtcgaacgagggcgaaatctaccatgaagaagaaaaactgatcgtaccgcaaggagtcgaagtatatgaaatcgacggcccgttctttttcggtgtcgccaataaattcgacgaatgtatgaaaaccatcggcgacaaaccccgcattcgtatcatccggatgcgcaaagtaccgtttatggatacgacagggctgcacaacctggaaagcctttaccgtttatctacgaaagaaaaaatacaggtcatcctctccggagtaaacgaacaggttcgtgcaactttggtcaaatcttcctttgcccgaaccatcggcgaagaaaatatttgcagtaacattcacgaagcattgaaacgggcggaagtatgtctgaaaagttaaagcgctgacttttcagacaccccggtctgcatcagaatccgaaatcatcgagtattacctcttttttctctgcttcctgaaaaggtttagcttcctgatgcaccggattcccttcgatataaatggcgcggaacggacgtaccgggcagacatattcacatcccccgcatccgacacaaatatcgggattcacggaagggatcgtcaagccatttttataaggaatcatagtcacggcctgagtaggacaatgttcggagcaagccccgcaactggtctcgtcggtattgacgatacaattttcgcggacaaaaaccacccgtcccatctgcagcttatgcttttcctctttggtaagcggcaataaagccccgttcggacacacttcagaacataccgtacaatcgaagttacaaaaaccatgaccgaaatccattttcggttgcatcatcccccctaaaccataatccataaaggcaggtttcgacacacgcgaaggacatttggtgacacaaagatgacaagccgtacaatgtttcaataaatgctctgcactttgagaaccgggagggctcaacggatgctctctttgccaggatttattggctttaacgacagcctttccctgagccagcactttgttgggaagaagtaaagacaaagcccctacggtagccacaaactgccgcttagaagtatccaccggcttttccggcgtcttccgccctttcttccaccccaatccgtattttatactatgcttatggcaaaccgacagacaattatagcagtccacacaacggctctgatctacctttttggccttgctatcgatacatcccgccttacattgccgctcacaaagcccacatgaaacacaggcatcggcctctatccgtatccgcccaaaagaataacgcgataagaaacccaataatgttcctaccggacagacagtattacaccaggtacggccatacttccaggccaaccagccaatcccgcagaaagtcaggagcccgatgaaaagagaggccatactcaatacataaatatcggtatgataaaatgtataattaccgaaactattgaatacccaggccagcaaattatttacagccaaataaacaggccggaaaacatttacccccatccgtccaaatgcactatatggatcgagcaggcttaacaaaacggtagcaccgagtaaaaaagccaacaccactattcccaacaccccataacgcaaaacgcgtttttcacgggtataacgataatgctttttacgatttattctcttcgctatccaagctacgacatcctgaaaaatacccatcgggcaaatcaccgaacaataaatacgcccgaataatagtgtcgccaccagcaggatcaatacaattccgaaactccccgccaataaggccgggacaaactgtatccgtgccagattaggccatcctgtagttaaaccggcaaaatccaggaaataaaaggtaatcacggcccccatgactaccgcaaacaaaacacgtaatttttttagcataacatcccccacctttagccttttgcttttagcttttagccttttgcttttagcctttagctttttgcttttagcctttagcctttagctttttgcttttagctttttgcttttagcttttttacctttttttcaaatcttaatcctcttcactttcaagcgattgatgtccatcgtaccgattttaagctcctctcctttagccaaatgtccaaccacctccagaggcatcttttccacctgattgaaaaacttagtagctgccgtatctacagcgacaatatccggcgacataaacaaccccttggccagcaccacgtcggcttctgattttccgcgcggtccattggttttcatcagacggtaagcatccacgacattcaataccgccggcttactgattgtgcaaatatcagcgatacattgctgcaaatcattgcgatggaaaaatccgcgatcccagacaatccccatatgatttttcatcgaaatggtcattttagccccaccgtgatttttcaaaataggaacattgatccacacatcacaatccaaaatagccgaatgtattttagctgttttcaggcttttggccttaggtagttccacttcccggtaataagattcctcatgtgccggcatcaccttagcaccggccgctttggcagcctcttcgattccgctgtttttataacatttccgccagtcatcgcaagtatgatcgaacacaaccacctcctttgcaccggcatcgaaacattgcttaataatttcagataccaattcaggattggtatttcctgccaattcgggcactttatcccaaccgatattcggtttgacaaccactttttgtccggctttgacaaatttccccatacctccgaattcagcgattgctttccggaacatttctgccggttcaccacccattacggcgaccaaatcgcatcccccggcctgagaagtattttgtgccatgatatccatcaccccatcccacttcattgtcacagcagcccctgtcaaggctagtgtctttaaaaattctcgacgatccataaagtctgtttataaagttcgtaaagttataaggcccatcatacgcacgaacaactccttaatccgtccgccatggaaaacgaaaacacatttcattatacaggcaatagtcggcattcccattgacagcaaaagtcttcactacagcagcccccgcaccgagcaacaactgtcgggcataattcaaggttgttccggtttttacccggtcctctaccaataatatttttttcccttttacctcgaaccggatttcctctaacaaccggggccggtcgtacaattgtttttgatcggcatcccttaaatgcaatttcagcaactgcatatccagattcaaacgctgattcagcatcgctgccggaataatacctccattcgcaacagcaacaatcaaatcgaatcgttcttcgaaagtaatctccagaaaacgctgtcttacttcctcaaaagtcttaacattcatatttagccaaccctttcaggattacccagccaagcaccacttgcaacaacattcccgggaatccgattttaaaatcttgcaatgcagcagacaaatccgaagcgatcaaccattcggctataccaccgagcacctgataggccaccaccaccgcagcgacatgcaataaagaaacccgttgacttctgtcggctacaatagctcccaccaaagccagtaacgtagattttaccaacaaaacaggtaacatccctgccggcggcatcccgaataagaggtgattacacaaaggtgacaatacagcagtcagtatacccactttcaaaccgaatttataagaagcgatcaaagtaaaaaaatagatcggtaaaaatattttacctccatccggcattaaatggcacaattggggaagcagcatatttcctccgacaaaaaggaccgcaaacaaataggtccggacattcacaacagaaagatttaactgacgaaattgagatacgatcatcatcttagtgcatatttaaaatttaaccacttcaaatatacaaatttttcatagttttgatcaatcgctatacttttttccgattgaaattaaaaaaacaatgcttatctttggaacatgaaaattttaggaaatatcatttggttactattcggaggaatcttcgtcgccgtcgaatatttcatcgccagtatcggattatttatcacaatcatcggtattcccttcgggctccagacagtcaaactcggtatattggcattatggcccttcggaagcgagatcgtacataaacaatcgccccacggatgcctctctaccctgatgaacatcatctggttttttataggcggaatctggattttcctatcgcacattttttggggagtcctgttttgcatcacgattatcggtatcccattcggaatgcaacatttcaaattagccggactggcactcactcctttcggacacgatgtaaaataaaaccttttatcttacaaacaatatgctgactccgatgacacaataaatcaaagattctgccacattcaccgccaaagccaccttagggttttgcatcaagcgacgagctaaccgatccgccacagcagctaccattgaaaaaatcaggaaagcctgaaccataaaaacaagccctaacaataacatctgaggaatgggattttctatccctttatctataaattgcggaaaaaaagccagaaaaaacaagattaccttaggattcaatatattcatcagtatccctttccggtatagttttccactgacagcagcgtctcccgacaactcgaaatgattctcccgacgggccagaaaagcttttactccaagatacaacaaataagcagcaccggcaaacttcaacatcgtaaaagctacaggagaactcatcagcaaaatcgaaacacccagactgacagccgttacatgagcgatcaagccggtacacaatccggcggcaaagaccatcccggcctttcgtccccgggtgatactctgtgtaatcacaaaaagtatatccggtcccggcatcaaagtcagcagcactgccgcactaataaatccccaaaggttcataactataaatcagattctaattattttcagctaaaattaatgctaataatcaaaaaaaattaattttgtgagaataatttaatcaataaccattaaaatccatcgatcatgatttcactgattatcctgggtattattttcctgtatgccattatatcttacaatacgctgacccgaaaaagaaacaatgtcgacaacgctttcggttcgatcgatgtcatgctgaaaaaaagattcgaccttattcccaatttagtcgctactgtacagcaatacgcgaaacacgaagaagagacatttactaaaatcacaaatttacggacgaagagttacgactccctcacagctgaagaaaaagcagattttgacaaaacattcactgctgctaaaaataatttctttatggtagctgaaaactatccggccttacggtcttcggaaaatttcatgcaacttcaaaaaacactgaacgagacagaagaacaactttcggcttcccgccggacctataatgcagctgttacggattacaacaattcggtgatgacctttccatccaacatcattgccaacctgttcagttttaccaaaaaagaagtactcgctattccggaggaggaaaaagtgaatccggatgtaaaaaaattgttccgatcttaatccacagttatggaacaaaactttcaggatatttatggacaattgcaatcccgaatccgacaagcagaagacaagagactgcaattaaaagcgaaaggaacgaaaaacgggctgatagcggggggtattacccttgtggcaggagttgtcgtcagcctgattatcggagggggatggccgggtatccttatagcatgtatgctcggcttgatcgtactattttcttgtattcagtccaagtcgggagaattatgtgcttattataaagaaaatatcatctcgtccattatttcctatctttgccaggaagcaagttaccggccggaaagcggaatcgcagaatcggtctttatgaacagccggttattcagcacctctcccgaccgttatcgcagtgaagatctgatttgcggaaaaatcgataaaaccagttttatctgttcggaaattatagccgaagaaaaacgggtcacgaccgattccaaaggccgcaggcaggaacactggatagatattttcagaggtttcttttttatagccgacttcaacaaaaactttcagggccaaacggttgttttccgtaactcctggttcaaactcaacctgggtaaacagagagtcaaactggaaaatccgaactttgaaaagcaattcgacgtattctctacagatcaggtagaagcccgatacatcctcactcctaatttaatggaaagattactcgaactcgattccaggtttccggggaaaataacggtaagtttcagggattcttctgtcattatcgccattcccgatcaaacgaatcattttgaaaccaacatttgggaatgccagttgaatacggataaactgaaacgggaattcgggaccttggtcaatctatttcaaattattcatgatttaaacctgaatctgcgtatttggaccaaagattaactttttattgatttatgttactaaatatcatttacttattagcagggtttattattttagtgtatggagccaatttgctggtcgacggtggtgcagcactggcccatcggctgaaagtaccgaatatcgttatcggtctgacggtagtagccttcggtacctcgactccggaacttgtagtgaatatcatttcatcgatcgaaggaagttccgcgctggcattaggtaatgttctgggaagcaacatattcaacatcatggcaatcctgggagtaaccgccttattcgtccctatcggaatcaaaagatccacaacatggattgaaattccgctggctgtactggcagcagttcttatcctgatattggcgaacggtgagccggcaggtatcatcacccgggcagaaggattttgtttactttgcttttttgccgtttttatcgcctacaccttatttattgccaaacggggtggtcaggaaaccgaagaagtaaatataaaaccctacagcctgaagaaatccgtactttttattttgttaggtctagccggcctcgtcggaggaggacgcttattggttgacggagcagtcagtctggctcagatggcaggtatttcggaacgaatcatcggattgaccattatctctatcggaacctccctgccggaattagccacttccttgatcgctgcccgcaagaaaaacgcagatatagccatcggaaatgtcgtgggttcgaatatcttcaataccttcctgatcctgggagcttcggccggcatatcccctctgaaggtaacaacggatagtgtaaccgatttatgggtcaatatcggagtttccgtcctgctgtttatttttgttttcaccggcaagggaagacagatcaaccgctgggagggtgccttatttttaaccctgtatatcacctatctgactttattgatcgtatcataaaagaccggcatgtttttttataccgttatgaaaacccctatcgtatatctcctattcatgatcgttctgtatctgtcttgctcacctcgtccccaaagcccggccgatattcacaccgatctcagcaataacaagatattacaattatccgaactattcgacaggatccgttatattcctttggaaactccagataccgctttgatagccaacgtacaatcggtcacttatcataacggccgttattatcttatcgccgaaaacaccctttatgttttcaaccgccacgggcaatacctctcccagcataacaaccggggacggggagcaaacgaatacagcagtatcttcaaagtaaaaagttccatcggtgattctgtgatctatgtatcgggcgataacggtaaaggccacatcgtcatggcttacgacaagaacggaaactacctgaaaacattgatacaaaaccgatccttcaatatggaatttaacgtactggaaaatggtatcatcatttcggatgggcgaaccgtctccctatatgacaaacaagggaaattggaaaacgaaattcggatcagtcctttcgattctatctctttcggtacgagcaattatttatccgatttctccagccaggaggttatattcagttgtcccggtagtgacaccctctattttttgggtaaaagcggtattacccgtaaaatatccctggattacggtcataatcaaagcccggaacaattcaaaaaatcgctttcgaaaccgatcaccttcccttattttcacaatttcatttccttaggtaaaaccgtcctggacctcatcgttatcggccagaaacaatacatgattcaactggacttaacccatcggaccgccacggtatgcgataccctcgtcaacgatatcgatcacacgattccctacattccccgggagatggtacaaaatcaaggtttgatggttttaccggccccggttttctttcattttatccaaccggaacaacttgcagctatccccgcccttcgtaacctgaccgaagatgctaatccggtaatcgtcgttttaaatctaaaatcctcctctttataaaacaatagaaatatttctcgtcctatcttcacaggcgaatcacagaaatcattaactttgtatctgtgagaaataattgttttaaaaaaaacacaaatttttttgacaaaatttataaacatatgaaaaagggatacattgttttaatcgttatcgctgtagttgtattgagtattttcttttggtttaaaggagcttacaacggcatggtcaatatgcgcgaagccgtatcggcccaatggtcgaatgtggaaaaccaatatcaacggcgcctggatctgatccccaatctggtcaatacagtgaaagggtatgcttcacacgaagaaaatacactgaccgaagtagtcaatgcccgggcaaaagccactcagatgcagctgaatatcgaccagctcgacgaagcggccctaaaaaaattaagtaacatacaaggggaattatcctccgctttatcccgattgatggctatttctgaaaattatccggatctgaaggctaaccaaaactttcttgatttgcaagcccagctcgaaggaacggaaaaccggatagcagtagaacgccggaaattcaacgatgtcgcccgcagctacaatgctttcatcctgcaattccccagaaacctggtagccggaatgttcggattcacctccaaaccctattttgaagccaatgcaggagctgaaaatgctcctaaagtagaattttgagcaatgaaaccatccgattttttcaccccggctcagaagaccgctatggttgccgccatccggcaagcagaaaaagatacttccggcgaaatccggatccatttcgaaaatcattgccggaagaatgtactcgaccgtgcagcccaggtctttgccgacttgaaaatgcataagacagccttgcggaacggtgtactgatttacgtcgcattagaagataaacaattggcgatattgggagatgcagggatcaatgcgaaagtgccggaccatttttgggatgacataaaaaacaatatgatagaaaaattcaaatcaggacagatttgcgagggagtttgcgaagctgtcctgactgcaggacagcagctaaaagctttttttccctatcaggcagacgatgtcaacgaactgtcggacgatatctcatttaaaaattaaacatgaaacgatcagtccttattttctttatatgcattacttcctttttacaggctcaggatctacccgaaccgatgcgccccaaacggatagtcaatgatttcactcagctgttcagtccacagcaacaacaagcattggagcaaaagttgagaaattttaacgacacttcttccacccagatcgcaatagtaaccgtacccaccctacaaggctacgcccccagcgattatgcccagcgtttagctgaaaaatggggagtcggccaaaaaggaaaagacaacggagtcttacttctgatcaagcccaagagcaggacagaaaaaggacaagtagccattgccgtcggatatggattggaaggagtcattccggatgccatcgcttcgagaatcatccggaacgaaattatacctgaatttcaacaaaacaattattaccggggaattaacaaagcgacagatgtactcatgcagcttgccggtggggaatttacagccgaacaatatgcccgcaaaaacggaaatggcagtgccgaagtgatcatcattcctatcttgatcctatttctcctgcctctgtttttccgaagaaaaaaagggtataccacaggtagccatggaagtggaggaatccctcccatatttttcggaggtttcggcggtggcggcagcaatttcggttctttcagcggaggtagcggaagcttcggaggtttcggcggagggagtttcggcggtggcggggccagtggaagctggtaaaacgataaatacagataatgcaaataccggacagtaccatatgttcactcctcaatcaaggcgaggagaaaggcatggaatatttgtttaccagatattacaagcctttggtactatgggcggcttctttcctgaacaacattccccagtcggaagatctggtacaggacttttttatccgtttatggaaaaaaaggacccaaacctcactacaagcaaccacctttaaatcttttctttacacttctgtacgcaatctggcattcgaccggatggaaaaaaaagatcccctgcgccatgctaccgatctgaagtcttccgacaaagcctgggaagaatacgataccctggaagaagaagtattggcccgggtcaaaaacgaaatcgataagcttcccgaaagaagccgtcaaatcatgcaatgtatctatttacaaggattacattataaagaaactgcagctaaactaggcatttctatcgctacggtgaatacgcttttagtcaacgccctcaaaaaaattcgtcaggcctatcccgatataacccaaaatatcatcctgtttttgcttttatccgacaaaaaaagataaaaaaccaaaaacacaaaagattaaattccaattcattataattattttttcaactatttcaaaaaaagttgtcttttccattcaatgaaaattaatattttcccgtactatggacaaatgcaaccgatatgctaaataaagacaacatcgatcaattacttttaaagcatctcttacaggaaaacgccgtagaggaagaacagcttctgaaagaatggttgggacacgatcctgaacatcaaaggtacttcgaaagattccgtcggcatcacattcaccttcaggctgctatccaatccggccgtattcaaggtcaatatattgaatttgcatcccgtctgaaacggcgtcatatccgccgtctttttatccgagttgcagccatcgccctgattctgctcggaggcggactttccttttacctgatccataccccttcactgattccgactttagccgaagttccgattcatccgggttcgtcaaaggcgattctgcatctttcttccggaactgcgattcccgtaaacaccacttcgcaggagttaaaggaaaaagatggaacactaatccgtatttccaatgaaggagtcttgaattacgcagaatcagccaacatttcgactgcaaacctgataaaccgactcgaaatccccagaggtggagaattcaaaatcaaactggcagacgggaccgaagtatggttgaatgcagagacagaactccgatacccaacggttttctcaagcctggaaagaagagtaaaacttcagggagaaggctattttaaagttgctaaaaatgaaaaacagccttttattgtcgaagtcggcgatattgaagtcaaagtatatggtacccaattcaatatcagtactcaaaataaagacaacatcgaaaccgttctggtcagcggtagcgtcagtatccgccaccacgaccaggagactcacctaaacccttcccaaaaggcagcctatacctcctccgggaaactaacgattgaagaagtggatgttttaccttatatcacctggaaagacggaaatttcatgttccaaaacgagtccttggaatcggtcatgaataaattagccagatggtacgatctggacgtattctacctcaacgagcaaactaaaaatattcacctgtcaggtatgatgaccagatataaagaggtatcggaacttttccactattttgaaaaaatttccaccgcccgtttcatcatcaaaggccggaccgtgacggtaaaataaatgttcgtttattcaaaataaacagccgggaatgtaccaccattcccagctgcaatcagataaaaagacagcggacaaagctaactgtaggctgtcggattgttttaccttaaaatacaaatttatggaatgtaaacgaatctttgtcctttcggacttaaaaagattaaaaattgtcaggattatgaagttattctcaatttttatgctggtattcaccttgggaggttttgcttccggatactctcaaaagcaagtcgtcactttgaatttaaagcaatgtgacgtcaatacgctattacaggaaatctggaaacaaaccgggttgcggttcgtttataacgaacaggatgtcgcccgactaaaacgctttgacgttaacgcccaacagaagcaagtagacgaaattttagaccatatcttcaaaaacacgccttatcagtgtgcttatgaaagcgacgttatttatatcacccctcgtccggtaggcgatcttcctcaagtcaaacaggaaagagtgaaactttccggtaatatcaaggacaaaaacggaaatgttttaccgggagtaacggtcttcatcggtaactcggacattggtacttcttccgatatcaatggtaactatcagcttgccatcctcaaaggtaatgcggtggaaatcgtctattcttttatcggaatgaaaaaagtcacctataactttccggcaacggaagatgtccgtcataatgtcgtcatggaagaagatcaggttgaattgcaagacgttgtagttatcggttacggaagcaagtcggcaagaaacctgaccagttccgtatcgtcggtcaaagcgaaagacctggaaaaatatgccaacggagccacgactttcgacaacatgccaggtggagcagtgaagggggtattggtcaatcaaaactcaggagaaccaggtgccaaagcaactttaaacatccggggaatcacttccccgttaaaatcgcaaaacaataatgaacccttgtatgtcgtcgacggtgtacctttctttgtcgagcgcagcctgaatatgctgaatccgctttcaactctttcccccaacgacatcgaaagtatcgacgtattgaaagacgctgccgcaacagccatttatggttccagaggagccaacggagtagtcatcatcaaaaccaaggacggtcaccgcaacgaacaaatgaaaatcagtctgggatataccttgagtgtcggtaaccaaattaaaaaattcaaaccattaaacacaactaaatttaaaaatctccaggaattaatcattaaaaatacactcggagccatcaacaaatcacagacgataatatcatatacggccaaatctatcctgcaatcgattatatggccaatacttcctatgataattacggaaatatgatattcgacggattaaaagacgaggctttcggtgaagaaaataccaattgggtagatgagaccaataataagaatgcactgactcacatgtataatctggctatccgcggaggtggaaaattatccaattactccttttctttcaatgcaatcgaccaggaaggtttgtttatcaacgacgatatgcaacgttacaacagtcgtctgtcctttgactcggatgtctcgaaacgcttcaaagtaggagcagccctgggttatacaatgaccaaacgccatagcggagctgcaggcgaagaaatgggtattacccgagaatggaatgtcagacccgatgtacccgtatacgatgaaacgggagaattataccgcatcgacggaactccgacctggggtttccccgtaggtttagccaatccagtcgcaaaccggcaaaataaaaacaaaaaagaatcttatcaattcctgggaaacagttatctggaatacaaaatcttcaacggtttgaaaatcagaggagatatcaatatctctatgtttcaggatcagtatagtaattacaacccgctggtcgcccaagacgatcggggaggcggaggcatgtccacccttcaggacgaccgcagcaaagccgccaatacttcgatcaacttcagggccgactataatttccagatagaagaccattatttcagttttatggtcggctatggttgggaccgttcttttagtgaatatacttcgcattactacatgggcttcccggatgatgaagtcctgaataatgcggggtctgcaacagaaacacactgcatcggagacgcaaagtccaaaagtgccctcaattccatttatgcccgtgccagctataattatctcgacaaatatctggcagaaatcaatttccgttccgatgcctcttccaaattcggccccggtaatcaaagaggttatttcccttctatatccctgggatggcggatgagcagcgaaaatttcatggccgatacagaaaaagtcgacgatctgaaattacgtttcagttggggacaaaccggttctaccaacatcgacgatttcgtctacagacaattttatgaaaaaggcaatccttatataggacaatcgactctgactcccggtttattacctaatccggatatcaaatgggaaagaacatccgaattcaacggtggattagattacgctttcttcaaccaccgcctgttcggtagcatcgacggatactatcgttacaccaaaggtgcattggctccttccccctatccgctcgaatcaggttccacttcctatacgtccaacttaatcgacctctccaacaaaggcgttgagattgaaatcggcggggatattatccgtacagccgactggacctggacctcgaaattcaatatagccctgaaccggaacaaaatcgaaaaactcaatggagccgagctttccagtaacgatgtcgatacctatatagaaggtcagcctgccggcgttttaaaaggatatatcgtcgaaaaaatattccaaaacgacgatgaagtagttactctaaataaaacagccgtagctcgtggagcgaattattaccaggaaaagtcgaccggtatgggtgacttcaaatacaaggacctggatgggaacggttatatcgacagtaaagaccgggaagttattgctactcctcagcctaaattcttcggaggatttttcaattcggtcaattacaaaaatttcaatttgtcgttcgttttccaattctcccaaggagctaaagctgctgtttataatatgatgagcgatatgtatgggtatattggaaataacatctatcccgaactctatgggaaaacctggagtcccgaaaatcccgatgctcgttatgcacgtctggtttataccgatccttccaaaaactctcgtttctccgatcgttacatttacgaaacatcgtatttacgcttaaagaatattactttctcttataatttaccacagaatttcctgaagaaaatcaatgtacaatcggccatgttatttgtcagcggctctaatatctggaccgtgacccaatggccgggtatcgatccggaactgatcagtagtttcactacttcacagatgaccctgaatgaagatccctatccattgagtaaaacatttaccttaggtgttaaagttgaattttaacgataaaatctcatactatgaaaacaacatatattatttctaccttatttctctctgtattgatttgggcatgtgacctgatgggagacgtagataaagtaaaaccttattataaactggaagaccaaaccgcaatacggaatgcccagagtgcagaacaggtgttacgcggggtatatacccaatggagggcctgggatctttgtaacttccgaagccatatcggcctgctcgccggttcattagcactctcgggtagtggtggattggcaggagaaaccggtttcaccgacaacaatgtactggaagacaatagtatcatcggaaatgtctataataatttatatgatgtaatcaacgcggccaactttatgatcgaatttttggaaaacaatacggtaaaagacctggaccctgcgagacgtatggaaatattaggcgaaggctatttcaaccgggccatggctcactttatgttgttacgctatttcgggcaattttacgataccgattctccatatggtatcgtcctgtccgacaaaccttaccgggaaccgttagcaaaggcccgctcgactgtagctgaaagctataaatttatcgaatcggatctcgattcagctatattatatgctccggacatgcctatgagtaattatacgcccactcatgcgcaggccggaaaaacaaccgcacaagccctgaaagcaaaagtattactaagtaaaggagattacgtaaatgcagccctactggccgatgaagtgattcaaacagccggcaactacggatacgggctggttgactttatgagtatcttcagcgatatgttcgattctcctgaagtgctgttcgctccttatgtctccaactatgaagaacaatgtagtttcattttagaccggacaacttatagttcttattctcaaaaaatagccgatgcgatggatcccactccagggaacaaagaaacaggagaaggttacgatccccgttttgccgccccgtttcttacaccggacgtcatcacaacttctttcaaaaacgggaaatatcctcacagtaccaatgatgacggcaagagcaatacctactacttcctgcgtttgggagaagtatattatatccatgcagaagcggaagcccggcagggaggcaatcatcttgcggcagcccgtaccagtctgcaaaccgttttggatgcccatgtcccgggagtatatgacgtgagtactattcctgacaaccagcttttagaaatgatccgccagcacaaatggatcgacctgctttttgaaaaccaggaagagtggtacgatatgatcaggtattataaacacggcgatttagacatcaccaccatacgcccgaatataaagtcggataaacaattgatcctacccatcccgcaatcggccaaagcaggtaacaacttactcatcgaaaacccttaaaatccccaaaaatgaaaaatctgttaactgtgctattccttgttctggcaattcagtattgccaggcacaaaataaatcttttcacatcaccggctctatccaaggcccatgtgaagggatggttttcaaactgttggataatagctatcctcctcaaacaattgcaacaacggtcattaaagatcattgtttcgaattgaccggggaaattccggcacccggcttttatcgttggatcatcgatacgactcccgtagggaaaaaatcctcggaagccaactggttggccggccatttctatttggaaaattcggatatcactttccagggagatatccatactttacccacttattactggaatccggaacgtaaaggtaagatgataatccagggttcggagacagaagatctgtatcagtcattcaaaacttctatccaagaactgagtaaagccagaaatcaggcagacggcgaatacctcgagcaatatcaccgtccggcattagacaacatcttcaataccgaggagggcattcgcctggcccgccggatctccgaactggatcggcagatcattcaggccacgatccgatttatcaaacaaaatccggcttctgtagtggctctcgatcaagccggttatttcctgctcggagagatcgacttaacctccggtcagatcgaagatctgcaaaatacactttccggggtttggggaaattgtccccgtatgaccgaattcaaggaaaaagcagagatggccaaaaaaatcgctataggagccccgtttcaagacatcgaactcaccgatccggaagggaaaaaagtaaaattatccgaatgccttccaaccggaaaatatgtgatgctcgaattctgggcatcctggtgcggcccctgccggggtgaaattcctcatctgaaacacgtctaccagaattacaaagacaaaggattcgagatcatcagtgtctcgatcgatcaaaagaataaagattggcaaaaagccatgaaagaagaaaagatgccctggatacaattaaatgatccgcaaggagaaaacggaccggccatacaagtatataatgtgaccggagtaccccattgtattctgttggacaaagaaggtaaaatattcaaaaccaatatgcggggcgcatacctggacgccgcattagaacaattaattccttaatacgatgaaaaaaatatttttagcttttttatgcagcagtagtttagtcgcttgccaaactaaatatgacggttatatcctcaacggtaacatcgggggaaacagtgaaggcatgaaagtacagttagtaaacgaagccgtctatcctccggtcaccatcgacagcacggttattaaaaacggcaggttccaattgaaaggtaaagtcgaccgtcccggtatgtatcaattaatcatcgacaaaaccggccaggatgacccgtcccaaatgttagccagccggttttacctggaaaattcggttatcagttattccggtcacgtcgacagcctgcgtacttattattggagcgatgaaaccttccggaaagatccggtaataaagggctccgcctcccaggatctgtacgaccggtatttgaaaagtatcgccgatctcagaaaacaatccggaaccataaatgaaaagtatctggaagtatatcatcggccggcaatggacggcatattcaatacagaagagggaatcgcgttaatcaaacaagaaaacgagatcaacaagaaattaaacatcgcccaatggaaatttatcgaagaacatcccgaaagcatagtaggatatgatttagcccttcaattcctacaaggcatgtatgtcaatttaaccgtccctcagctcgaacaattgactgcactcatcaccaaagcctgggcgaatattcccccaatggccgaaaacttcaaaaccatagctgacaaagccaaaacgatggctatcggcgaaaaatatcaggatatcgaactgatgaatccggaagggaaaatggtcaagctttcttcctgtgtacccgaaggaaaatatgtgatgctggaattctgggcatcctggtgtggtccctgccggggcgagattccacaccttcgtcatgtatatcaggagtataaagacaaaggctttgaaatcatcagtatttctatcgacgaaaagaaaaccgactgggacaaggcgatgaaagaagaaaaaatggtttggaagcaactgtgtgatcccaacggttttaacggacctgtcgcccaaaaatacaatatcacaggagtccccacttgtatccttctcgataaagaaggccgtatctttaaaaccgaaatgcggggagccgccctggatgctgttttacaggaactatactgattttacctactcccccggccaccgatgttgccgggggaaacctctgtaaccatcaataagaataaacctctcctttataggtgatttgcaaagagcggtcacttcccggaagtgtcttcatctcagccttaacaatctcttctttcggagaaaacctatttttcaaccgcagatacaatagtcctttatcgaaaagataatgactctccgcataacggatcagcgattctgcaatttcaaaattcagtatttcttcctcatcggtcatactcttccccacaccggaaacaatccaatccccatcgttaaaattccggggcgtttgttctccgttataattaattttcagactggcatcggatatccatttccggttttgcaaagcggaaacatgaaacacccaggtccttaaaccggaacacaaaacggtgagctgtccctcatacggagcccggcagcccacaatttcccaatgagctgtctcagtggtcaatgccagatcgtctgttacaaccttaaaaaccgaatcctgtcccttccatccgatccattcgtgttcattcacttgttgaagacgatagtccgggaaaagttcttctacccggtcttctccttcctcatccaaggccgtcaaatacgtgttcattctcaaagcaagatcccaaaacgacaaaatagaagccatattaccttccaaataatcgaaattttgtttacctaactgataacctgcatgagaatcatagccacactcctccgaacaagctcccaaagaacctatcaaaacaagaattagagtcctgtataacaacgatttaaatattttcaaaactttcataacttattccttcaaaaggaatccaatattttatgtaaaattaagtaaaatatttcaataaaccaaacaatacatttataacaaattctattccaaaacttataccggtgaaaattctcccagtcaacccggaactttccatccgaatttaagtataacaagtatcattaaaacgtttaattatggaaaaaaacactcgtaaaatcgaaccgggtacacctactcctgacccgaaatatcaccttgaaattacagcagacggcccctatctggtatatggaaatccccctcttcaacaagagatcttcgttttaaataaagaacaaatcccctgggaatatgccaaagggcataaatacccgaccgacaacgaacccactgctttatgccgctgtggtcagtccaaaaatcatccgtattgcgacggttcccatcaccatgccgattgggatccgacgctaaccgccggcaatatccctcttttagagaatgccgatctgtatgacggtcctggagttcagttggccgacaacaccgaatattgtgtacatgcccgtttttgtatggccagaggaacggtttggcagttgacggaagattccgacaacaccgaagcccatgatctggccgtacacgaaagcatgtactgcccctccggccggttaaaactttgggacaaagaagaggaaaaattttatgagccccccttaaaaccggctttaggcctgatcgaagacccacaggaagaatgtagtggtccgctctgggtcaaaggaggtattcctgtgaatggacctaacggcaccgaatacgaacaacgtaaccgggtcaccctatgccgttgcggagcatccgctaataaaccctattgcgacggtacccatgtcacggtccacttccaggaccacctgcccctcagtaccgaattagaagaaaaaatgaaataaatacagattcgaatcgttcggttactctattgtttcaatcagagtttcagacaatggaataaccgaactctcaaactgttaagcatgcataaatccggaattacttccaacttcgataggggcggtgtgccagcattgcattataataacgcagatctccggtcacttcttctcccaaccattccggcttttcaaaaagttcatcctcctgctttaattcaacttcagccagcaataaccctttattctcccccagaaactcgtctacctcgaaaatatgcccccctactttcactaaataacgaattttgtcaaccaccccaggctcgcacaatttcaggagttcttctgcatcttccctggcaatctctttttcccattcatagcgggtaactccatgaacatcacttttaccttttacagtaagatagccctgttcacctttcacccgtatcctgaccgtcctttccggtacggaggacaaatagccctgtacaatccgaaaggattggcaagcatatgctttaaagtctccccggaccaaaaactttctttctatctcttgtggcatattgatttcttttacaacaaaattaaagcaaaagaaacacttaaacagccaaaaaactaaaaaaagtcaaacttgtccggacaaccctgtttaatttacctgtctgatagccgcaacagcttgtgtcaatctttcaaaatcctccgggaatacatctccaatagtaccaatccggaatgtatcagcatccgaaacctttccgggataaatgacaaaaccctgttgtttcagcaacccataaaactctgtaaacgaaaaacccggctccggataaagaaaagaagtaataaccggagactgcttttccggttccagcaaggtggaaaaaccaatagcccgcattcctgccactaatacctcatgattccggcaataacggcggtaacgggcttctatacctccctctgctttcaactctttcaaagcttgaaaaaatgcccgtacaacgtgagtcggtgaggtaaaccgccattttccatgccctttttccatttcttcccattgggcataaatatccagggacaaagaacgggcaactcctttgcatttcagcaatttttcccgagaagcgagaacaaaggtaaagcccggaactccctgtatacacttattggcactactaaccagaaaatcaatacccagttttttcatatcgataggaatccctccaaaactactcatggcatcaacgatccaggtgatcccgcgtccacgcaacacctctgcaatttcttcaatcggattcaataaacccgtcgttgtttcactatggaccaaagacaaatggctgattccaggatgatttttcaaagcctcctccacgattgcgggggtaatcagctccgtttctttcaaagccaccatgacataatccagtttataataatcagcaatggccgccatccgtttgccataagcaccattcgctataatcagtaacctgtcggtaggtttcacgacagctcccaaagttgcctctacgccataagtcccacttccttgtagcaacacagttgtatattccttctcatccagtcctgccacctccagcaattctttccggatcacagtaactattccttcattgtaatctttatcccaggtacaccaatcctgtaacatggcttctttcaccgtctcagaagtactcaacggtccaggggtcaacagtaaataatttctcatacacctattattttttattcattaaattatgtatcaggtccggcaattcacggatattatccagcacataatgtgcaccggctgccatcatccgctctctgacctcttgtttcaaagtatataactccggttcaggcatagttttgtattcctcctcggtcaaccccaactcattactacctgtaattactccgacagaacatacttttgcattcaatccttcccggatatcggcgatagtatctccaactttaaccacctcgtcaacagaaggaatcgccagctctgtcatgttccggtaaatcatataaggagccgggcgtccggcaggcaaatgatccggagttaccagacaatctacagtatatccctgagcagcagctccgggttgtacaattttcatcatagcgtcggtataccctgtcgttgaaccaatacggatcccttcacgacgtaattgttccattgtctctataactcccggaacaggagtcgtaaaatcctgaagtgaagcaaacaaatgtttctcaaaactctgatacatgattgcgacatcattctgattccattcccgtccatgtgctgtacgaaacctttcactcacttcaggcattttcaaaatagcctttatatgttcaatctttaataatcccatcggttcacgggcttgccggtaagtgatcgtcacaccctgctcctgaaacaccctcaaaaaagcattcaatggagcaaaacacccaaaatcgacagccgttccggcccaatccataatgacacaactaacttttttcatgtccttaaatcaaatattactgtaattagaataaaaccaatcaataggcatgagcagtttccagaggcatcaccttttcagacgctcttcgttttgcctgccggtacagataaacccaagcaccgacaaataatacactgcatcccaaacccacataacccgccaattggttataaaacgataaccaattgatatccggatttaaaaattcctttacggctaagacaatcaccgttcctaaataaccgatgaaatcaatcaatacaataaaaaaaccgacattcccccggatacggaaacaagctataaaacgatcaaagaaaatagtctgaaaacacaaataagccagatataaacagagactttgaataaataaccaaactaccggacttagttgcaatgcctcatatctcaacgaaataaaagacatggtcagcatgcccaaaatcaccaaactcaataaaatcaataaaacccgcatattattacggacaaaaaccattaatccgaagatgatcaggataatcaaagtaacgatactgtccaattgagcgaatatccatgaagaataaccactccccgcaacatcaaatattttcaccagaaaatcttcctttatatcccgtaaagccaccaacaaaaaattagcgactaaaataatagagagaaaaggcatataatttttgaataaagcccagcgttgccttccatccaaagtcatccgctctgctttcaaagccctgtcttcttcggaaggttttggcagagattgcaacacatatcccaataaagccaggcatggcaaagcacaaccaccgatcagggcaggcatccaaaactcactgacctgccaatggtccatcacaaacaatcccagggatttcgctgcacctgaactaatcaccatgctaatccccaataaactggctagcatatccgttacccgccgcccttctataaaactgaaaatcactccccacatacatcccaaagccagcccattaaaaaacatagcaaagatattacccggagacggcaggatagcaaaaccgactaaagccaactcagctaaaacaatcgcccccaaaataaattttaaacgatgttgtccctttaactcagaaatcaatttaatgccgataaacttggccaacaaataacctaaaatctgagtaatagtcactacaaccttataatccattccccaaatactcagcccatcaaatgtagcagccgtaaaaggtttacgcaatgcatatactaacgaataagaaagcagggccgcccctcctgcccacagaataaaaataaaatctgaaaatgatctacgatcccggataaaagaaaaattcatagccttgtctttaactgtgacaaagctatgaacccaatgttacgccgacattaaaaaaatatgacgaaataatgacgatattcactttttcaatgacactaccacaggccacatcctcggttgtgccatatccctccagaaacagtctcttcaagcagcttttccggaatagttcccggacgatccggatattcccgtttcttagcatccgtaacgatacaggtatgttcctgcaccggctgttcggaggaaatgacaccgcatttctgcatcagttcgttaatccaggcgacctgtccatctttaaaaatctccagtaccctattcttcatttcaaaatcataagccgtaccgattgaaaagcctgtgacttgaaatctcccttgaccaaaaatttccgttctatttcctgtggcctaccattcttcctgataacaaacccggctccccgcaattatttattaaaataactgtctaaaaaattcttcaaaccgatgtgtgattgtggtctggcaagcacctgattatcttttccgatcacataataagaaggtatggcctgcacttcgaacgaccagaaaaaagcctgattacaagtggtcatcggataagcgaactcatatttttcaacctgaatcttagcatccttttcactgagcagaccggcacacagaaaaaccagctccggctgctctttccagcgatcatataatttattcatccacggctgggccaatacacatccgacacacccggtagaagtaaattgcatcaccacgatcttgccttgcagtgatgcgttggaatacactttcccggtcatgacatccgccaattcataagcaggagcctcatcacccaccttcacctcctgcacgaactcgtcgaaagaagcgacatagcgaattttatctgcctgagcaggataaaaacaactgtccggaatatccttcagctccatattttccaaaaattccgtattccggtttcccggaattttcctgccgtcctgatctcccgaattggtataagaccagtaaacaggcaaacctgtatgtttttctataaataaagcatacgtattataactatgcatcactttatatcttacattggctttccatgacccattattacttttcgagggaataagcgtgacatcattatgccgtttgagtacataacaatcctgcccgttaaaaagcgtatccggcgcccgctccacccatacatcgacgatccgggaagaatcggaagcaacttcacgcagtttcttaccatccaggatttgctgcatcaaatcgagctcctcctggatccgggcaaaataatcataccttttcgcaccgggttcaacaggaatacgcgtaccaagtaacatatccagatatacacaagccatataaggctgatcgttccggtagaaaacccggttatcgatttgttcgaaggtaaaaaaataagtacccgaatcccgtactacctgtttaaagagaaaaggtatccgactggccagctcatccgacaactccgcaccgtcaaaagcagcattactgaccagtacagccgacacagactgtagttcatccaagcttttcacagcaagccgaacaatctcttgcggttgctgtgaccgacagccacaaaccacataaatcattaatatacaaaacaaaacattcttcattataatacaaagataaaaaatgttttcaggtttcaacaaataacaacaaaaaaaagccgctccccggaaagaagcggcttcccaaatcaaaatcccgatactttactttttacgtatccccttcgtagcaacctttttacctgtaccggtagccgcgatcttttcgacaggtttaccggatgaagcgcgtttcacccgttcgccttccaaataccgaaccaccgcatacttggcagcggcaatcgtctcccggttcactttttcaatgacactaccacgagccacgtcctcggtcgtacaatatccctccagaagcaataactgtacgatcatattattgatattcgtttcttcactatatccctctgcgacatacaactgttccatatgttcggcgaattcacacgcaaattccggataattcggcaaactcatcaattcctcgaacgtctcgctgaaactactcagttcgatattcagattgggattcaccaacaaaggactgaattctttcttcgggtctacaggtacaaaatccaccagattactcatatctaccttacggtcgatatcgtccatccggcgatagtcggctttcttcatgttctccagctgatagataaagaaattatatcgccacaattccgaactattcatttctcctttgaaaataggacgatatttctcgttcagcaggcgtttcacgcaaattttcccttcattgatttccgggcgggtaatccgtacctcttgaatcatccgtttcagctccatagcggctttctgaggtccggtaatctcccggcctttcttgccgatctccgttgaaagcataccacattgaatattccgggctttccccttaccgtcgctccctccgcgcatgattttcaccaggttcatcaccgattccaactgtccttcctcagcaataaacggttgccctcccggagtactggccagagaatcgaaaatcgcactgaacatcttccggtcgatcatcatttcccggctttctctttccccatacgatacggtagcaataaaccggttctgtatcatatcgaaagagaccgtttggatggtatacccaaccccgtcccgtttaaactgcttaccgccgaaaatctgaccgactacttccgtaatatcgatcttatccaataatttgaacgaagaagccagataatattgcttttcattttctacataatcccaatctaaaatatcatccagataattaccatgacgggcaatcacatctacaatattcttatctgccgtataacgcttcaaggtacgctggaaattaggaccatcctgactggtcgctttctctttcctctccccatgggcatccatatacaacaggaaattttcaggattgtccacccgggttatacctgcttcctccttcgaatagtttccggcactcagcatgatatcgatcttataaggcatcgtgatatcacacataccgctcaccgtgctccgggaattgagatcttcgacattactgtcggcactactttcgaacagatacttataatacttgatataatccgggtcgaaatccgtcgtccgcgagaaatcaccgacctctgtaccgatcccatacagattaccttcggcatcctgaaactcatggaacatatcgcccgcaatcagttttaccgaacggaccccctcgaggttattccgcaaccatttcaggataaaagcggcgatcatttccgacttccctaccccactatccccattgatctcgataacaaagatactaccgtcgttttcttccacggcaaacaaagaaccgtgacgcggattaccgccgatctctttaattttctcattgatcaccgtcagacgtggtttcttgacatccccgaaataatctaccttctgtttcaacggcgtaacgatcgtcttgatgttcccgttcggccccggtatatcgaaatacccgatctgcgggaaagaaatcagcttttcgggagcccccaggaaactgatcacatccgggacgaaccgggtgatatcttcgatcggaatgtcttcggtataattcagccggtagttatcggtcaggtatttcatatatcccttctggaaaatcaccagctccttcaccatgccatgtttcaccaccttacagcgataatcgtccgaatccatattggcgataaaccgggccaaacgaccgataaaaaaagacgaatcgggccgcaaatccaatagcttcaaataatcgttcggtcctgcctccccaagccgctttttcgaaatagtccccggacgatccactttgtggaacggatattcccgtttcttagcatccgtaacgatacgggtatgctcctgcaccggctgctcggaagaaatgacaccgcatttctgcatcagttcgttgatccaggcgatccgtccatcttcgaaagtctccagcaccttattctccatttcaaaatctttataaatagaaataccgtgctgtaccatctcgttgacactggaattttgtttcataaaagccgtctccaccagccggaccatcgtatgggtatagcgcttgtaataatcggttccttttgtccgcttgatcatgctgatatagaacaacaccactttccggctcacccggtggatctctttctcagccaccttaatatcccggcgccgcatgatataatcgttgatttccttcaattgggtgggtaatatctcggtgataaactcctctgtaaacatcttcacctccctgtccgcacaagctccgatcttatcgctgaaatacttcaatttggccgataccagccgatagaaagaatgatcgttatgtaataaatacagaaacaggatcttatcggttaccggcaaattttctttgttcatccccgaagcgatcgaatccatcatataccccatacacttctgagccagcaacgtctctttaaattcgggcagagcgcggagacggttgataaattcatctacccagatttgcaggttcaggtcactcaaccgaataccggtgatttcctcgaatgtttctccggctacccggacaatctccttgcggctgggttcgaggctgtctttttcaaacggcagattgaaatgcaataaaatttcccggatatatttcttgataatcacattgattccttccaatttcgatttatccaactccggatttccggttgcatcgatagctaaaatcttcactttactatccgagaacagaagatgctccatttcaatcagaatttcccgcatcacatttttctccatcggatcgtccagtacattatagttgggctggaacgtcttcttattagtgatatatttcaggatcaccgccttactgtatttcgaacttaccgtattgaaatccaggtcggcaatggccggcacttgcttataaatctgtgccagtaaattttcatataccttcgtaaaagcagcactccggataaactcgaatacatcccggcaagaaccgatcttgtcgccatgtaattcgatgaccgaatttaccgaccggtcgatcgtcgtaatgctcaccccgctacgctcgggagaggcatggtacaaggtccggatatcacggatctgcaaagaaggcgctttgtctttccggtatttagcggataaaggataatcgccgataatcgcatcgatcaattcctgaattttagtataagcgaaaatctcatccaaaatcgtatggctttccacctccttataagccgcatccaaccgcttagccgcaaacagtgtccaatatttcataaaaatgataaaaccgtcttccagttcatatttaaacacttgcttactctcctcggtatcggcaagaaaacctccgatagcaaagcggaccaaaccggtaggatagggcacagcagcaatcccccggtgtaacgccagatattggcagaaacaaagcagatcggcataagaaaacccttcccccacccggaagttaaacaaataagaaccatccgaaggcaaccaactgacttccgtcccttcgaattcagctacaacccgttgagccacctcttttgcccaactcatccgtaacatcgattctgaacggaaattcttattcacccggaaacggttcagattttccaccaaccgtctctggtaataaacgaagaaaggttcgttatggtatttaaaatcgtccggcagggccaatatatccagtttatccaaagctaccagctcatccagcaggaacaggtacaacgggctaccttcaaatccggtggtcttatgcaactgacggtttgcaacactattggcgttcgatttttcaatccgtccgatctgttcattgataaaccggatcagtgtctctttgatcttaaagcgggaagcatttttcggtaactcgctttccagcgtatcttttatttttttagctacctgtgccgtctccagcaaattattcaacatcagtaaagagttgttattgccgtgcgaacaggaattcagctgacgcacaaaagcagcgaccgcagcagcctgaggggtcaccgccaaagcccctaaccgatcgcccgtagccgacaaattcttggtggtcgataacgatgataccgcccggatattggcctgggcattgatattattgatgatataccgcgagatcgtacgccatttcggcatatgtttatccgtaaccttcacactgtcggcataagcttcgtcgagaaaaagagtaatcttacaagtattcatcagtttcaggaacgaattcaaagcttcggtattgaaatccgtataaccggtcggattattcggatcgttgatcagaatcgtcgtattctcacaaaacaaatcccaaaggctgccactatcgtcgaataaagccagcgtcgatttgatacggagtaatttatccgtcagccgttcataggctaaacgcccgtcaggcaaattctcgatttcgatatcgaaaggattgatatcgaaagtatcgtcaggcagcaaatccttatattcccaagcctgcatcgcattgtaaataatataaggtttcggctttccgttgggatgaaacaacagatcccggataatcatctgtaccgaatcggaaaccgaagtctgttccagattgcctaaagccgataagaattctttcacgatttgctgatcctccacaggcaaggcccggtatttttcccggatccccaggtcattgaggaaattatcgtaacggcctttattgttagcatcattatctatcttcgtgatataagcctgatatttctctaaaaacaggttgatgccgaaattcttatgaaagtgattcttcagggtacgttcataattgctggggataatattcaggatcaaccggcaagctttatacaccttatcttccagtcggtgcaaaggcttttgcagcagataacgtccataagtacggatctggttgcgtccgccgccttccaatacactcaacacctgaatctgggggcaatccgaataaaagtattgccggatccggctttcgaattcatcgatcaattcacgggtttgtgcctgccgtttttcttctttatggcaattctccagaaaataaataaaatcccgtaatttttccagggaatatttatcctgaacgatcttcctggagaacatatccagtttaaacacattcaaccgtttcaccgcatccccggtagtcccgatctgttcggtcagaatctgattgatctctttctcgtaggctttgatttgcagctcgattttttcccggaattctgacaggaaagagggattcacattttccagaatcaaccgcaagttcaattgcgtattggccggagaacccaatttcttggtatgtaccttattcagtgtatggataatcccgttatgaaaacagaacaccagagaggtattggaactcctcgattcccgcgaatcgtcgacaatcaccagacgggtcagcagaggaaaccatttttcaccggagaaaggattcacccgcatatgccgggctttcaccacaaagaccgaggttgtatccaccctcatctgttcgaacaattcttcggtagaaggattctccaacacttgtacactattcttaccgaatacttctccccggagcagactgaccgctttatcggcatttcccgaaaccaccgtcgtaatcataccgttcagtcccttgaaattcaccgcccaacgcatccggttgagaaagtcggccttctcagccccggttgtataatgggtactctggccgatcatctgctccaaagtatccatcaaataattccaatgcgcttcgttcaggtcaccggtcaccccgatcacatcccggtatttccgtaaatcgcgtacctgcccgcccaattgtacctgggagataaactcgatatggctactgcgcacaggaggagttcctaccgaaaaatcatgagtgtctttaatatttttcaagagaactctggaatcaggacttactgcttcggtatccaggaactcatcgatcttcttcacaaactctccccgccttccactcaattcgaaagctttggaaggatgatgcggacaaagcatcaaagcaacatccgtatatcccggaatatcttcccggaacttcaacaaataacggttgatctccgactgctggacagccgggtcatcgggttcttcaaaacaaagcttcacaaaactggtcagattgtcataaatatgacgcggcaaaaaaatctctgcccgttcccctaacgattcgtaaagattcagtaattgtcgggcctcattactcagaaatgccctcggttctcctttgattttcattgtatggttttaatttctactctttttttcatgacaaaaccggtcagttcgaacctcttcacttttatcgcaaaaaaaagcccgcctttcagcgagcttctttattctattatattttcccctatgccaacagaagcccgcaacgtaactttacgtttaaaattattgtccgtcaacttcatcatcacagtcatcataggtttctgtctttcatattttcaggtacaatattaagaattaatatacgaaaaccggccggtttgttaaagaaacgtgaaaattttaaagggaaacgtttgagtaaactttccttccaacaactgtataatatttaacaataaaggacggagacgggggtaccgggctattttccgacaaaaaagagaatcgcaataaaatccactttatcacgattctctcttcaaccacaaaaacccagtcctgaatcaggccatcaattattccccggattttgttccatcaacttattggcattgatttcgctcgaagggatcggataaatccgtttataaggcaaattggctttatacaattcgggatcggcggcagtagccattttttcagccacagcccgattggtttccagaagttgatccactcccatccgccaggtagcgtaccattcatgcccattctcgaaccccatttccagtatccattcctgatagatcgtctgtaatatatcggtcactcccgtaatagccggtaatccatgaccggaacgtaaagcattcagggtagccaaaggatctcctttcccggtacgggcttcacattcggctttcatcatataaatctctgaataacgcatcaggtaagtgggcattgttccttctgcattcgaagctttccgaatcgtctgctgaggtccgaaaacatccccgactccatttttcaggataaccgttttccggggatcgtccccgaccagttccataaaagactccgtaggtccccatttcccctcattataatacgcctgtacccgcgtggcctgatatttcacttcatctgtccctgcaaatccccgggtatagatcagctcctgattagaaaaatcggtaaaaacagccgaatagggggccaccaatgcccgttctccgtcaccgataaacgtattggcagcctctaaagcctcactgtatttccccatatagaaaagtactttcactttaagagccttggcagccattttcgacgcaaaatccgaagaagtaaaatccggggcgttcgatatagcatactcgatatccttcaggataaaatcatacgtctgctgaaccgtcgaacgggctttatagacatcatcggaagtagggggagtctcccggatgatcatcccatatttactgtccaatttatcatattccccgaacatcctcaacaaatcgaacatataccacccccgcagaaaccggatctctcccatcatggtggttttccgtccatcggtaaacagattatcgctcattccttccaaaacagccagtaatttcgtcgacgaattgataatcgtattaaaagcatcccaaaaaggagtatatgccgcccccaccagattcagttccggcaaacggttttcgatataatagatactcacaaccacgccgggattgtcgtttctttgcaaaataccggcagtcattgcatgatttccgatcgacatataagactcatacccgatctgttcaccataaataccggtcaaagcggtttctgccgacttttcatccgtaatcgcattatcaggagtcagattatgcggaggctcctggttcaggacgtccgtaatctggcaggaaaacagcagactaccgaccatcaaaaggataaatatctttttcataagcattcgtgctaataattaaaaattaagtcgtaacccgattgtataagaacggacacccggataaatatcactatcgtaatttcctccgtagttagccgtagcactacctaccgttgccggatcgattcccggatagcgggtgatagtgaaaagattggcgatagcgaaatatacctgtccccctttgtaatacctggcatcccacaataccggcaaattgtactggatccgcaaatgcgacagcttcaaataagaagctttgtgtacttccagattattcgtcgccggaaccggatcgtcgacatacaaagccggtaaacgggaagacgtattctgttcggaccaacggttgtaaaggttataatcgatcaggttgttcaacgaaccggaaatattttgcaaagtattgttatacaagcgttctgcacctaccgaataattgaacatcagatacagggataaatctttccaggacacattggaagaaaatcccccctgaaatttcggttccggattagcaatgatgacccggtctttcacgctgatatgcccgtctccattcacatcccggtaaataatctgtcccggtttggtctcgctgctataataataagtggcagtcccgttactcagctcctgtgcctttttattatattcctcgatctgtgtccaggactggaatataccgtcggtctggtaccccagaacagctcccaccggatgtccttcggccagtacttcggtaccgcttccctgtaccacacctttaccggcccaatcctgtgctccttcggataccaaagatttcaccttattgcggttaacggccagattaaaagtaacgtcccatttcacctccgtctccctgaaaatctttgcatcgacgatccactcgaatcccttattctgtacccgtccgacatttttatacatcccgctgaagggttgcagtgaagtcggaaaatcgatataccacaacaggtcgttggtgttcttataataccagccgatagatccgctcaaccggtaatccagcaaagcataatcgacagcgatatcgaattgcttggtccgttcccagcgcaaatcgttatttcccagggttgtcgggataattcccggttttcccagaaaatcgttcgggccataaagatccttattgttataattaccgatattctgtgttcccgtcactccggccgaaagccttaatttcaattcgttcacttcttcaatatccttcatgaaaggttcctgatcgattttccaggcaaaagcccccgaggggaaaaaaccgtatttattgtgcgaaccgaatttcgacgaaccgtcgaaacgagccgtaaaagtgaaaagatatttttccatcaattggtagttaaaccgtccgaagaccgaaatcagtccgtttccggacgaatttccgcttacatcgtaaggagttgtagcgctactcaggttattcaagattttgtccatcggaaaatcgacaccggtagcactgaaatcacctgccttgtaacgctcgaacgagactccgaacaaagcatccaaagcatgtatctccttaaatgtcccctcatatttcaatgtattatcccaaagggtacgtaccgattcgctacttccccgtacagctttaccggtataattgttataataattaccttcctgtaaaaaactgggataatattggtgggtgaaattaaagttcttagctacagagaaagttgaacgaaaacgaagtcccggaataatctgggcctccccgaataccgtcccattaaaccgataaacatcgttccggttggtaatcttcgttttggccaccggattatctgtcgtaccgatcttataataactaccgtcctctgcataaaccgggacatccggacgaaactgtttgatctgccacaacccttgtccttcctgggattgatcggtatacgccaaacttacattggtaccgaatttcaataccgaagtcacatcccagtccaggttgatccgcccggtataccgtttcaggtcatcccctttcaatactccattttggaaactcatcccgaaggaagtaaaatatttcagtcttgaacttcctcccctcaccgaaagctccacactgttcgttgaagctttctgtgacaatagtttataccaatctgtatcggcatccttcaggatagtcccttctttaatactcaaagccgtctcattggtcggatccacttttaacgtattgattgcagcatccatcatgacattccggaattcattcgcattcaatatgctgaaattctctatctgggtatcgaaattggtaaaatacttcagattcagctgaggcttttcattctgtatcccccgtttggttgtaatcaataccacgccattagcggccctcgacccataaatagccgctgccgaagcatccttcaatatatcgatcgactgaatatcgtccgggtttatggcgatcatatcggcttgttcggccggaataccgtcgatcacatacaaaggttcattggtaccttccaacgaagtggatcccctcacccggatcttcaccggttcaccgggtttcgccgaagccatagacacctgaacccccggcgctttcccctgcaaggcagaagcgacattcatcaccggttccttttccagatcagcagccccgacagaagataccgaaccggttaaatccctgagccgggtagtaccgtacccgaccaccacgacctcgtccagcttcctggcttccggctttaaagtaaaattataaaccccgattcccggcataatcgtcttctccgcctctgaataaccgataaatgaagcactcaacgtcttcgcctcagggtttatccgcaaggtataatctccgttgacatcggtagccactcctaccatagtcccctttatccaaacattcgcccccacaatcggagctccgttctcatccgttaccctaccgtgaacaacccgcaacgtttccgcattctgttgtttgtccctactgcccggaaccctagccaccgactgtccgggaagcaataaaagccataccattccgaaagctacagatagccatatcgaccaacctccgtgtcttcctttcaaaaccgttttctccatttcttgtctcataaattttccaggttagaaagattcgttttttcactagtattcgcattttttatcaataaggtttggaaaatcatcaacaaaaaaattcccttatccgtcaccacccgcaccagtcctgtac

SEQ ID NO: 6017 - DNA, 11757 bp, Unknown
  gut microbiota DNA sequence
atgtgtttgtataataaaaagggtatgaatacatggaatgatatatatgatttttctgaaaaggttctaagctatattttacggaagaaagaagaagagtacattcagccggatcaggatagtccggttgaaaagatggcagataagttaggaaactcagaaactttggcagaacgattacagcaacaatatcgttatgatcctattcgggcttaccggaaattaaagaactatagacggagaaggcgtattcgccgttatagtgtggcggctggaattttattggttttaggactaggatggggatggtttcaccagaatagtcctggcgatccccttttactgactcaaactattcaacccggtggtaaaaaagcagtattaaccctggccgacggttccgtttggcatatcggagattcggcaatgcttatacctactgcacaaaatcatatccgtatcgattccagtggtatgcttttacaggcagggaaagaggggaaaacggaaaataccgaaacctaccatctgttgtctattccccggggaggagaatttacaatgacactggcagacggaacgcgagtgtggctgaattccgaatcagaacttcattttccgttgcaattcggtggtgagcaacggatagttcaattgacaggggaagcttatttcgaggttgcaaaagatgctgcacatccttttgttgtagaagtgtgtgattctaaaatccaggtattggggaccggttttaatgtacgttcttattcggaagaagggcaaatagtgacgacattggtcgagggagcggtgtgtttcgaatctatagaggatagggttattttgaagcccggcgaacagagtattttggataaagaggggcaacttcagaaacgtgtagttgaggtttatccttttgtagcctggaaagaggggcgttttattttccgtaagcagcggttggaagatatcatggtcatggtgagccggtggtataatgtcgaggtttatttcgaagacgacgaatctaaagagattaccttttcagggggtatgatgcgttatgaaggtttcgaggcattgatgaaaatgatcgaaacggtcgggagcataaattgcaccataaaagacaatacagtttttatagctaaaagaaaataaagaaagacggaatattggcactattccgcctttcaaccggctaagccggaaatgtttcattataatttacaaatttatgaaaaaaaatggaatccgatgtcttctttttcaaagaagatggttaaaaacgtatttaatgatgaagtttttaatcttgtttttgtgtatttcttcttttcagttgtctgcgaatgtgtatagtcagatcgcaaaggtttctttggaggtaaagaatgcttcattggagcaggtgattcagttattagagaaagaatcgggctatatttttctgtatgaggatgcccaaatcgaacaggtacaggatttggaactgaactttaaagatgaggacctgaaagtggtgttggacgaatgtttgcagaattccggtctgacttataaactaatgaatcataccattgtgatttcgcgtaaaaatatcaatgatcaggtacgcatgactcccacaaaacttttgcttcaagggattgtgaaagacgcagatggccatgtattgccaggtgttgccgtggtattgaaagaaacgacgctgggtgtcgctacggatgtagaaggtcggtttaccattgaattacctaaggccgacagtatcgttttggtattttcgtttgtcggtatgcaaaccaaagaagtaaagtggaggggagaaaaagagctgaatgtggtattggaagaggcgatagctgaaatggacgaggtggtgattaccggttatttccagcggaagaaagatagttatacaggagctgccactacgttttcgggagagaagttgcgggagatttctaccggaaatattttgtcggccttatcgacgatagacccctcttttaaattgatggaggatatcacagcaggtagtgatccgaaccatatacctgaatttcaaatccatggcagtggcaatctgaagtcggattatgagaattcgcctaatatgccgacttttattttggacggtttcgaggtgtcggcggaaaaaattttcgacttagaccctaatcgggtatcgagcattaccgtgttgaaggatgcggcggcaactgctatatatggttcgcgggcggcgaacggggttgtcgttgtagagactaaagctccggagatgggagaattgcgtgtttcttatcatttttccggtgattttaattttgctgacctgagcgattacaatctgatgaatgcatcggaaaaattggagtatgagcaattggccggactttattcgcatccgaatatcggaatgaaggaagaattgcaggaggcatacaatgaacgtttgaagttggttcagcaaggggtgaataccgattggatgaagaaaccgattcatgcgcttggtttcagtcataagcattctttgttgttggaggggggggatgcccggttgcggtatggattagacctgaattatcagaataaaacaggtataatgaaaggttccgggcgtcaaaatatcggtatcggcattaagttgcaatatcgttataagaatttgcggtttatgaataatttaacgtatgatcatgtgaaacagaaggattctccttatggcacattttcggattatacctatatgaatccgtatctttatccgtatgatgaaaacggtcatatcaagcaggtattgaaaatcggtgacggggaggaatatgcattgaatcctttgtataatgcttcattgggtacgaagttcgagactacctatcagaattttattgacaatttttccgtagaatgggatgttttagagggattaaaattgaaggcagccgtgtcattgaataagaagatgacggttgaagaccgttttttacctgccgggcataattctttttatgaaaaggatttgaagggcagttatgagaaaaaagttacggatgatttctcgtatgatgcgaatgttatggctgcttatacgaaagaggtgaaccgtcatttattcaatgctacttttgtctggaatatcaaagaaacgaaaaacgacttgtttactaccacggcttataatttcccgaatgacaagatggaccatatcggtatgggggtagagtatcaggacggcgataaaccgagtggtgattatgaggtcagtcgtctgatgggtgtggtaggaaattttaattatgggtatgataaccgctatttagtagacttttcggttcgtagcgatggatcttctgtatacggttcatctaagcggtgggggacgttcggttctgtaggtgttgcctggaacctgcaccatgagaaatggttggctgaaaatccgtatgtaaatgaattgaaaatccgcggttcgtgggggacaaccggtggtcagaatttctaccctttccaggcgatgatgatgtattcgtataaggaatcggctattgacggattgacctatgatgattatatcggggcgttattgaaggctttcggtaatccggacctgaaatggcagcagacagaaaagttgaatgttggggttgattttactttattgaacagtcggttgagcggttatttcaatatttataaggatgtatcgaaatcggtattgattgatgtgttgctggctccgtctgtcggttttgcttcttataaagacaacctgggcgagatagaaaataagggattggaattaaatctccggggtgttttgctaaaggatgctgacagacgtatgcagtgggatgtgttctttaatattgtgaagaataaaaaccggttgatgaaactgaatgatgcactggcagcttataacaaatcccaggatgatgaaatgaatggggagatagaggaggggaaaaccagagctcccatggtgcgttatcaggaaggtaaatccatcaatatgatttgggcgaacgagtccataggtatcgaccctaatacgggagaagaagtatttattgcgctgaatgacgataaagtcaataaatggagtacggataattataaaccgttaggatgcagcgacccgaaatttgaagggaatttcggaacgatgtttatgtataagggttttcagctgaatgcttatttccgttacagctatggtgctgatgtgtataatcagacgttagtggataaggtagaaaacgtagacccgaaggagaatgcagatcgccgggtgttatacgatcgttggaaaacgccgggcgatgtggcaaaattcaaagccatcagcaatacggaggcgaccatgccgacctcccgttttatcgagcaggagaattacattaccttgtcgtcattgaatctttcttatcagtttgatgcggggcgtctgcggcattatgggattgagcgtctgaaactgtcgttaatcggtaatgatgtatttcgcgcctcgacggttaaaatggaacggggtacctcctatccgtttgcccggaattattctgtagctttacaagtaaccttttaattaagaagcaaatgaaaaagttaatatatttaccggtatgtttggggatgctgtttttttccgccgcctgtgagaattggtttgacgtgtctccgaaatcggatgtgaaggcggaagatttgttccaacaggaaagcggttttcgggatgtgttgacaggtgtctattcgttgatgtctgctcccgaaagttacggacgtcagctttcattcggctatgtggatgtgctggcgcagtattataatatttccgggaatacccaccggtatatcaagacgaaagattatctttacagggagccttatgataaggaggtcttatctacgatttggagccggcaatacaagggcattgccaatttgaatgctatgctgatgtttatcgatgagcaacggggggtattttcgggtgatgaggtgtatcgtatctataagggagaaattttagctttgcgcggtatgcttcattttgatatgttgcggttgttttccgcctctccggcaatagacaaggagcgaaaagccatcccttatctggagtcgtatactaatctgccgcagcatcagctgacggtgggagctgttttggagaaggtcgtgaaagatttgaacgcggcacgtgaattgatgcgggaggttgacccctatgggccgaattatgcgaaactggaatctttgtatcggaatcatccgttgttgcggaaccggcaaaagcatttgaattattatgccgtgacggctttgctggcccgggtgcaactgtatgccggcaatttaccggatgctttggaagctgcccgggagattgtgggagagccgggaagtgaacccgtcgcaccgttttcacttactactgcggctgtaaccgatgagcgtttattcgacagtgagttgttgtttgctttggaggaagggaaaatgcaggataatatcgatgtttatttcggggagtcggttataaaaaacggtattactaatagttccacagctttaagtatcagtatcaataaccggaacaaattgtttgcacagcaagatccggcggatgatgattatcggttgaagttgtggtttcaggaaaccaattctgctactgccgtcatgccggggaagtatgtcaatgtgggttgtatccctttgattcgtttgtctgaattgtattacattgctgctgaatgttcggccaatcagggattagcttatctgaatactttacgtgcccatcggggattggctgcgatgacagaggtcactgacctgcaagcggagattgccaaggagtatagcaaggagtttatgtgtgaagggcagatgttttactactataagcgtttaggactgaaacgtatcggggtttaccggacggtagcgattgagccggaagaggtgtatgtgatacccttgccggatgatgaattggattttggtttaatagaataaaaatgcggattatgaaatatttatatacgatagttatggcaatgctggtgttggcatcttgttcggaaaacgaacgtatggtgtatacggacacgcctggcatttatttcccggattatgtagtgggggcagatagtttggtgtattcttttcgaatgaaagacacggaccgggatacgattcagattcatgtcaagttgttgggagatttgttggatgaggcgggggagtatgaagtcattgtttcggaaaattcctcggcggtggccggaaaacattatgaaacgctgcagcatcggtttacttatgaagctgataaatcggtttcttcttttccggtggtggtaatgaaacccggagcggaattggatgaggcaactgtgatgctggaattgtcgttgaaagcgacggaaagtttatcgttagggtatcctgatcgggtaaatatgcgtctgatgataaccaatcaattggtgaaacctgcttattgggatatgccattagctctctatttcggggagtattcaaaagtgaagcatcagcgttgcattttacttatgggacatgattttcctttaacaaaggaagagttgataggatggggcggattgaattattacagttattggatgcagcaggggcgtgtcgtgtgtgagtattatgcaactcatacggaatatgatgaagatggtaatttgattacagtgtggaatcctttctaatttgatgtattatgatgaaagtaataaaatatataggagtggtatgcatgttgtctgttttggcaggatgtgtggatgacaaaacgattgatgaattcaaggtgttgaatcaggtcacgatagaggggttacaagagcggtattctgtattgttatataatcgtttacaatgtacgccggtcatccggacttctcaaaatgacgagagtaatttgtcctacgtttggtatgcttatactacgactacccgtaatgaagcagacacattaggtcgggaaagggagttggatgtattggcagaaccgtccattctcacccctggggaagcctataccctggcgttgaaggtaacagataatacaaccggtgttttttaccgggaggaaagggaacttgaggtgcgtacgcagtttaccaaaggaactgttcttttgtgtgaagagaatggtctggcggaagttaatttcatcccagatgatgagagtaatacggttcttgaggatgtatatgaaagtgccaataaacaacttttggggagaaatcctacccggatattctcggtgaatccgaatgcttatgccacttttctgaaacaggagttgattttttgccgggatgaaaacggaggtgtggtggccagtccgctttcttttgagaaaatcaagacgatgagggaagcctgtgaccatcacttcgaggcatcggaaatgagtccggaattgtattataaagggggtatgattgattatattattgtgaatggcatggtttgcaagagggctactaatatgcaggcaatcaattgggaaccgggattggtattgatgaacgaaccgcgggaatatcaggtagccccccatgtgttggctgtcggttctaatcctgtgtttttcgatgagctgtacgggcgtttgattgtgcacaatccgtggaatcaggggagtctgaaaacgtttagtaaagcggacaacgatccggggatctttgatggcagcaatttggggacgggattggagctgaaatgctggggtcctctttcagaagcaaagttgggagcctggatgctgttgttgaataaaaaagacggcaaatactggatgtataagttttctttgttgaataacagtttccgcagcatcagcaagacggaagtcactgctgctgttgcacctcatttgcatgaagcaattggatttgctgcgaatccggaatatgaggatgttttgatgtacgctacggaaaatgcggtctattcttttgcagtaaatcagttgaatgcttctacaagttcatcattggaagttctgcaaaaggatatgcaggccattgaaaatatgcaggtaaccggtatacagtttgtggatattacggtgccggctcctactgagtctgatccttctgcaacccggatatcccaacaggtgcgcttggctgtgcgggatttgaaccgtacggaacgtcagggaggggtcgtattctacgaagtgaattccaccggtggtattcacttggacagtgtgttcaaaaagacgggtttctgtgataaagtcatcgatattaacgaaaaatatgagtaacggaatgaaaagggttttagcgttattgtattttggggtcctggctatggggagtatatatgcgcaaggcattgaattttttcatggaacctatgaggaagcacttcagaaagcccgggcggaagggaagcaaatctttgtagacgtttacacctcttggtgcggcccctgtaaaatgatggccaagaatgtttttactcgtcaggaggttggtgactattataacaataagtttgtttgtttaaaattggatgcggaaaaagaaagttctcacgctttttttaagcactatcaggcgaacggttatccttcctttttttggttggatgcccgaggtaatttattggaaacccgtacgggttctgtttctccggaagattttatccgatatgccgaagaagctaccaagtctgatttaagtgcccggttggaagttgcccggaaacgttgggaaagcggtgaacgctctttggagttggtgcaggaatatgtggtagggctcctccaacggatacatcccgaccaggtaaagggttgcttgttaagctatttttctacccttacggaagagcagttgcagcaaaaggagaactatttgttgatgcggggatttatgcgtacgccggaagacgatattgttttccgctgtttgaaccggtatgcggatatttatcaggggtatgaaaagggagatgatttttgggtgaatatgtatcgtatgatggtgcgtgccggctctgccaatctgaagaatccagaaaaataccgagcccaccttgaaatggttcgtaagacaaaatcgtgttatgcaccgatgtatttggagattctggatatggaacgaaccttgtttgagaaaaacttccaacaaggtatggctttggccaggaaagtagcagataaatatggcgataaacatccttatttgtatcgtcagtttttttatacactcattattgctggtttttttgacgattctgtaacagatccggaattaattgaacaagccatcgggatggcgggaaaggcgttggagcatagtccttgtaaggagacgttgctttatctagctgctgctcatgccaaaagtggggattataagaaagcttatgaactgatggccagcgagccttttttccctgctcctgtcctttctacggcactttacccttatctgcatcttcatgccattcacgggcaatatttagataaaaaataaggagaacgaactaatgctttgaagacgtgttttcaggagaaggtattttctgaaacacgtctttatttagggatattcgaaaaagtttgtccgatcaggtcggacgagggtgctccctatgttttaattgtaatttcataatagatgataaaaatttggctggtactgttttaatctttaattttgtttggctatgagcggtttatagatctgtgccgctgtatgaattcttttattagaatcgtttttgttttatgtctaaatattttagaatcagaggaatagaagaagatgagattttccgtaatttgtttatagattactatccatctctgatttcttttgctttatattatgtgggagacaaaactatagctgaggatctggtacaggaagtatttgtgaagctttgggaaacccgggaacgttggagtgctgtcggtgatttttctgcttatgtctatcagatggtccgttttaagtgttttaattatttacgggctgagaaaataagaaatgaagcaacgcgttcttttacagaagaggtagatattactgaaatcaataattatatagcagaagagactttccgtttggtaatgaattcaatggaggatttgcctcctgcttgccggacagtgttttctttaacattagaaggttatagtgctaaagaaattgcagaaaaattagatattgcagtagagaccgtaaaaaagcaaaagcagatagccaggaaaattttaaaggaaaaatttggaaaattatttctttttcttcctgctgtcctgttttcttaattcgtttgttttccgctatttacttttatctatccaacggtaagagcatttattttcacttttaacaattttcttttacctcctttttgtttttgaagtgtcgtataagtgtaatgaataaataaagcttctatggcagagtttaaaaattataaggaagttgcttttttattgtcgaaagctgtccagggacagttgaccgaaaaggaggaggaaacgcttggaaagtggcgacaggaatttccggagaatgaactactgtatcgtcgggttctgacttcggagtttatcatttcgaaaagtaaacaatgggaacaggtggatttggtgatggcctatctaaaggtacggcaaaaatgtgaacatcgcttgaggcgagtccggttgtttcaagtgactgctgttgctgtttcggtattgttgctgttggttagcgggcttttttattttgtactgcgggataaaagtgatcggtatccgctcgggctgatgactgaaaatattttacctggaaatgtgaaagcggaactgatacttgccgatggagagcggattttgttagggggcccgggcgtggattcggtattgatacaacctggtgctgaaatacacactgctaaagaacgtttgagctatatcggccggcaacagaccgggaaaattcaatataatattttacaaattccgagaggcggagagtattcggtgactttgcaggatggtacggttgtgaatctgaattcggcttccgaattacgttatccggtgcgatttacaggtactgaacggaaagtatttttgacaggagaggcttattttcaggtagcaaaagataaagaacatccttttgtcgtggtcaccggagaggcggagatagaagcattgggtactagttttaatatttattcttatgaagaggagaatcggatcgagacgactcttgtcgaaggtgctgtccgctttgctgttgccgatcaaacggttattttgatgccgggtgaacagggggtggttggaaccgatggtaatttggaaaaaaagaaagtagatgttttcccttacattgcgtggaaagagggaaagttcgtgtttcgaaaacgctctctggaagaggttatgcatattatttcacgttggtataatgtagaggcggtatttcaaaatgaatccttgaaaaaagtgtcgttttccgggaatctgaaacggtatgatgactttgaacatattgtcagtatgctggaaatgacaggaggaatccggttcaaggtggaagggagaaagatctttataaccgaaaaataaacagggacattcagtaaatactataaaatcagccaactaattcatacataaaatattgcgaattagttggcttttttgtatctttaggtattcccccg

SEQ ID NO: 6018 - DNA, 15530 bp, Unknown
  gut microbiota DNA sequence
ataatagaaaaagaagatcttccttcaactaaaggctgttcccaacagaattcctatgaaattatagacggtattctacatttcaaatctcccgaagcaatgagtacattagtaaatgtgttagaaaaaatgtctgatgaggaattttttgcatgggaaaaaacaaataatttttattcgttatatcatgcaatttcaaatgcagaggaagatattttttctgatagtgtatcttttgaaaagaaattaaaacaatacgaaaatttagtgtatttagatgaaaatgaaacaattcaagccaaagtaccctctcgattatatcaactaatttgtaataatgagggatattttttcatcaataaatataaacatcaagtgatttcagatgaaattattactaaagacaatcaacttaggaacatagaaagcagaaaatatattgttaacaactctccccaaacacgaacaaaacaagaaccaagataccccatagcttcttcaacatatacaggtaataaacgacgtgtacatgttacagtattatatattcgagaaattgttcgaaatactaacggagaatgggttggaaagcaaatattacaattagaatctacatcatacaaaagagtattaggaagatataaaaggtacaaaacagtccattctgtagatgttcttggtttttattgctcaaaaggagtttataagaaagaagacggaaattactccacacgcaatgtaagattcgagggcttaggaggtggaggttctgttggagaaaaaaagactatgacaatgaactattttttatctccctcaaatttatggattccagaaaaatatatttccattaatgaaaaagatataagttttgtacaaactagagttagtactcgtggtacaggtaatagcggggctgttgttgtttatacaagagattcatttatttctttgccctttattattcctaccacaggaaccccacaaattataaggcctttaataacagaaaattttggagaatgatgaaaaaatgctcagtaattaccggtatgattttagcaagccttttactgtttatgaacagttgcgagaaagattacctgaatgcggaagagattagttattcgttgaccgtttcggataccgtttatctgaatgaacctgtaaccatcaagggagtgatcaaccaggacttagatatcagagtctattgggaaaactggaataatgatcatttgatcggcgtgctcaaaccgtaccgggactctattgtctggataccggaaaacataaaagaagggccagccaatctgttgacacaaatcgcttataaaagtggaagaaagaaccaaacgaacctcatgggcgggaaaaatatcgtgattaaaaaaagataacattcagaatcacggaaagcttcaccacgtcatcagcacaaatcccttcccggatagcttgttctatcaataacaggcatacctggatgggatttacgtataaataaggaatcaggccaatagttccctctcctgggaaaattccgggaaatcgtccagaaaacagaagtcgttttcctgattcatataaccgcaaaaatggcgaaccccattggtaatggctacatagggagctgccagtgtcagattatagcgaaacacctggtcgaacactttttgggtaagtgccacagcaggcgctttacattcgaccagcagccaaggattaccgctccggtcgaaaaccacgatatcgaaacgccttttcaggccatacagttcaatttctctttcgacggcaacccgggagatcgcatatcctttcttttctaccagataatgcaccacatgttgccgtacccattcttcaggtgtcaggaccacatacttcttccggacgatatcgaatatcatcaccgtcccgttttgctttttcaccttataatcgaatcccggtaacgaaagctctaacatatccttcactatttttctcctcgctttattttcgcctttagcttatagcctatgactttttcacctccaacaaactactatctccataactcaaaaaccggaaatcatgagtcagcgcgtaatcataaattttgtgccaatcctctccgacggccgcaccgaccaataacaacaaggtactttggggttgatggaaattagtgaacatggcatcgatcacccgatagcggtacccgggaacaataataatcgtcgtacgggctttcagcaactcctgacaagctgtgtcgaaccaaccgcacaaggcttccatggcttccctcaaagaataatcctgaggtaaagtatacgcttcccattgtcctagcgtaaaaaaatcctcctgtcctgccaggcgtttcacccccatccagtataaactttccaacgtacgtaccgaggttgttcccactgcaacgatatcaccggtcttctccttcaattgttctaccaattcgcgggaaatgaccaaatgttccgtatgcatatcgtgatctccgatcgtctctgcttttaccggccggaaagtacctgccccgacatgcaaggtcaattcccggacatgcacacctttctctttcagatcgtttaaaatcgcccgggtaaaatgtaatccggcagtcggagctgccacagacccttcttctttggaatacaccgtttggtatcggacttcatcggaagcttccgattcccggttcagataaggagggatcggaatccggccgcatccttccagcacttcactgaacgaaagacctcccgtccagctaaaacggataatcaactccccctcttgttgccgcaccttttcggcggttaaccgataggtcgcttcgccataggtaaagtcacaggcaatgctcccttccttccattttttcaggttccccaccatacaactccattcacaactatcacgagctgcaaaattctgagcataatcgaccggcagatacggttcgagacaaaacacttcgatcacagctcctgtcgccttgcggaaaaacagacgggcatgaatgactttcgtattgttgaacacaagcatctgtccagccctaaggaggtgacgcacctctgaaaaacgactttcttctatccgtccacccctatatatcaacaatttagaagcctctcgttcggccaaagggaattttgctatccgttcgtcgggcaaattgtaagtatagtcttcaatccttatattcctgagtttatccagttctctatccatatcattttgtcgtttgacaataatattctatttttatgttctgaaaggccggggattgcattttgcaaaatcggtcaaagatagtgaaaggtgagaacagtgacaaatgaaaatttattttcaatttgaccctactgaaccgcatcctaatcttatccaaagataacaaaaagatcaaagatcaggttatgaaaacaaagaaagacattgtagacaattggttaccccggtatacgggaagagaattaaaagatttttcaaaatatattttactcaccaacttcgaatattatctggaactattctccgaattatatcaggtacctatcgtcggagcagacaagaccatgcctaatgtctcctgtaacgggattacgctggtcaatttcggtatgggcagtccgaatgccgccaccatactggatttactttcggccatagagcccgaagccgtgctttttatcggtaaatgtggcgggattaaggaaaagaactccgtgggtgattatattcttcccatcgctgcgataaaaggcgaaggaacctccgacgattatctgcctcacgaagtgcctgccctaccggctttcagcattcaaaaagcctgttcgaaggccatcacgaatcatgggcgggaatattataccggcgtagtctacacgacgaaccgacgggtatgggaatacgacgatcgttttaaagaatacctgaaaagtacccgggccatggcggtcgatatggaaacggccacgatctttactgtcggttttgccaatcgtatcccgacaggtgccttactgttagtctccgaccgtcccatgatctccgacggaataaaaacagccgaatcggacaaacacgtcacgcagaatttcgttaaacaacatctggaaataggcgtagaggtcctgaataatatcaaagaaaaaaattactccgtaaaacacctgattttttaatcgaagatgaagaaacaaatttcttattttctactttttactttttatctatttcttttttcgtgtaaagaaaaacaaaattcttccgttccgccagccgacacccgggtggaatggataaagaagacctgggacttcggtaacatcacccaaggtgaaacggtaacccataccttctatttcaaaaacacagggacccaaaacctgctgattaaaaatgtggaaacgggatgtggatgtacaacagccgattatgacaaagctcccgttcgccccgggaaagaaggaaaaatagaaattgccttcaactctgaaggcagatacggtaaacaatacaaagaaatccgtatatttgcaaacattccggaaaaacaggttatcctgagttttaccgcgactgtaaaagaataaaatcaaatcattttaaattaataaacaacaattatgaacacattacttattgtattacaacaacaaagcaacggtttaatgaatttcttacccttgatcctgatcatcgtcgtattctggttctttatgattcgtcctcagatgaaaagacagaaagaattgaaaaacttccgtgactcactgaaaaaaggagataagattgtgacgaccggaggtatttatggaaaagtactcgaaatcggggattattatattatcatggaagtggaaggccaaaaccgcctgaaaatcgacaaatcggcagttataaaagacatgaccgacgctactccggcaaaataaatcacccgaccgacgtccggaacgattggcagacctatgcactgaccgaactacggatcagcggcttcagtcctgccaatcctcttcgccggtctgtctctgaaaagaaagccgatcccccgaaaaccgacggatcgatgtgactattttatcataaaaaccgattccatgtacttgcccaaagtcaaccttcagcaaatccagcagtttaaggagaaatacctcaaccggaatatcgtctcctacctgatttgtgttgtcatagcttccatcttatggtttctgaacactttgagcaaagattatctgacagaaataacctatccggtcaagtacaccaatttccccgcgggaaaatatcccgttgcagaactccccacccaaatccagctcacggtaaaagccaaaggatttgctttattgggacatagcatccgcacttcttttctgcccattacttttaatgtaggcagttattgtaatcatgccctctccgacaaggcaggcatacaggaattcatcctgaacaccaacgacatcaaagacaaaatcagcagtcaattaaatacggaaattcaattacagagtgtagctccggaagagatcgtattccaattcgcacaatcgggccggaaaaaggtagccatccggcctattgtggattacaccctgaaaagacaatatatcgtcaaccagataacggtagctcccgacagtacctggatagaaggaccggtcaatatactggacactttacactgtatcccgaccgaacttatcaagctgaaaaatatcagtaaaaatataacccgtacagcagaattagtcgctttaccttattgcactcctcaggaaaccgctgtggaagtcgatatacaagtagagcaatttacggaggccaggaagatcatcccgatcaccccccttcatgtccccgattctttgacgctccggctcttcccggataatgtcaatatcagttatgaaataggactgagtaaatacgataaaattacagccagcgatttcatcttttctgtagattatccgaaaaatgcagatgtcacttatctggaagtcaaggttgtaaaagcaccggattacatcaaaaacttgtcctataccccccaaaaggtcgaatatatattggaaaaaagataatgatacattctatcggtttaacaggtggcataggttcagggaagagtacgatcgccggtatcttgaaacaactgggttatccggtctatctcgccgacccggaagcttcccggttaatcaatcgttctgtagaaatccgtaacgaccttaccggtctgttcggggcggatctgtataccccccgaggaatgctcgacaaaaaattattagcggatatcatcttcaaaaatccacaagccctgagtcaggtgaaccggatcgttcatccccgggtaatccgtgattttcaacactggcgggaacagcagaacagtcctttggtcttcttcgaatcggctattctttttgaagccggtctcacccgtcattttgattttattatttgtgtaacagcatcagaagccacccgtttaaaaagagtgattcttcgggatgcgacgaatgaagacaaggtaaaagaaagaatgcaaaaccaggctgccgacacagaaaaatgtaaaaattcggatttcatcatttacaacgacgaggaccatatggtcgtacagcaagtcctggatgttttgaataagttgaatttaaaaatacaataaatagtcatggcaaaatatggaaaatggattggtgcaggtttaggattagcactggggggacctctcggtgctttattcggattgtttatcgggtcgatgttcgacaacatccagaccattgcgatcccatcggacgggggacctattcctccgggccaaaccgggcgtggtgattttactttcagtctgaccgtattggcaaccgcagtgatgaaagccgacggccggatcatgcgttccgaactcgattatgtcaaaacatttctcatccggaatttcggcatcgaagccacacgtgaggccatgcaaatgatcaaagagctgagtacacgagatatccctgtcgacgatgtatgtcagcaaatccgttttcagatgcctgaagcttctaaagtacaattgctctatttcctgttcggtattgccaaagcagacggcaccgtcagtacggccgagatcggtctgctcgaaaatatttccaaccggctgggcatcgatcatgtcactttcatgtccgtaaaatccatgtattacgatgacatcgaatccgcctatcaggttttgggcatcgacagcagtgccagtaatgaagagatcaaaaaagcttaccgcaaaatagcaatggaaaatcatcccgataaagtagggcacctcggagaagatatccggaaagctgcggaagaaaaattcagccggatcaacgtcgcttacgaaaagatcaaaaaacaaagaggcatgaattagtatcagattgtaagatgaacattttcaatttccaattaaatgcactagttttgcaactcatttttgtgaaacttcaaataacgaactatgttaaaagaaattttatccatttcaggaaagcctggtttacaaaaactgatcagtaattcttctaatgccattatcgtcgaatcacttatcgatggcaagcgtttccccgcctattcaaattcaaaaattattgcactggaagatatctctatttatactgaggctgaagatatgcctttgaaagaagttttcaaacgcatttctgctaaagaaaatggaaaatctgcactgagtcacaaagaacctactgaaaaaattctggcttatttcgaagagatcgttccggaatatgataaggaacgggtatatgtctcggatatgaaaaaaatcattcagtggtacaacctgctcaccgagaagggaatgctggacctggatgaagaagccaaagaagaagagaaaaaagaagcataacctcctcctaaaacataaagaagtcggggtgccccgaaaggctttcggaccatctcaacttcttttcatttctgaccaccgatgtttcaattcaagcgattcgtcatccatcaagaacatactccgatgaaagtcggaacagacggtgtattattaggagcgtgggcagagcttgaagaggcggcgtccattttggatatcggtacggggaccggcctgatcgcactcatggcagcccaaagaaacgcacaagcccggatcgatgccctggaaatcgaaccggcggcctgccgggaagccgcctataacattcgaatcagtccgtgggccgaacgtatccggttatatccccaggccttgcaagccttctttcctgctatcggttatgactgtatcctttgtaatcctccttttttcgtacactccacaccggcaccggataacggccgtagtttagcgcggcataccggcacgcttccccataccgaattgatcgttcatgccgaacgcctgcttacacctcacggtaagttccaggtaattctccctgtagaagaagcttgccagttaatcgcctatgccaggcgataccatttattcccccggaaaatcacccgtgtacatcccaatccgggaaaagcccccaagcggcttcttatccaactgacaagacaagctcttcctccggtcgaaacagatctgaccgtagaactttcccgccatcattacagcgaagaatacatcgctttgacccgtgaattttatctaaaaatggaataactgtctgatttttatcttttttagggaaatttcccggttttaaagaaatctgtccggacatttaacgatccattaactgtaaattattcggaaccgccttatctttgtcatgtcaaaacgaagaataaaagacacgtttttttcataagtttgtatgtttaggttagtagttagtaattaataagagatcggtttccccggtctcttatttttttctatctttatccattgaaatcattaacaacactcaaatttacgactttgtccatgaaaactcttttatttgtctgtagtcttcttttatgtctgggcataaccggttgtcgtcaaaatgaaaaggaactcaaaataacggcctacgtaaatccttttatcggtaccgacggtcacggccattgttttccgggagcgatcctgcccttcggcggtattcagctcagccccgataatccccgtaacggttgggactggacctcaggttatcattattccgacagcatcatatcctctttctctcacactcatctgagcggcacaggtatcggtgatctgcaagatatccggtttcttccggtgagcactacaccggatacatcgatcagccctgctgcttatatccaatcgggatatgcccgtttttcccaccgcaacgagcaggccgaacccggctattacagtgtcgtattcgacaacggtataaaaacagaattatccgtcaccaaccgatgcggtatccattactatcaataccctgccaactcggcccatgctctgactatcgatttaaccaccgcccgcaactgggaccgaacgacagaaacaagtatccgtaaagtcaacaaccgaaccctcgaaggttaccggaaatcgcaaggctgggccaatgaccagcgggtgtactttatcatcgaattttcacaggattgcgaagtattagcaggatacaagaaattctctcctctcgaaaacgggcagaaaataaccgacaaaggatgttatctctatgtcgatttcggccagaagaccaataaaatcctggccaaaatcagtatttcgtctgccaataccgaaggagcgatagccaatctggaaaaagaactttcccactggagctttgacaaagtgaaaagggatgccaaccacgcctggaaaagacagctccaaaaaatcaaagcagaaggccggaacgaagccgacttagaaaatttttataccgctttgtatcatgcttacacagcaccttatctcttctcggatgtaaacggtaattataaaggccctgataaagaaatccacagtgttcataaacacaaccaatattcggtattttccctttgggatacttaccgggcagcacatcccttattcaccatcacccaaaagaaacgggtatcggatatgatcaattctatgctcaagcactatgatgcctatggcttactacccgtttgggaactagcgggcaacgaaacgttctgtatgatcggtaaccatgccatccctgttatcaccgaagcctatctgaaaggcatccgcaattttgatgtcgaaaaggcttacgaagcgatgaaaaaaacgtcgctcaccgaccgggccggtatgggtgtttaccggaaataccattatattccttatgagctcgaaaacgaatcggtatccaaaacgctcgaatatgcttacgatgactggtgtatcgctcaaatggccaaagccctgcaaaaagaagacgactatcttttctttttaaacgcctcccgcaattacaccaatcttttcgaccccggtaccggttttatgcggggcaaatcttctgccggagaatggaaaacacccttctccccgctctattccaaccaccgggacgatgaatataccgaaggtaacgcctggcaatattcctggctggtgcaacacgatgtcgaagggctgatcgccctgcacggaggtgccgaagcttttataaccaaactcgacagtctctttaccctggatgcccggctggaaggcgaaaatgcctctcccgacatcagtggttttatcggacaatatgcccatgggaacgaaccttcccatcacatcgcttatttatataattatgtcgggcagccacacaaaacccagctgtatgtcaacaaaattctgaccggattatatcacaatactccggatggcctttgcgggaatgaagattgcgggcaaatgtccgcctggtatgtcttctcggccatgggcttttacccggtcaatccggtcgagggaaaataccagttgggcgctccgctgttcgacaaaataaccctctcgacaggaccggagaaaaaattcgtcatcacagccaacaaagagtcggacgggcacatctatgtacaggaagtatatctgaatgagaaaaaactcgaccgcacctggatcactcacgaagagatcatgaatggcggagaattgaaattcgtcctgtctacccgcccttaaagaagaaacacaaataaaaaaggcggttgtcctaagttcattttttaacttccggcaaccgccaagcgataaataattcctgttacaaccgtccttctacagcctctccggcaacacttttcacatcataaacaataccgttttctttacacaactccctcaattgcaaagaccggaatacctgatgagcaacagccaataccaccgcctcgtatttttcggcggggagggtattcttcatttctaaaccgtagactttccgtacttcctcgggagatgcccagggatcgtaaacatcgacttccaagtcaaattctttcaaagcagcgataatatcgaccactttggtatttctgacatcgggacaattttctttaaaagtaatccccagcaccaaaactttagatcccttgatacattgtcctttccggatcatacacttcaacgtttgtttggccacatactcgcccatactgtcgttcagtctgcgtcctgccagaataatttccggatggtatccgtattcctgagctttctgggccaaataatagggatccacaccgatacaatgtcctccgaccaagccgggccggaaggataaaaaattccacttcgtagcggcagcttcgagcacagcttgtgtatcgatatgcattaaattgaagattttcgacaattcgttgacaaaggcgatattgatatcccgctgtgaattttctattaccttggctgcctcggccactctgatagaaggagccagatgggtgcccgccacgataaccgaatgatagagcgcgttcactttctctgccaccccgggagtagaacccgaagttacctttttaattttttctaccgtatgttgtttatctcccggattgattctttcgggggaataaccggcaaagaaatctacattgtattttaatcctgaaacccgctctatcacagggatacagtcttcttcggtagccccgggataaaccgtcgattcataaatgacaatatctccgcgaacaatcacctgaccgactgtctcactagccctgatcaacggagtgagatcgggcctgttatgtttatcgacaggagtgggcacggtaatgatataataattgcaatctctcagatcttccgggtcacaggaacaatacaaccccttctctccccgtttgggaacggaggggcgcaataccgatttcatcacttcttccgacacttccagtgtcctgtctatccctcggttcaaggcttcgatacgttcttttttcagatcgaacccgactacagcatattttgtcgcaaagagacgggctaaaggaagtcctacataccctaatccgacgactccgattttaatctcttccatcactttctttttaaattctcccaataccatttgaccgcttccctcaatccctgtttcatattaaaccggggatcgtatcccaacaactgccgggctttatcgatagaggccagagaatgcggaatatctcctttccggacagggccgtaaacaatatccacgtcagcaatccgggcgtcgtaaaagcccaacaactctttgagataaccgaccaattgattcagcgtggtattctccccataagcggtattgtataccgtatttacagccttcggattctccgtattcatcgccagccagttcatctgtaagacattgtcgatataggtgaaatcgcgggaatattcaccgtctccgttaatgaccggagattcataccgcatcagttgttccacgaatttcgggataacggcagcataagcaccgtccggcgattgccggcgtccgaatacgttgaagtaacgtaaaccgatacattccatcccatatacccgtccgaacacatcggcataaagctcgttcacatatttggtgatggcataaggcgataaagggcgcccgatcacctcttccactttgggcaaattctgagaatcgccataagtagaagaactggcggcatatacaaaacgtctgactccggcatcccgggcagcgaccaacatattcaggaaacccgaaatattcacttcattggtggtctgcgggtcattgatcgaccgcggtacggagcccaaagccgcctcatgaaatacatattccgcctcagccactgctttgcggcaatcttccggtttgcggatatcccccacctgcaatttaaatcgctccggatattccctcaataaagcttctatattttcaaatttacctgtagcaaaattatccagacaagtcacttcctcccctgctttcaaaagatattcacacagattcgaaccgataaaaccggctcctcctgttactaaaaattttctcattccagccactttaaagaatagattacaataccatctttctatttcgaattatcatgtaacaaaaatactgctttctgctttattcctgcgaatattcctaaaaaatattacctttgtccccaattatttaccagtgtgctttatcatgctaaatattgccgtcatattagccgggggttcaggacaaagagccggagggggtattccaaaacaattcaaaaaaataaacgacaaaacgattttggaatacagccttgaaaaattcaattcagccccttcgatcgatgaaattaccgttgtcattcatcccgaatggcgacaagagtgtgaacatatcctttcagactgccgtatttccaaggtaaaacatcttctcgacggtggtaaagaacgttatcattctgttttagccgcgttgaaattttatgccggccgcccgtgtaatctgctgatccacgatgctgtacgtccgttggtcacccggagaataatcgaggaggtcatcaccgaacttcaaacttataaagctgtcaatgtggctattcccgccacagatacaatcatcgaagtcgatcccacccatacctatgtttcccggattccggaccggaatattttgtaccaggtacaaactcctcaaggatttcacaaccaaactttacaagaggcttatgccctggcattgaaagatccggattttaaaacgaccgatgactgtagtgtcgttaagaaatacctccctcaggaagagatcaagatcgtgaaaggagaaacgtataatatgaaattcacttataaagaagatattatcatactggaacaactattaaaaaacgaaggaaaatgctacgtctaacagctcttattttactgtttatcggaggattacaaggttatggtcaggaccggaaaggctattaccaggccgaaatcggtggtggagtaacagcagaccggcttcctttctggctgcataccaacacattcggaaaaatcacaaacgacacttatttgtggggaactgtcggagtaggtactcctttcagtaaaagcgatacccgtgctttcgactactcattcggattcgaaggtaccggtgctttaggtcgtaaagaacaccgcattttcatcgaccagctttacggtcgtgtacgctggcaaaacctgatcctggatttaggtatcatcaaaccggaaattgtttacgacggtctgtcttctaccaacggagacatgctgtattcgaccaattcccggagtatgccaggtattaatctccaaacacaagactttatcaaaattccctggatagggaaatgggtatctttcaaagcccggtacggagaatacctcatgatcgacgatcgttatgccggtaaccgtacccgcttacatcacaaaatgctggacatcagatttacgatcattccccagctcagcatcgaagccggactcgaccactatgcccaatggggaggagagacagaaaaagacggtaaactcccgacctctttcaaagattatgcccgggtggtacttattaaagccggaggaggggatgctcctgaaaatgaaatcaataaactggggaaccacatcggtaatgagtttctgaaaataagatataataacgagcgttggggggctgagttctattacgatcatattttcgaagacggatcgggtgaaaaattcagaaaccgtcccgatggactctacggactttattttacccggaaaaagaatttcaaatggttcaaaagtttcgtctacgaattttattataccaaatgccagagtggccccttccacaatgatccggtcagcggagaggtcgtcggaggtaacgataattatttcaataacggaatttatcagtcggggtggacattctacggtcaagtgatcggttcgccctttttcactcccaaaccggaagaagccagcgggataacccggggtgtac

SEQ ID NO: 6019 - DNA, 2177 bp, Unknown
  gut microbiota DNA sequence
tgcaaaaccttaaacggagggttaactttttttaaggctaggaatttaacatttgaacttagattgactaattttggagtactcaaaattttaacatttgacaaaaatagagattcgatagaaatgtgggcttgaaagtaacacatttttttctggttcgtaatagaattttataagatataacaactttaaatttgaatctatggatactgttgatatcaaagcattgaatgaacgcatacagcaggaaagctcttttgtggacatgatcaacatggagatgaacaaagtcatcgttggtcagaaacatttggttgaaggacttctgatcgggatgctttccaacgggcacattttattggaaggtgttcccggcctggcaaaaaccttggccatcaatacgctggcaactacgattgatgcgaaattcagtcgtattcagtttacccccgatcttttgcctgccgatgtgatcggtacgatgatttattctcagaagagagaagagtttgtggtaaaacaaggaccgatttttgcgaacttcattctggcggatgaaatcaaccgtgctccggcaaaagtacagtctgctttattggaagcgatgcaggaacgtcaggtgacgatcggagatatgacctatcgtttgcccgagcctttcctggttatggccacccagaatccgatcgaacaggaaggtacctatccgttacctgaagcccaggtcgaccgttttatgctgaaagtagtgatcgattaccccaaaaaagaagaagaaaagctgatcgttcgtcagaatatggagaaagccttccctaaggcatctactattctgaaacccgaagatatcattcgtgcccgtgaagtagtgaaggatgtatacatggatgagaaaattgaaaaatacatcatcgatattgtttttgccacccgttttccgcaggaagccgggctcgacaagtttgtcagcatgatcgcttacggaggttcgccgcgtgccagcatcagtttggccaaggctgccaaagcgtacgctttcatcaaacgtcgtggttatgtcatccccgaagatgtacgggcggtatgtcatgatgttttgcgtcaccgtatcggcctgacttatgaggctgaagccaataacattaccagtgaggatattatcaacgagatcctgaatgccgtagaggttccatagtcggaaggtcgtttttaaccttttacttttaaccttttacttttagatatggaaacttctgaattgttaaagcgggtccggaagatagagattaaaacccggggcttgtccaaaaatatttttgccggcgaatatcattctgcctttaaggggagaggtatgactttcagtgaggtaagagaatatcagtacggcgacgatatccggaatatcgactggaatgtgactgcccgccacaaccgtccttatgtgaagatcttcgaggaagaacgggagttgacggtcatgttgatgatcgatgtaagtgcctcccgtaatttcgggactatttcgaaactgaagaaaaaccagattaccgaaattgctgcagtgcttgctttttctgcaatccagaataacgataagatcggggtgattttcttctcggataagatcgagaaatttattcctccgaagaagggaagaacacatatcttgcatattattcgcgaactgatcgatttctatccggaagataaacagaccgatatcgaacaggcattggaatatatgaccaattcgatcaagaaacggtgtacctgttttgttatttccgattttatcgacgagcacgattttgcccatgctttggctatcgctaaccggaaacacgatgttgtcgccctgagggtatacgacccccgggaaaatcaattgcctccggtcgggatgatgtacctgagggatgccgaaaccggagaacagatgtgggtggatacttccgataaaaagctgagggaagcgtatgaaaaatatgcttttgtccgcgaaaaggaactggatgcaatcttcaaacgttcgggagtcgatgtcgctaatatccgttccgacgaagactacgtcagggctttaatcactttgtttaagaaaagggcttaattattatggattttgatcaaagatcgtaactatgaggagtgttttgaaacaaatattattatat

SEQ ID NO: 6020 - DNA, 319 bp, Unknown
  gut microbiota DNA sequence
gaatgcatgactttaggttccattcagacaccggattgtaaaaccttggataatatggacaagaacctggttgactggtatagtagctatctcatcagtagaaaagacaagcctacagagcatatccaaaacgctggttgcagacgcattcttttccaaggaaactttcataacgcctatgtgtgagagtgatttccatgtcatcagccgctttaggaatgacgtagtcctatactatccgacattggaaaagaaaacaggaaaacgtggccatccaaagtggtttgacggaagaatcgactttgccaatctggatctg

SEQ ID NO: 6021 - DNA, 7422 bp, Unknown
  gut microbiota DNA sequence
agtgaattatggttctatattattagaaagtattcgctttagtgttggtggagaaactattcccctgtcccgtgccgtggatgcaggtctgcaggttcagatccgacagaatggtgttttgttagaaggtcaggactatgctcctggaacagacttttctaaacggataactttgccggttggtgagaattatacggtaaaagcttttacccctgaccaaacagaagcgggtaatgatgagccggggcatccggtgtatagtgtcgaaagtgaaccctttgaagtgatcgaaggggatattactaccctttctttgactgcacctcagatcaatgtgggagtagccatgagctgtgacgagtcgtttgcccgtgaatttacagagatttctgtggctatcgtgtcggaaagcgggcgttcggtgactattaccggtgcggaggatacggggtatcgttattttacattgccggtttcgggaaagttgagttacactgtcctggcgaagaatcaggatggagaagtgatgcagaaaacttccgctttgtcggtagaagccaaaaattataggataaatttagcaatcgagtgattcggatttttagaattgtgtgtattttaggaggcaaaagcagggacgaatgaacacagttgtaaaatggagcaatatttcccggcgatctgttttgattgccgtaatgctttttattattctctttcttttttggtggtctatactgccggtccccttgtttcaggacccttatgctacggtgttgttcgaccgggaagggcaggttatgggtatgaaggtggcggatgatgggcagatgcgttttgaagaggttcaggatttgcctccccgctatgttatttctgttttggttttcgaagaccggtattttttagcccatcagggggtgaattggtgggctttgtgccgggcattagtgcagaatatacaggccgggcatgtggtcagtgggggaagtacgctttcgatgcaggtggtgcgtttggctttgggaaatccgccccgtaccgttcctgaaaagataagggagattttcctgacactacggatggagcagagttattctaaaaaacagattttggagatgtatgcttcacacgctccttttggggggaatgtagtcggcatacgggcggctgcgctgaaatattttaaccgccggcccgaacagctgagctgggccgaagctgctttactggcggtgttacctaatgcaccggcattgctttatcccggaaagaacaatactttactgaaacaaaaaagagacgggttgttggccaaattataccgggaaggggtgatgtccgaagattcgtaccacctggccttggctgagcccttgccggaaaaaaagttcgatatccctactgtggcaccccatctgttggctaaggcttatcgggaaaaaaaaggaaaagtgtgcccgacatatatcgacggacgcttgcagaaaaagatcaatgagatcgtagaacggcatactgctttactgagccagaattatatctataacatggctgtgttggtggctcatgtcccgaccggagaagtcagggcctatgtcgggaatagtgctccccggaagggtagccggggaaatgacgtggatattgttcaggccgttcggagttcgggaagtattctcaaaccggctttatatgcttgcatgttacagagtgggtttattttacccgggaccttagtgcccgatatcccttcccgtttcggaagctattctccttcgaattttaaccgtgattttaagggcgtcgtaccggccaggcaggctttggctcaatccttgaatattccttttgtacgcttactcaaagattattcatatgcccgtttttacgatgatctgaaacaattgggtattcgttctttaaaccgcgacgccgatcattatggactgagtctgattttgggtggtgccgaaacgtcactttgggatatttgtaatttgtatggaggaatgagtgctgtattgaatcattataatgacagagacggacaatattttgacggggaatattcccgtttgaaggtttgggaggagtatagcggagcggaaggacaagatgaggaagagaaaaatattagtgcggatcggagtgtattgaaagcttcggcgatctggcagaccatgaaagctttggaggaggtggaacggccggaaatggaatcggggtggaaaaattttgtctcggcgatgaatctggcctggaaaacgggaactagttttggtttccgggatgcttgggcggtgggagtgaatcccgagtatgtgatcggcgtttgggtagggaatgccgacggggaaggacgtccgggtttggttggggtgagagctgcggctccggtactctttgaggtcgctggtcttttgcctgtgaaccggcatttctacgaaccggccgaggagatgaaagaggtggtcgtatgtcatcggagcggttaccgggcttcggcttattgtgaggagaccgataccatccgggtttgtgctgccggaagcaggacacaggtgtgtccttaccaccgcttggtaaatctcgatgctaccggaaaatggcaggtgacttcggattgtgagccggtgcaccggatcaggatacagccctggtttgtgcttccaccggtgcaggaatggtactattgccggactcataccggatatcgcagattaccgccttatcgtccggattgtcaccctcagggggaagagatgatggaaatgatttatccccaacggggaacccgggtttttattcccagggatttcggagggaaacccggacgtgtggttctcgaagccgtgcatcgatcggttaaagcccggatttattggtatgtcgacgagcagtttttgggtgtaacccactccatccatcagcaagaagtatggctgaaagaaggtcgccataccttgacgttgatggatgaagaaggccatattttacagcaggtattccgggtggtagggaaggaaattccgggcggtggttagaaatcacccgatccggttaattcaggctgagtttaatgccggcgaaccagctacggggaaggcccggtccgtaaatgtatccggcatcccgaaattctccccgatcgaaatctttttggtagctttgaaaaatgttctggataccacaattgagttgaagaatataatttccgctgatggtaaaatcgtaattcaatttaatattggcatcaaagaaatctccgcttttttccagtttgtctttttcgatatatccggccatgtgaggaacatacatacttcctgtataagtgcctgaagcggatataccgaattttttgaaaggagaagtaaaaaacgtgaaatagccataccggttgggagaacgtaacatttcacgggttttctttgtatccggatcgtcactccaggattgaggacgattgtatttattctgctggagagatatccccaattggatttgtacatcccggtgagggataatttttccttcgagattgataccttttactttggcacccgaaccattacggcgttcgagtattttgttgccttcttcgtcgtaaccgatagggctgactacaaaaatatgcttcaatttggtataatatgcttcaatcaacagattggtttgtactcgtccgaaagaatgataaatgtcggctgagacgctataacttcccgacttttcggtttttagattcggatccgattggattagcgacacttctcccccgacggcggtcacgtgtagatcttcatcataggtttgaggtgcccggaagccggccgaataactggctctgaggctgatggctttcaagggattgtagcgcaggttgatacgagggctgaaaatgatatgatcgatgaaactgtttttgtccagccggcctcctggcaggatgctgaattgctctgttttccactcgttttggagaaaaaagctgtagatatcaactttttgatcgatggaacggtgataccccagcattttatcggccagtttgttatatacatattcgctgccggttgtcaatactgccggcataaaaaggagacgattgaaattgtatgagtattgaattcctgcaatagcggtcaggtcatttgtcttgccataggctttgggatctttacctgctccgtaataagattgacgggcagtgtgttggacagaggaatacagattgagtttatgggcataatctttcgaaaagaaggtgaaatccaccccaccgccgttgatatcatgatcggcctgttcggtgatatcggtttcgtggggaggcagactgaatagatttcctccacgtcggaattcccggatattgtggtattctaaagtcagtttggtttgagaggtgggtttgtaaaaactgcggaatcccagagtcgtcagcttgagttttccgatttctgaaaaatggtctccatcgtgatcatagtgttggcggtggcgtgaagttccgaaaagatagattcctgcgtcccgttggctgttgactagtgaagtattcagtgaggtggtgttatcgtaggccgagttaccgatagcagtcaggttatgactgatcataaacaggttattcaggggttctttagtgatgatattcactgtgccaccgatggcgttggcaccatagagagcagaaccaccaccgcgcataacttcgacacgttcgatcatcccggttggaatttgttcgataccgtatacaccgtttaatgaactgaataaagcttttccgtctaaaagcaactgggtatagggaccgtccagaccgtttatgcggacttgctggaagccacagttctggcaattagtttctacccgaagaccgggctgaaaactgagtccttgggccaggcataccgaattggtattttcgaataatttcggagtcattacatggaccactatcggtgcttccagccggtttgtttcgtttttattggccgatatcactacggtttccaactggatcatgtcttcttccacttcaaaatcaagttcgtgggtttctccttgcctgagggtaatttgtttttctgccgatcggtagcctactccgtttacccggatagtataggtaccgatcggtaggttttttagaaaatagtggccggtttcgtctgtcgctgttccaagtgttgtacctttcaggctgacagtgaagaaaggaatgtgttctccggtatttttatcgatgacatgacctgtgaggttggatcggttttcgtttttttatctgtaaaatgatccgctatagagtgatggaccgacgcaagtaagagcagaaataagaaaaataaacgcatggtaatagaaatttataaagtttgacgatagaaagtttggcttaccgataggtatacaaagtatatccgggaaaacttcgtttctgtggattcgttataggcagagacaaagtttccgttttcggtaagcaattggatacccttcggcaaagtgccgttgaaattataacgtttttacaggagggcctctgaggtgaaaatgaggaatggagatcggttccggagtgccggtggtttctgtataataagtgatatgccgggtacatggcaggtctgggatttccggagaagtttggaccagactgtgccacatctgcgcatgagcgatcaggattaatgcattagccgaatgatcgtgtcgggaggagcgggaatccttgtttgtcggaagcgggcaagaaaaatgcgaatggacgatagtaactccgtgggtaatatggctatgagtaaaaaatgtaatgtcggcaaaataacccaaaagcagggctaagaaaaaaattcgtataccggtgtgtttttttactttttgcatgtttccttcactaaagtgaggacaaatataataaataatttttaattattctaaataaaaaaaactgagaagccgattaaaaccggatagaggcataaaacccagggtgttgtccactgagaattaccggtgaaaaagtaatgttgtgttttcgggcaaacggacgggtgaagatatagctgctggctgttccgatggctgctcctccgatgatatcccaccaatcgtgttttttggcatacgtccgtccccaaccgacgtaggcggagagtaaataagccggtaagccgaatttccatccgtagcgtctttgtataaaggaggctccctgaaaagagacggaggtatgggaagaaggaaaagcatgatgatcgctatggtccggccgttctttcctgatcacatatttcagggcataggtcatggccatattcatcgctcccgaaaagataatttgtttggtaccctgataatctccgatagccagtgaaccggcaaatcctgctaccggtgtgatgaacatgagaatatcggtcgtcgtttcgatggttttacgattctgagccgagggcgaaaaagagtttaagaaaaaaagagtacttaacaggcaaggcagaataaattttgtttgcatgaggaataaaacttagaaatggattattttaggaataaagataatacctccgatgataaatgcacaggtggacaggatcagtactgctgctgcgaggtcttttgctttaccgataaggacctgatgcgacggggaaatgaaatcggctagtttttcaatcgccgtgtttatggcttcggcagcaagcacactaccgatagcaaaaaggattactacccattccaaagaagtcagggataaaatgatgcctgccatgacagcacaaacaattgcaatcaaatgtatccacgcattgtgttcgtaatgaaataaaagaaacacaccacgaaaagcatatttgaaactatgcaaacgggctttgaaagaaaattttttttcggatgccataattagtctttgaacggctacaaacgtagttttttttgcaaacatggccaaaatccggtaaactttatatccggtgaggtagattttttctcctgaatcgttttgatatctcaaaaaattgttacttttgcacccgtaaacgccaatttagctcagctggtagagcaacgcattcgtaatgcgtaggtcgcgggttcgagtcccgcaattggctccactgaaaatcagtgacttacaagaaaaaggggtcaataatcaattgattttggctctttttttgtacaaaaatcaaccttttgccgttatttccgtagatgttacacgattgttacacgaaaaatttgaaacaaaaacttggatcaattcgggatttttgttgttttaaaatttttattgctgatatggtcataaagtgtacacgctatgaaagcaaaatatacactccggcagaggcaggcgtcggtgaatccatttaaattagggatattcagtaaatagta

SEQ ID NO: 6022 - DNA, 1682 bp, Unknown
  gut microbiota DNA sequence
cttatcctgttccggggatgggtatgggatggttcggccttgcgacgtatccgggacgatacagggtcggttcaggtacgctgaccggtgtcgggatagcgtcgcagtatcgtctttgaaccgaagctgatgtagcgaatccccggccaatggtatgacaagatgttgttgaaagcttttgataaatatgtagcggaattaatgtatgccaaggcgtatatctcttcgggcggagttaaaacattgtgccggttcaatcatttcaggagccgtcaacaatttctgtttttctgttcccattctttgcattcggtttgggaggaatggaataaggacggatcactttcggattaccataagtatatctcctttaaattacaggaagcgggaagattgtttattttcgaaggcggggaggtcgtttcccaccgtaacctattggtttatcagaatgaaattctcgtttcccccgatatcctgaatggttcttcccgccatatgctcggttcttttttacaaatacagtattcctcctggctggagttgtgcaggctttgcgagtctttcttttctgtttatccggggtattacatatggaccggaaaagaaatcgaattactggaactgggggatgccctttggacaaccggatatatccgccccctggcaaaggaaaaaacgaaaaggttatatttccggcgcttgttcggattctttaaccttccggttccggacgatccctgtcatcggctcggggaactcggtttgagggggcgtcccgatatctttcttgcctggttacgggataaatacctttcttattgggaggaccgtgaagattaaagttgttcgtttttctgttattttcccaaaaacgattattattatgtaccggttgtcggtatgtcggtcggtgtaagattctcaaatataaatggttgtgtatattatactgttctttttgaagtttatggcaggcgtatggtttagtagggggggataggaatgtaatttgccgtcataaatcatcccgggaaaaatgaactttaaaattcaaaacagttatgaaattattatccggtttagtaagtgaaatcagctcggtagtcgataccctggcggtttcatctaaggagaaaaaacagatcgaagctgatttggtcgcggcaattgcccggcaggaagaggctttgagtcagagccagtcttccattattcaggcagaggctcagggcaactggctgcaacgttcgtggcggcctatcatcatgcttgtctttgcaaccattgtcctgatcggcacttttttcgatttgcctattctttccgatacttcccgtttctgggatttactggaaatcggaatcggcggttacgtgatcgggcggagtgcggaaaaaatcaccggtcgtttgaaaggaggcaagtcatgaaaatcgaagcccaccaattggtcggttcgtgcgtggaatatctgcgctgtaccaaatgcagccgtttgctggaaaccatcgacaccgttgtgttgcactctaccgatggggccaatgccatgtcgtcggcccattacctggcgcgtaacgacacttcggtatccgcccatctggtggtggcccgcagtgggcgggtgatccagttgttaccctttaatgtccgggcctggcatgccggggtgagtgagt

SEQ ID NO: 6023 - DNA, 3946 bp, Unknown
  gut microbiota DNA sequence
agtagtgggattctatcattattataaaatggttcatgtcgaacattccgaaaaagtaatcgacggtcttcatttgattttcgttgagttgccgaaattcaatccctgtaattattctgaaaagaaaatgcaggtattgtggttgcgttacttgacagaaatcaatgagcaaacccgggaaattcctgctgaattaatggaaaatccggagataaaaaaagcagtttccgttctggaagaatctgcctttaccgatgcccaattgttaggctatgaaaaattttgggatattatcagtgtcgaaaaaacgttatatggaagcggttggaggagaggtttgagggaaggtagagaagcgggaaaggaggaaggaataagggaaggaattgaggagggcagaaaggaaggaataaaggaaggcatgaaagcgggaaaagcgaaaggcgaaacagaaatgcggtgtaaaattgcttgtaatctcaaaaagacaggtctgcctttggatgtgatcatccaaactacgggcttgacagcaaaagaaatcgatgaattgtgatgcggttgattttaatgtaaaattgtcgataaaatgaggagctgaaaagtattcgacttttcagtttcctcactattaacctgccgctcaccggatgtgtcggtctatatattcggttatctttgcagatgacggtcgcggagcgtccaacgaaattaccttgccgtctttgtcgaaaaacaggaagcgcgggatggcgttaatgccatagtttttacatacttcagagtcaaatgcatccaggcagatgaattgtctccattgcggtttgtcctctgccagcttcttttcccatttggccttgtttttgtccaaagagatactgagcaaaacgatttttttatttttggcataatgggccgccagtttttccatgtgtggtatttctgcacaacacggaccgcaccaggttgcccatacatcgatataaaccgccttgccgtggaagtcggacaaccggaactttttccctttggcatccgtcatttcaaaatcgatggcgggcgcccccttgcgcaacttgacgtaatgggcatacatgtcgtctgctaaggctcgggcttcagggttggtggagatattggaataaagcttatatacctcttccatattgtccggagcttgtttcaaatagctttggatatattcatctgcaaaggcattgattacttcctgatcggaaaatacttgtttcagactattgaggtaatggatatctttctctctttccggtgcgggatgatgacgtaaatagtgacgcaggtatttcgcggctatgcccaaattatctggatcgttccgatcgaaagattctgcaaattgctcgaagtcagcatcatttttcagtttcgaccaggcaaaacggaacaagctctccggaatactgcggtctatctcagccatcatcatccggcggaatgccagactttttacttccttcagttccgacttgactctgtccatgtcttccaggaatttttcccggtattgggcaaaagacatcgtatcgatacgcgaaaaaggccacacattatagagcgacaaagcttcatacttctgcataaattcagtacaatctccattatcccctgaatattctaattccaggtcgtaaggcagtaggctactcttgtcttttttctctacgaaagaaaaggtaagcgatgcttccatgccattttcaatataaagcgggagaatatattcatacttttcaaagaataatatggctttgcccggttccttcagggtagttgtatagtcgaacactccgttgtcatctacctgtacgacttcttttttacggttaatcatcataatgacatcgccacccttgaaatcttttacaactcctcggatgtgtgcgggatttacgctatttgtcgacgatgcttccaaggataataatgctagtaatccaataagaaaatatctcataatcagttcttttatttgttatctttcatatcttgttcaattaattcggcacattgaggatcggaaggacaggtatacttgaaattgaccagatacccttccggattgaccagcatgaagcgggggattccgggcatacggtaggcctcgcgaatgaaacgcattgcttctttgctcaatacatattgcgcccattccggcggatctttttccagaaattttttccagagtttttggtctgaatccaaagaaacactgattaaagcgattctgtcatcattggcaaaatgttcctgcaatttaaccatatagggaatctccagcacacatccgtgacaccaggtggcccaaaaatcgacaaacaggtatttccctttcaggtctgacaggcgacattttttcccttcccggtcgattaattcaaaatccggtgcaattttgcccggcatcaggttgccgaatgcttgtacatattttttgtatttggcttccacttgttggcgtaccgaatcgtcggtacatatttgacggtaacgtttcatcatttcttccaacgattctccggaagcataataaatacgcctttccatttgttgtgtagcaaagcaattttttatttcccggttactaaccaatcgctctaaccaatccagctcattagtatatctatttttatgaccgaattgcggttcctgttgacgatgccagtcgatcacccggctaattacaaaatcatcgcattcttccgggttattcaaatcgaccttttttatgaaagcatcatagtcggtatctctattattcccttctttgcgttcggacaaattccagccatatatggtcaattgcctttgataccataaatgtaactccttatggaattgcttttttatttccgggtcttccacctgttttaacagaggccgcattcctttttcgatttcttccatcttttttttgtatgggagaaaagtcagagacttgatatcggcagtgttccacgggcttgaattttccaactgattgaaaaccatgcggtattcgttttccgcagcccggtcgcccaaaaatttcactatcatttttttatcgggcaaaagagttaattctatctccgattgattgcctggagtaaggtttacttctattctttccctttcgtaatcctttacgttcagggtataaatctgcccttcagtaagttttggtgaccaagcaaagtgtcctgaagcatctacttgcagagtgtcttgaaattccgtttccctgcacaggataaatatttcttccccgttatagttccggatgtgtcctttcagtattgtttcttgtgcctgacaataccatccgcttgccaaagccaaaatgataaacaaaaatttcatgattttatctatttatctgttatttttcatattttgttctaacatcttcacacattccgggtgcgaaggtcgttcgtaattataagaaaccaggcagccttgcggatcgatgagcataaagcgtggaatacccgatatccggtattcctttttcatcacgtccatattttccttgtctaccatatattgtggccaggtagccggacgttttttcagataatccaaccaaactttttgcgtataatcccacgaaatgctgatcagggtaatccgtttgtcattagcgaaatgttcctgcaatttttccatataaggaatttccatcacacatcctttacaccaggtggcccagacatcgacaaacacgtaggtgccctttaaatccgataagcggcacttttcccctttgtcgtcgatcagttcgaagtcgggagccggtttccccggcattagattgccgtatacccgcaaatattctttgtattgttcagctatctgattgcgcatggtaccatcggtacaaatttcgttataccgtttaatctccttatccaaaggtcgtcctaat

SEQ ID NO: 6024 - DNA, 11423 bp, Unknown
  gut microbiota DNA sequence
tgtttgtgattgaaagaggtctgtaacggtttcgataaccagtaagtatccacccctcgggtaatggaagccaatttagcgtaatattgctgttcggctcccaaaggattatctttagccagatcttcgaatactccggccgccacttccgtttcgagtttctcgcgtgcattcatcaggttataatccgacagatcgggtaccgtaacatcccctgtaaaattataggacacattcagcttacccatctgaggagccaccgtcgtaatcaccaccacaccgttggcagccctggaaccatacaaagccgtagccgcagcatctttcaggatggtaatactttcaatacggttaggatccatatcgtataactgttccacactgatctgaaaaccatccatgataaaggtcggtaagttgggattatccttcagagccgatttcgtcaaaggatcacggtccaattcctttacaccgctgatacccgaccttccccgcacatacatttcgggcagcgcattcggatcggacccccaatcgttattggtttgaatacggaatgaaggatcgaaagtctgtaatgccttgatgacattcgatttcgaaacggacatcaattcatctttggtcactgtaaccgaatttccggtaaaacttgttttacggacattcccgtacccggtcaccacgacttctttcatctctttgatatccggttcaagcgaaaccaatatttccgtttgcccttttttcaggtttacaagcctcgtttccatccctacaaacgacaccagtaaagtaaccgtatccctttccaggacttccatcgtaaatttcccgtgtgaatcagcgactactccgtaggatgtccccttcaataaaaccgtagctcccggtaaagccaggttattttcatcggtcacctttcctctgaccacctgtacattcacccgggagtcctgccgttgtttttccggccggataataatgacctcattctccacttcataggtgagatccgtattttgcagtaattgtcccagaaaatcttcgacttccgcatctttcacatctatatctcttttgccatatctgtttacttcctctacccggtataaaaaacggtaaccggacttttcccggacctcttttaaaacctcgtcaattgtaaccccctgcctttttgcagtaatacgcgtctgagaataagcttttgcctggatggaaaacaccaacaccagtaccagtaaaatccccgccttttccagagagaaatttaactgcagcaaaatacttttcagtaaaaaatttcgcttttttttcataattttacatgcttagtagttaatgatagtaacgacaccccgttaattgctgagttcttacggaagattatccccaataatcttccgtttttcgatatatagaacacatcaatccaagaaagggatgaataaaaaagatacttttttaagataattttcacattattgccttttccgtttcagccggaatcctatcgctcctcccaagacgagtaaaggaatcaggccgataaaaagaccttttatccatccgatatcggcaatatcgagataatgggtatcgtccgtaggagatggacggctattatccaccgggaattgctgataagtcatataatgcaacatctccatgaataacccgaaattattcagtcggacatcgtctttccgtaaagccagtccttcggtactgaaccaatcggcatccccggaaacgataatacgttgttcttctcctcccagctgccgtttcaaagccagcataagcgtatccccggcatattccacgataggtaccccctgaaatccgtagcctgcattgaacgacaaagccgtagtacccggaaaagcgacttggtattgccgggctaaaagccctgcaccgactccggtttgttgtgccccggattcagcgatatcaccgacaataaaatcttcctcccagtcggcctcctcatgttgcaggattattccttccttaaagccgattcccagatttttcaccaacccgttcatcaattcttgtttacccggttcaccggtaatgatcagattacctcctttagctatatatgaatccagtaatccctgttcctgaggggacaatcttttttcaggagccgcaatcaccagaatatcgatatcttcgggaataaccgtccggccggtcaaattcagggtatctacatcaaacccctgattcactaaagcattccggccgtttctttgaatcagtgaatataatccacctttatcattccaatacaagctccgctccccgtgtccggtcagaaaaactattctggaagcatcggtcaccaaccgtttcaaggccaccgtaatctctgtttccctggggcggatatccatgccgtcgtaaaaacgcagaaaagatttccggccgttcgcccgttccagtagataaatcatccggtttccttcggaggtcagatcgatctgccggtgaatttcttccggagacagaaaaaattccggatccaggtcctcgtcatcacatattttcagcatttgttccctcaaaggtaaagaagccgtagccccacggaaacggctatgatcggtgctatcataaaaatagacatatttcaagcgggtatcgggtttaaaacgtagaaaaggtttcaattcccggaggttcgacatttgattctccggcatccctgccggagcacttttatccaataaattgacatacatggtaatagtcagctgatcgtcgatcagattcatgacccgttggccttcgcgggtgatggtattgtgttcggtttccgtcgtatcataataacacatgaacatcggtttcgaagtcaggtatccgattcccagagcgatacaaaccactcccccgtaacgtgcccaccgccaccaccaggaataatgctgcttggtcgattgcaatttcaaaacagacaaggtcaaaaataatccgatcaccaccccaaagtacacgacatcttcactgcatatcagtcctgccgtaaacgttttggcccgtcccgacaaagacagccaccaggtaatctcctgtacgacaggaatatcctgccaaagtccgcctacaaaattcaagcaggtaagtatcaccagtgtaccgaccgctgccacgatctggtaagaagtcagggtagacataaagagaccgatagccgaataagcacacaaaaccagataaataccgagtaacccggacaatatcagcggaatatcgaggtttttcacaaaaataaaagcaaacaccacctgcaggagcaaaattaccagcatcaatccgccgtacaacatcatagcaagaaatttccccccgataatctgaaaattagttaccggcgaagaatataataacttgatagaaccggaactatattcccggctcatcaatgccattgtcagtaaaggaatatacagatacagattattcagcaccttgaagaacgaaccgctatcccccaacaataaaatcactgtctggaaaggaatctgcccccgtcccaaagctttattctgcaattgatagctaaaagtatcacaaaatgccattccggcctgaaaagcaaaaatgatcaggatcagccaggctatcggtgaatagaaaaacaaacgaagttctgtctgtgctattctaaaaatcgttttcatttgaactttcttttaatcttaatttctttttcttctgtagtgaaccactccataagccagggccaaaagaccgggcagcaatcccatggttccgaatttcagccagggcatatccttccgtcccaaatacaattcgttgtcacggggaggtatactggggagcaataccggaaattcatcccgggccaaccagcggaaagattcggtagccagagtgaaattagcagtcttaactccctgccgggcccgggtcagctctgcattactgatacaatcggcatccccggcaactaaaatccgctgttctttatccccgaccttacggtccagggcgacaatgacaggcagtactttcccttcggccgggcccggatgattcagacccttcaaagcatcttctgcatacaaccggttcacttgccaactgatggaatcccccacacaggcaacaggtgttatcccgaagccctttttctgtatttccagacctgtacaaccaggtaaagcaaaacaaaaaccatattgccgcattttctggaaaaccgggaacttttcatccccctccggatccattccggcaattgtcaaagaaggtaaatatccttccctggcctgtaacagcatcccattccggaatctcaccccaatcaattctgccaacggatttataaattcctgcgtacccggttcacccagcaaaaacaaatttcccccgcgttcaatatattcgcagatcatccggaaatctccctccgggatcttacttcttacatcggctattactaaaatatccacttcatccggaattctctcctttccggaaagagagaaatcttccacatcgaacccttgattgatcaaagcactccgcaaagacagctcagaggaaaaaaaactataatccatttctcttttattcgtactattccgttcgccgtatccggtcagaaaacacaatttgggcggttttaccaacaaccttttcagagcagcagtcatctcctgctcactggggaatacatacatatctttatacacccgtaaccaggtcttccgttcaccgttccattccacctggcggacaaaatgattcgattctccgctcagatcgatcttccggcgaatctcttccggcgtcagaaacataccgaaatccaagcccttagcctggcagattttttcagccctttcccggtccgacaacccgggatacaattcgtccagatatttatatccggcataatcataataatacacataatccagtttcaaattccgcttaaagcgggcataagggcggaaacgttcgaaatcctttttatgtgccgctggcagcccactctcataattggcatccaataaattcacatatgtagtgatcttcagttctcctttcaattgccggagtaaatcctgtgaaagaacagaaatagtattactctgcgtagcggtcgtatcccaataccaggtaagaaaaggacgtgacgaaacataactgagcacaacgactcctactgccaatcccgttaatttcagtatttttttcctccccggctgtttttctcttaccgcctgtaaacgccagaccgaaagtaagagaaaagcagcgatcaccaccaaaaagtaaattaagttttccgtattgatcatgccggcgacaaaaaggcctaccctaccgttcaaagccagccaataagtaatatcccggaccaaaggtatctcctgtcccactccgccgataaaattcaaaaaagataaaaaagccagagttccgatagcagccactacctgataggaagtgaggcaggacataaacagcccgatgacagcataagcacaaatcagcagatacatacccaaaaaattcgaaaaaatcagcgtaccgtccatatgcccgatcgtcaaagcccccagaccgacatatactaaaatcacccccagcaaaacggcacaataaatcataaccgacaagtattttcccaggataatctgggcactagtcaccggagaagaatacaatagctttatagagccgctgctgaattcccggctcatcagtcccatggtcagcaaaggaatataaaaatacaagtgttccagcatcaccgggaaaataccttttccgctcgtaaacacactacccgtcagagcctgaacctcatatcctaaagattggctctttatcgccggccagatcacgtcacaaaacgaaaacccacattgtacggcaaataccaccaaaatcaaccaggctacaggagaataaaaaataaccctcaattctgtccgggcgatttggtaaactatattgaaatctttgagcctcatatcatttactattcttagataaacgtgcaaaaatggtatccagcgattcccgctccaggcaaatttcttccaattgccatcctttctctacactccgggcaatgacctgttgtgtaataccggccggagctgtgaaatatacgcgatactccctgagggtcaacggttcgacttccgaaatgccatcgatatttttcaattcttccggagccggcggattaccgaaagtcaccaaaaaagaacaaggttctacataattattaaattcttccatcgtacccgaaaaaatcatatgaccgtgttctatcattttgatcttatcacaggtggcctgtacttccgacaagatatgggtagaaagcataactgcccgttcagcagcgatctccttaatcaggtgtctgacctctacgatctgcaccggatcgagcccgttagtcggttcgtccagtaccacaaagcgcggattatgaacgattgcctgtgcaattcccacccgttgctgataacccccggacaaatttccgatcaaccgctttttaaaatgtgtaatgccgcatttagcttcggccgtatctactgcctgccggatttcccgggcgtccatcagccgcagacgggcacaataagtcaggtattcatcaacggataattccggatataaaggtggccgttgcggtaaaaaaccgatatacttcttggcctctaccggatcggtcctcaaattgataccgttgataaaaacctccccttcggtctgattcaaaaccccacagataatattcatcgtcgtcgatttacctgctccgttagaacccaataaccccaaaatccccctctgactgatttcgaaattaatgtcttgaatagcccactgtgttgcataacgatgcgataagtgccgggcttctacgattgtttctcccataaataagctgattattttagttaagttaagacatgaaaaaagccgggtaagccgctttctcacccccattcatcattatatcaggtaattgttatattatttgaactacgacagtgcgaccggtcaccagaaaccgtatattagtggctttttccaacatccgcaaagcgacggaaaagtcatcgtacctctccaaatctccggtaaaatgaaaatttttgagttcctcgttttgataaaaaacagaaatattataccaccgggccagactgttcaaaatattttccagaggttcatcttcaaaaataaatttaccgtccttccaagccgaaaaatagtttgcattcacctctattttgtgaaatctccgatgccgtaagtcacagactgcctgttgatcaggtgccagttccaaagcttccttccccatcataaccctgacttttccacaattcagcgtcgtttttaccacctcatcccccgaataagcctgcacattgaactctgtccccaatacctctactttcaatttatcgtatacattcacgataaaaggatgcaagctatctttttccactttaaaataagcctctccttttaaactgacctgccgggtctgccccgtaaatacgaccggaaaacgaatttccgaatcagcattcatccacacatagctcccatccggtagccgaacttcatattccccaccacggggtacaacgatcgtattgtacttgatttcggcctgttctgcggcctgtaaatcttgcagacaatattccgccaacagaccggtattctttacagtcaccgattcatccacctgaatttcctggttcagggaatcctgcaaaataatctgtttgccttcgttcgtaatcagaactgctttcgaagatcccggatgaatggactggaccaataagtctgaaggctgcaaacggctataccggttatacaccagtaaagtcccgacaccgatcaataacagcagacaggctaccacccggtaacaggtgaagaaacggcgttttcgtacaggaacgtcagcaatctgttcccgaagtttatgccacactccgtctacatccaatccgtccacatataaatttctcttttgcaactcggtctggttcctgatttttgcataaagacgggcatgctcctcttgtaagctccaagcttccagttctgcctgctcttcagcggtgataatacctaaccactgtcttctgatcagatctgccatccggtattcttcctgatactccatttcattgtacattcaagattctgtcctaagaacacacaaagattgtaaaaggatgaatgggaatcattttttttattttttccggaataaaatatacaacaacacggggaaataacctttcagggaatttttcaacattttcagtgcgttgtatttcagggtttttacagtagtaactgcgattcccaatatttccgagatttctttattttgctttccctcgagagccagccgcataatttttccactttgtacaggtaattccgcaattgcattagagatcaagcgatatgtttcttcctgtatcagttgttcttgaaaagaaagttgtttatcagacagttcgatctgggaaaaatcgatcgttttctttttatctctcaggtaattataacaaagattacgcactgcaacgtaaagaaaagtcctgaaatccggtattttgtcatattccgcctttttttcccataaacggataaaaacatcctgtacaatatcctctgccacttccctgttagcgaccaattttccggcaatcacacacatagagggataatactgccgaaataatgcctcaaaagcactcaaattcccacacttgatatcttcaaaaaggatttctttattcattcacgttgcacaacttttaccgacgaagctaaaaataataatcaatttcagacctcaggatatttaaaaccacggtatcagcactgaaagtctccttaggatcacttccgtaaaaccgaacaaatataattacttttttcttattgaaaagcaaaaaatattcgtttcttcaggctattcacactccatcacactgattacaaaccacttaaccaaacaaacttctatttatttttaagcgttcattcatttccccgaccgtttctatccaccggataaatattgatacaaaaagtatatctttgcattcagataaaataacaaaatcgtatggtatcgagaaatctgacccaggaggaaatcacccggctgcaagcacaaggctgcagttcgacagattggcaacgtgtaaaagttgcttccggatttaaaaccgattatatacaaaatgtccgtttttcaggagatatcgaactaggcatattcgattacgagttcattttagagggaggactccccagacatgccggtttgttcaatgtcaccttacacaactgtcgggtgggtaataatgtcctgatcgaaaatatccccaattatatcgccaactaccggatcggagaaaattgttttatacagaatgccaatctgatcgtaacggaaggacgttcgtcctttggaaacggaactttagtggctgtattgaatgaaaccggaggacgggaagtgcctattttcaatgaattatcggcccatctggcttatattatcgccctataccgccattttcctgtcctgaccgagcgtctcaaggcactgatcgaacgatataccgagcaagtgtcctcgacagaaggaaaaatcggtaatcacgtacgaatcatcaacaccggaacgatccgtaacgtctgcataggcgattacacgaccatcgaaggtacatcccgtttgaaaaacggttccatcaacagtaatgcagaagcaccggtatttatcggtcataatgtgatggctgaagatttcattttttcttcgggcacctgtatcaacgacggagcagctttagtacggtgtttcatcgggcaagcctgtcatttaggccatctgttctcagctcatgattctctattcttcagcaattgccagggagaaaacggagaggcttgtgccgtatttgccggtccttatacggtgaccatgcataaatccagtctgttgatcgccggtatgttctcttttctgaatgccggtagtggttcaaaccaaagcaatcatctttataaattgggacccatccaccaaggtatcgtcgaacgcggttcgaaaacaaccagtgattcttatatactctggccggcgaaaatcggggctttttctttgattatggggcgacatgtcagccatccggatacttcggacctgcctttttcctatctgatcgaacaaaataaccagacttatctggtaccggcagtcaatctaaggagtgtcggtacgatccgggatgctcagaaatggcccaaacgtgacaaacgcaaagacagccatcaactcgattatatcaattttaacctgctcagtccctataccattcagaaaatgctgagcggtatagaagtactccgcaccctgcaacaggtgtccggtgaaacttcggaagaatattcataccaaagtgcacacatcaaaagtaattccctgaaaaaaggtatccaatattattccatggctatcaacaaatttctagggaactcgatcattaaaaggctggaaaacctgacatttcacaacaacgaagagatccgccagcgcctggcccctacccggacagaaggtagcggcgaatgggtagacctttccggtctgatcgtcccccaacaagggatcatccgcctgatccgccggatagaaaacggagagatcgaatctgtcggacagatcacggatactttccgccaacttcatgccgactattatcaactcgaatggacctgggcttgggaagtcatgcaaccctggtaccgggtcacacctgaaagtatcacagccggggatgtgatccggatagtgaatacctggaaagaagctgtggtcaatctcgataaaatgctttatgaagatgcgaaaaaagaattttccatgacagctcaaaccggtttcggagccgacggtaatcaaaaacaaaagaagatcgatttcgaacaggtacggggagcttttgaaaataatcctttcgtggaaaccgtccaggaacacataaaggcaaaaaccgctttaggtgatgaattgatcgaacgattaaaaaatatttaaaaataattggatataaactaaaaattatacccgttggcggaattaatttagtgcatacttaattctgccaatgggcttgttgttgatgaagtttacgtattgcagaatggtaagtgcactaattttgccgatgattctggcaaacaaaccattcgttattttcgcatagtttctgatggccaagaactggtctgtaagttgtgagaatattgtctcaatcctctttcttgcctttgcaaacggaatg

SEQ ID NO: 6025 - DNA, 728 bp, Unknown
  gut microbiota DNA sequence
aaaattttcaaatatgattttcaaggtcatttgcttgacaagctacgttttgaaaatgaggtggtaaatcataccggccatatttattggatgccggatggaaatatagtggcagaattggactattttcccggaagtaattatcattatgccatattggaccggaataacgattatcaggtaaaaaattatgcctgtccgtatggcattccttcgactctgccggtagctttcgatcatacgatgcaaagttgccggggagatcattgttggatgctgactttattatccgatacgatctatagatatgccgatggggaaattgtgccggcaatggttgtaaaatcgaatgccagacctgtaactgcagaagtacttttcaggcaaaattgggaaacggctttccatgctgatgcggacttgctgcgttggggatattcgacaggcatttcgaaaatttgggctaccgatcgtttcctttattttacatatagagatatgaaagactggtatgttgtctgttgggaccggatagcctgtaaaggttataagtacaaacaatatccgcggggaaatatatttatgccaggtggttttatagcaacatgcgcagatgcttttattggtgctgtttctgctcttgattttcttactccgcctgagggagttgggggaaaagagagggctcaatggaaagagtggattaaagggatacaggaagacgataa

SEQ ID NO: 6026 - DNA, 657 bp, Unknown
  gut microbiota DNA sequence
ggataaccgcagacattgcaaagatagccctcaacagaatggacgttgacaaactgggacttgactctctcgacaaacgtctgctgactatgataataaaaggctatgacggcggcccagtgggacttgaaactcttgcggcggctatcggcgaggagtcagtcaccattgaggacgtttgcgagccgtatcttatgcagctaggtttcctctcaaagaccccaaggggacgtgtggcgacacagcttgcttacgatcatttgggctttctcaaggacggacaaacgcatctttgatttagtgaggaatgcttaatgaggaatgaggagtgaggaattaaggtatcgcctagcggcgattgatttcttgttctgtaggggcgaacagtgttcgcctgccactgcactttctatctttggataaattttattatcggataaatttaatatgtgtgttaatatagagtttacataaataaaaaataatatagaggtatgacctcgaaaaggagctaattattatgggaagattatttggaactgacggcgcaagaggagtagctatcacagagcttacctgtgagcttgctatgcagataggcagagctgccgcaatggtactcacaaaggaaacaaaccacaaggctaagataatcat

SEQ ID NO: 6027 - DNA, 12733 bp, Unknown
  gut microbiota DNA sequence
atcccttctgaattggatatttttgttgcggaaattaataaaaagaaataataattaaaaataaaaatccaggtttattttttctttctattccggtccttgttcgtgttcggggaccggaataattctacgttttagccggagattattttttgcggcgcaattcaaaatttttccccaaatatactcttcgtacctccgggtcggcagccagatgctctgctgttccggcttgcaggatacggccgtcgtaaagcagataggcccggtcggtgatcgaaagtgtttcctgtacattgtggtcggtaatcaaaataccgatgttcttatccttcaatttctgtacgatattttgaatatcttcgactgcgatagggtctacaccggcaaaaggctcgtccaacagaataaatttaggccggatcgaaagtgcccgggcaatttccgtacggcgtcgttctcctcccgacaactggattcccaggcttttacggatatgctgcaacccgaattcgtcgagcatttcttcgagccggtctttctgctcttctttggtcattttggtcatttccaatacagcgcggatattgtcttcgacactcagccgccggaacaccgaagcctcctgtgccaaataacctacccccaactgtgcacgcttataaaccggttctttggttatttcctgatcatccagaaagatccgaccaccattcggagtgatcagtccgacaatcatataaaaagaagtcgttttcccagcaccattaggccccaacaaacccacaatctctccttgctccacttgcaccgatacatctttgacaacggtacgacttttatatttttttatcaaatgttctgcttttagtatcatcacgtgctgttttagaatacaaagataagaaaaagacagagaggaagaaaaaaaaatacaatgcctgcaggaaaatgatttaaaaattcaaatgaacagaaaaattaatagcaaaattctgaacatgttgtcctggccggtcttcgcggtgggtcagtctccatatcgcatcgatccggaacagccggaaaatattttctatgccgacccctgtttcaaaataaggcttggacaccgaggacattccctcggggaacaacagtacggcccgggtatcgggcaggcttccgttattcttatcggaaagtgtgccgatcaatcctttgaaaataaatacttcccgccatttcaattttttcatcaaaggaatcttccccaaaaagaaacctttaaaatgatgttcgtagaaaaatgccagccaggtatccgaagcaaactcatagtaattcatacatgagaaagcgtaaggatcataaaaataggtagcgtttccttcgtgaagtttcagtaaaggataaggcactttcccgaaaatttttcctccggtcagtaccacatgagacttaccgatcggcgaaatcggaaaatcataattgatagaagctacagcccggtaaaattcatagtcatttttaaacagccccttcacccccatggccagatcgacgccgataatcggataatcggatcctaaactgtatttatcgaatgctttacgaacgactatttcatctttagacaaacgggtattcaagcgtactatcgtcgactgtacagagggcatcaattctccgtcaggtttcacaaaaggcacataaggattagaaaacaggtccctgacctgtaccccaaaagtattggaaaccccttgccgccattctttctcaaagttcacatccaactggttgaccatactcaaccgatcgttatcccctctcgaaaagattgaactcaggatatttccttcggtaaacgcattgattcccgctcccaattgcacgacatcgtgtttgaaagcaaccgataacttcgaagtcggtaaatcgttgaaggaataatcgaatccacctgctcctttccagcgacgatccttcgttccataggctccgtaaccgaaaagacggattttcttgctgaaatcggttgtagtccgggcgcccaactgaaaacggcatccttcctgtttgttgaagctaagcaacttataataaggtccccactctacatattcggtatcgtaatacccacccaggaccatagagacaatcgtgtatatattttgatacaggggtacgtttttaatcgaatcgaccattccatagatctgtttttccttaccactcaatgcatagggccggatcgtatcccaaaaacgatcgtcatttttcaggacattattatcgataatcacattattatccattttgagcaccctgtcgggaatgaccggattcagctgtatatgcgagtaatctacttgccggtgccccaaaaaggacaccatcttcgaagaatcggacatgacgatggaaaaatcggcaaagattttatcctgcttcggaaaccagaccgaatcgtccaggaactgattttcattatccaacaccaggtgtctgatccagttcacattcaaccccttcatcattttgacgtgagccgattgcaatgcccaggtcatcgaatcgatatttacttccccatccaatacaggtgtagagaaagatttgggatgaaatctgattttataggtcttccggccatcgatctgcaaactatcgaccaggaaatatttataaaataaaagcccgtgatccgaaagcggactggcgaaacgtacttcgaaaatatcgatatagttgtcgtaaaaattgacgttggtatgtaaatggccggtaaactgcgccagggtatagtcttcttcaataccggaaatccggctggcattcacaatctcccgggataaggacggtgacttccggtaataataatcggcagaagcttcggaaatcatcacaggcagataagcctttcccgtaatgaccgaagtatccatgtgctcgaagataaatccgaaattcttttgtaacttcttatttttaaaccctggcttgatattcgtcaggtcgagctccatcttggtataagtcttacaataatattgttcgaaccgggcaggattatttctgtatttgtttttactgacattccggaggatcacatgtgccggattttctccgggagtaacttttacctcgtccagatcgaaagtctgaggttccagctgaaaatcgacagcattgtacgcccccttgtttatctttactgttttcgggagataaccgacaaaagacgcctggagctcagtcacttcttcgcgggtttcgaggtaatattctccatcgaagtcggtggtcattccaatagtcgtcccggtaaaaaaaacattgaccagaggtaaaacttctcccgtcttggcatccgtcactttccccttcacccgggtactctgagcccacatgcattgtccaagtaacagtaatacaactaataatacgattcttttattcatgatcattatactaccccttctctcaatatatcgtggatatgaaccattcccttgtattttttatcttcgtccacgaccaccaattgagtgatactattctgttccattttctggaaagcgttgtaagcgagttcttcttcctgaatagttttcggagaaaccgacataatatcccgggctttcaagccatccacatcttcatatttctcgagcatacgtctcaaatccccgtcggtaataatgcctaacaatcctccttcggcatcggtcaccgccactgcgcccaatcttccgcccgacatctccaatatcactttacggattccgtcttccaaagatacataaggccggttatcctgatcgaatacatcggatacccgggtatataaacgtttccccaaggatcctccgggatgatatttagcaaaatcacggcttgaaaaactcctgcattggatcagacaaatagcaagggcatctcccatcacaagttgtgctgtcgtcgagttggtcggcgccagattattcgggcaagcttcacggtcgacctgtgctttcaatacataagccgcattctttgccaggaaagaatcggtattcgataccatagccacgatctgttcgttaccgacattccggatcaacgggaccagcaccttgatttcgggggtgttcccgcttttggaaatacaaatgacgacatcgtcgtggcaaatcatccccagatcaccgtggatagcgtcggccgcatgcataaaaacagcaggagtaccggtcgaattgagagtagccactattttttgggcaataatggcacttttacctatacctgtaacgatcacccgtcctttcgtattatagatcaaccggaccactttttcgaaatcgtcgtcgataaatcgagccagattctgtatagctaaagcttcatcagcaattactttttttgcaacctccttaatatcaaccatcttagattattctttaaaatatttcttaaacaatagacaatatttatgccaaaaaaatcagaaaaaattatggtaacccgatttttttcctataactttactaaacgacaaaaataccaatttttgtcattcatttgcttaggtgatcataacatttattgtgccattttgtttgtccaaacaaattaagttataaatttgcatttccttgagaaaaagggtgtgcaaaatatatgaataatacaatgggattgcagattaatttacacgcaaaattaaaagagtattttggcttcgatcatttcaaaggaaatcaggaagccatcattaagaacgtgctggcaggaaataacacttttgtattgatgcctacaggaggtggtaaatcgttgtgttatcaattaccggcattgcttctcgagggcaccgcgattattatttctccgctgattgctctgatgaaaaatcaggtggatgccatgcgttcattttcagccgctgaaggagttgcgcattttctcaactcttcgttgaccaaaaatgagattttaaatgtgaaagaagacattttgagcggtaaaacgaaaatgctctatgttgctcccgaatccttgaccaaggaaagtaatgttgaatttctaaagaagatcaagatttctttctttgctgtggatgaggcacattgtatctcggaatggggccacgatttccggacagaataccggaaaatccgtccgatcgtcgaagaaatcggtaaagcgccgatcattgcattgactgcgacagcgacacccaaagtgcagaacgacatccagaagaacctggatatgatggatgcccaggtttttaaatcttctttcaaccgaccgaacctatactacgaagtacgtcctaaacaaggagatgtcacgaaagacattattaagtttattaaaaaccatgaagggaaatccggtatcatctactgtctgagccggaagaaagtggaagaactggcggaagtgcttagtatcaacggtatcaaagcagctccttatcatgcgggaatggatgccagtacccgaagtaccaaccaggaccgcttcctgatggaagaggtggacgttattgtagcgaccattgctttcggtatggggatcgacaaaccagacgtacgctttgtcatccattacgacattcctaaaagtctcgaagggtattatcaggagacaggacgggcaggacgggatggtggcgaaggaatctgtctgacttattatagttttaaagacatccaaaagctcgaaaagtttatgcaggggaaacccattgccgaacaggaaatcggtaaacaattgctgatggaaacagtcgcttatgccgagacttctttatgccggcgtaaagtactgctccattatttcggagaaacctatgaagaagacaactgcggctgttgtgacaactgcctctatccgaagaaagagttcgaaggcgaagattatatggtcgatgccctgcaactggtcagcgatgttaaagaaaaattcaaaatcgaacatttggttaatatcctcatcggtgaagccgattctgccatcaaatcgtataagcatgataaactggaattattcggtgccggttcggaaaaaagccggcaattctggacgatggtataccggagggctttagtcagttcatttatcgaaaaagatatagaacaatacggagtaatcaaactaacggatgaaggccaaaaatttttggataaccctaaaagttttatgctgatggaagatcacaatttcgacgagaacgaagaagaagaaaagatacaggagaaaggtggtgtatctgcgttggacagcactttattcgctatcctgaaagatttacggaagaaaatagccaagaccaataacttgcctccttacgtcattttccaggacccgtcactggaagatatgtgtaccaattatccgatcacactcgaagaattggccaacatccagggcgtaggtgccgggaaagcacagaaatacggcaaagaattcgtcgaagtcatcaaacaatacgttgaagacaacgagatcgaacgggcacaggatatggtcgtgaaaacagtagccaataaatccaaattcaaagtatacatcatccagaatatcgaccgccagatcgatctggaagatatcgcttcggctttggggctcaacttcgacgaactgatcaaggagatggaagcgatcgtcttttccggaacgaaattaaacatcgattattatatcaataagatcctcgacgaagagcaacagcaggaaatcatggattattttatggaggcgagttccgacaatatttccgaagctttcgacgaattcgaaggggattatgcagaagaagatcttcggctgatgcggctgaagttacattccaaacacggaaactgacaatggaaaaagttgcgggaaatattgggggtaagtcgaaatgatcgataccccctcttttttcgtcaactataaggggtatgtcactgtgtcacaaacactctccaactaccgtccttttcacctcgctcaacgtatttcttctgatcattatatatttcaatggctttgaatatcgatctgttcaaatattattcggaagccttagaaaaaaacaatgagatgatccggcttcataaagccaaagatgagcagaaaatagtaagaaaaagaaaaatttttttagaagtagaagtcagcgaagatgagtatcaggcttttatgaagcaaacgaaataatccgtcttatttacctcatactcatcttcctctagtttttcaattcattttatctacagaacggacaaattcgatatcctcccggaacaatttccggtaagtgatatgggtgcgccaggctttcgctccgatgtaatccatcagatgtatcattggaggattaaaatcgcccacccaattcaattccagatatttatattccctgttcgcttcgataatgcgctcagtaaagcgtttgatcatggccgcttccactcctttcccctgaaactcgggtaccactccgaacaactgtcccaaagccacatcgattttccggaaatgacggtaatacatcagtttcaaaccaccccacaaattcatttttccatttaaatgtctcactacctgattgatttccgggaacatcaggaaaaaaccgatcggttgctctttataaaaagcaaaataaatcaaatccttatcgataatcggttgtaaacttttataaatcgcttctacctgctcccgggtaatcccgtctactccgtgtacttccagattccaggctttattatagacctccaataaggcttctatggctttctgcttcccgatatccccataggtctggaccgtataatcgggatttttcaatatccggtcggctttccaaacgacaattttagaaaggctgtccataacaagacgggtgcggaatgtaaactgtttgaaaaaatcccggaaaccgtagttttcaaaaaaagaaacataataaggctgggtataaggcatcgcataaacaggcgactgatcgaatccatcgaccaacaacccccaccactcaatccgttccccgaaatttaccggcccttccatggcctccataccttttccttcgagccactccctgcatttatcgaacaaacaaaaagcggcctgccggtcgtcgatacattcaaaaaatcccatttgcccgacactatatttgtccagatgacaggttttccgattgataaaagcagctactctccctacacattgccctgcctcgtccttcaaaatccagcggatacattcgccattttggaaacaaggatttttcgcaggatcgaatacattccggatatcattatccaaaggacgtatccaccagggatttcctttatatagtcttaccggtaattccagaaagtccgtttcatgttgtcgggtagttacttcaattaaagtatacataacaaaaaaattaaattttttgacttaaggccattgcttgagccggaaagataaaatcggccaatcgcttgagccaaacgacaataaaagccaataatattcgcgggacgatcagccatacgacaggtaaccccaatacggcaaacaacaaaggatcttccaactgcgaatgcgatatcgccagatgataattcaacaaatccgcttcggtcccggttagtttaccttgccgggcataatccatcaatacagcggaaccgtaagccaaccccagcgtattgcccaccacccataaaaaagccacctgtcggggtaaacccaacaattgcatacccggacctaaaagcgaagagatccatttcaataccccgaattcttccaacagacgttgcaggatcatcaatccggtaatcagggccacgactttcagggacaaccacagactggtttgcagccaattgaacaaagtatcgcggaatcccaagtcgacagaaggctgcgctatcatccgccctgcaaactccggcaagatcagatttaaaacggcagcagcgataaaactacaggtaaaacggagtaagaccatcttccaacccgcagaaccggttttcttctgtaccaaagtttccaccggataattatgggaaatcaggcacatcatagccaacaaaatcccttctctcaccgtgaaatccatattcgacagcaaagcgatcaccgtatagatattggtaaaaataccggtcacaaagaccaaagccgcatcaccgggcaaaccgatcctggtgaacaaaggagctaccacagcagaaacagccggcaacacctgaaagtaggtaagcaacatcaccacgaaagaaaccggaagcataatcttcaaaaaccagcaagaggttttcaatgccaccggccagactttcctgatacaaccgattatcctttctttcaccatatcctattttctcttttttcctcttcccccttctctctctcagcctatagcttttagcatttagcttttagcttttagcttttagcatttagcttttagcatttagcttttagcttttagcttttagcatttagcttttagcttttagcttttagcattttactttttacctcaactgctcggtcagcaaccggatctccaatgccgggctaatccgttcgtacagaatattataaacggcattcgttatcggcatatgcacattatactggtcgttgatttctttaattcctttcacgccgaaatacccttcggcaatcatcagcatttccatttgtgccgatttcaccgaatatcctttaccgatcatcgtcccgaaagtccggttccggctaaactgtgaataagcggttaccagcaaatcccccagataggccgaactcttgatatccctttctatcggatgaacggcagccacaaaacgctccatctcctgaatggcattggataccaaaacggcctgaaaattatctccatatcgcaatccatgacatattcccgctgcaatagcgataatattcttcataacagccgcatactccgtaccatagatatcgtccgaaatcgtcgtcttcacataatggcagttgaacaattgtgacaccaaccgggccacccgggtatcgtcacaggcaaaggtcaggtaagacaggcgttccaaagcaatctcttctgcatgacaaggccctgaaatcaccacgatctgctccaaaggtacttcatactgctggtggaagaactcaccgataatcagattatcatccgggatcattcctttaatcgccgacaccacaatcttgtctttcaacggacgggtggcttttgccaccacatttttaagaaaagcactcggtatagcaaaaatgatgatatccgaacgggcaatcagtttgtccagattatccgtaaaagaaatccgcgacagatcgaaatcgaccgaacaaagatagcgagggttatggttcaactctttaaaagcgttgatggtctcgatattacgcataaaccaattgatatgctcattcgtttccagcagaatcttagcaatagccgtagcccagcttccgccgccgacgatcgcaatccgtggattttcaggaatttccatgccgataaaatttagtttaagccaaccattttttcacttcttcgggagtcaaccctgacaatcccaacttttcttttttgttgattccgcaaagctcctgatgcaatttattcgtattcccgactgctttcaaagcttccaccgtctgatatccggctttcttcaccactgcgatccattctttcggaatccccagcgcctcgtatttctcatcgccgtctacggtaactttcttttcgggcttcatctggggaaagaacaacacatcctgaatcgacgcgctattggtcaggaacatacaaagccggtcgataccgatacccataccggaagtcggcggcatgccgtattccagtgcgcgtacaaaatcatagtcgatatacatggcttcgtcatctcctctttcctgcaatttcagctgatcctgaaaacgttccagctgatcgatcgggtcgttcagctcggaataggcattagccacttccttaccgtttacaaacagctcgaaacgttcggtcagttccggattttcgcgatgtttcttcgtcaacggcgacatctctttgggataatcgtaaataaaagtgggctggatataatgtccttcacacttttcaccgaagatctcatcgatcagtttacccttacccatggtcttatccacggggatctccatttttacacaagcctcgtacaactcttcttccgacattttcccgatgtcgtacccggtatattctttaatggcatcggccatacgtacccgccggaaaggacgtttaaagtcgatttcattttcgcctatcaccgctttcgtagtcccgttgatcgccagcgcagccgtttcgatcatctcttccgtgaagttcatcatccacagataatctttataagccacataaatttccatacaggtaaattccggattatgtgtccggtccattccctcattccggaaattccgggaaaattcgtacaccccttcaaaaccgccgacaatcagccgtttcaggtataattcgttggcaatacgcaaatacaaagggatatccaatgcattatgatgagtgataaacggacgtgcagacgctcctccgggaatggcttgcaacacaggggtttccacctccagataccctttggaattgaagaaattccggatagcgttgatcatcctggtacgtttcacaaagacttccttgacctgaggattcacgatcaggtcgagataacgctggcggtaacgctgttcgggatcggtaaaggcatcgaacaccttgccttccttctctttcacaatcggcagcggccgcaacgatttcgacaacatggtcaattctttggcgtgtacggaaatctcacctgtctgtgtgcggaacacaaatcccttcactccgacaatgtcaccgatatccatcaatttcttgaaaaccgtattgtaagcggtcgatgcttcatctgtagaaatatcgtcccggctgacatacacctggatccggccggtagcatcctgtaattcgaaaaatgaagctttacccataattctccggctcatcatccgtccggcaatcaccacattccggggctctgctgtttcgtcgaaccgctcttttatttctgccgcatgggcattcacttgaaactccggtgccggataggcttctatccccagtttagccaattcattcaatgaatttcttcggataatctcttgttcacttaattccgtaaagctcatcttttatatttttaattgttttacttccaacaaactatcattccagaattttaattaattttgcaaagttactattttcccgaagtaaaaacaaatcaaaataaaacagccattgtcgggttttcaacaatggctgtttttacaatcctgatcgacttatttttactgtatttgcagaaatgtgcagcagttcgcctacttctttataagattttccttcagacaacaaatttactacccgtcggcattccggagtcaattcctgtatcatttccagtaattgccgttctacttcctgacggatgatcaattctacagcagaagtttcagtctcctctcctctttcttccaatttttccgccttcattttcatataccgcaaataattgatgccggaattacgaacgattgtatatagataggaacgtatcgtcaaaagcgaactaaaattctgtctgttttcccacaattt

SEQ ID NO: 6028 - DNA, 320 bp, Unknown
  gut microbiota DNA sequence
caacgaagaataaaatttttcaaaaacataccggaaaaccttctcctctccggcttgaaatgcagaaataaaagttttctcgtggtctaaatcgtattctttcataaaaaaacgttcgtttaccgttgggtttacggtgctttaagctatccgagcgacaacaccccggtaagggcactcgacaagatcctggaaagcggacggctgaaagacgtatacgaccgttgcgcctattacgacgagaaggtttgcaaaagttccttcctcaagcagtttctcgtacatcaccagacctcccgtttctgcgtgcagaagcttta

SEQ ID NO: 6029 - DNA, 591 bp, Unknown
  gut microbiota DNA sequence
ccctattggagactgaaatcaaatatccgattctacaagggggtattttgcctttttggacaccctctcgttcatatcatccggatattaatccacggcatcacggacgtagcgcacactcatgtgtttcggataattggtttcgtaatttgaatccacgattcttgttattcctcgttcgatttgggaagagcggaaagaaatcttacgataataagcatccggaaatggagtttcatttttctcttccgtagccgtccagaaataaccgaactctctccagtgccggaagcgtagcgcggctggtcgacccgttacaatggcatatccaccgaaaggcaatgcaatacccgtccccgttatatcctgttgcagcaaagtgccttcctctgttccgcggaatcccgtggcatcggcatctccctgcgacatgcccattgcccgttccagttttttccaatcctcgtcggtaggcaggcgccagccttccggagcattggcttttgcctcctcataggaataaagattcccgtatctgtcccattcctccggagtcaattcattcatctgaaataaatgagttagacgtac

SEQ ID NO: 6030 - DNA, 601 bp, Unknown
  gut microbiota DNA sequence
ccctattggagactgaaatcaaatatccgattctacaagggggtattttgcctttttggacaccctctttttatgatttagaaaatcagattagtatcccaataattttcttaaatagttaatatccaaggctgctttgtaaagtcttctttttagactcagtttgtctttttgttctgatacgatatgtaaagctacttttctaagcactgacaagttttgcgaggagtatcctttccttgccctgcaattatcctctttaaaagtaacatccaggtgccaatgaagttggttttcaatgctccggtgtccccttatcagcttttgaaagtaagacgcgcttaatccgatctcatcactgatataatatctggtttcattggttgtcttcccgtttatttcccgacttgactctatttttataatcgtgcccggtcccctccaggatcgaatagtttccgcaagcagatattcccttgcaggaagaatgcagcacttcctgacctctatccttccatgatctttatctacgctcgtatctttatcaaggccgccgtttactttaaatgcacattcaatatcttcatacagagatttctga

SEQ ID NO: 6031 - DNA, 303 bp, Unknown
  gut microbiota DNA sequence
cgaggcgaaagcggatgcaaagataaatacttttacatattccctccaaatctttccgcacttttttttcaaactttttttcggaaccgccgtagaagaaagcttctgcaggcttcatccgcaaaagatgaaaaacacatcagtcaaaatgtttcagaacgtccgcttcgtttcagaaagcggctgcaaaggtaaggactttttcattacttccaaacttttcaaaagaaatttctgaagttttttttcagaacccgaccagggcaatatcctgaagaactacacacaacctaaaaacctgta

SEQ ID NO: 6032 - DNA, 47892 bp, Unknown
  gut microbiota DNA sequence
gaacccgaccagggcaatatcctgaagaactacacacaacctaaaaacctgtaagccaacacatcataccctctcacctcctccgtttgttcaatacatcggttcctgattgcggctgcaaagatagaacaattaatgccccatttccaaattttttacacactttttttcaaaaaaaatgaatcactttggacaagttactaatttacaacaatattattcaacgtctgtttgtaagattccatttagaataccataaaaacaaaagagtgtattcaaaaatcgttttttgatacactctttccaatataactacctattcctgttatccggatatttcaaaaatacaatatatccgacacatcccccccattctctttcccatctctgagaaatttttggtatttcaccataaggtcaaccggataacctgccactccttcatacttccggatcatattcatggttttcagatccaggaccagcacgtctcctttcagttcctcgcccattccttcggtatcttcaccatagcgggaaatccctaacaatatttcctgttccgtcctggatactgtcatacaggtgattttatcatcagcattgtaaccgaaatcggtcaatgtcatgatcctattctgacttcccggcgcattgccattttccagatctctcagattataacgatacaggccgttatccgttgcaaaaaacatataactctcattcttcatcggataataagaggttccggaatttatcacctcaccaggcacaattacatcagccagtacggtaaaagggacggcagcggtttcgcttgtcttcgacggaagtttcaggtataacatccggtaaacggaaccgtttcccaaaacagcgacagcctgattcggagaagcagtatgtgtcccgtacaaaagtgaatagccggcataaatccccaattcagaacaagccctattagctgcagaactgtttacattggcatatataaactgtccttcactttcatcaaacaaatataacaattccggagaactgtagttttgtgtgccactcccggtcaaagatgccagaaacataaccggagacaattgcccatgccaggggcttgctttttgcataaatgtcatattcaaatccacgttgtacgcaggcatagccatccgttgatcatgccaaagctcatcattggcaatcacgaaaatatatcctcccaaactcgttgtagttgcagacgtcgtcaaatgccagcaggctttcacatcaaactccgttatatccggcggcaaagtcatggcacgtgagataaaaaagttatgatccagatacttgttttctccgatctcaactaaggtctcctcactcagacacttcaaccgctgatccgtctctattttcaatcccgaattgacattagccgcttcaggaatataacaccggtgaatcttgcgtggattcgttcccaaacggttaccggtcaatgcttcataataattcggagtaaaagtactcccctctctgtccagacgcttaaaggataattctgcatgcccctgatacttgcttaaaacaaggataccgtcacctgccgtagaactggacacattgattctgaaatttttaaaggccttcgtccccaattccttatcggttaccacaaaacgtgctgtattaatccccaacgggaaattagcatatacattcagatctttcgtcgtcgccacaaccttctggttgacttcccacatataagtaaaccggtttgaatccgaatactgcgttccctccaaagtcacgggaatagacaacaaatccatctggtcacaaagaaccaggctatcgatattctgtatgctgatctggttgatttcccgataatcgtaatttcctttatcatcataacaggcatatgccaggataagtaggtataaaaaagtaattatttttttcataatagcctcctatttaattcaagtccgtaatctcgacaagtccgtccatcataatccgcataccagtctcatcatcgataatgatatttttattcaaccattctctcaatatctgggatttcttcgtcatatccacccctgttcccacaaatgcatcttcaatagcgaaaatcggatccagctcgatcagcttacgccattttttaggatgataaaatccgagttccccctcattggccgtccaccaggctggcggaaacaaaatgtcattgacagataatttcatctcacgcccgtcttcaatgcccagctgaaaatctcctccggcaacaagtgtaagcatcagcgtcttgctttcaggattccgaaggcttttactcagatttttccggaaaacaacaatccggagggtatcctgaaaacggccgggaccgaataattgctcctcagccagggatacataatcttcatcggcaaccatatcggtctccccatttaaataattacctttttcaagtacttttacccggtaagtacgtggttcttccgacgtattacctaaaacacgtaccactattttagccgtatctgcaccaacgtcatccgaaagttttccaaaagaaaaaacgacagaatccagacttactttgttgcccaggctatttaatacctcatactggaaatatatccggttgacatcatcatactgatattccaccttctgctcacatccttgtaaataaaggcaaaaccataaaaatacatatataactttcttcattggacaattcaattttgtgttctgttaccatactctatttcatcttccgggatcgggaatacaaagacattattatcagctttcacctgatcttcggaagtatttccccagatatcgtgatgcaaacgtttataagttaaaaagatcactccttccccgataaactctttgcgtatttcccgcatgatcacgtcttcggttacttcctgcgataccacctctttctgtgtcctggcctgtttgaaagtctgcagtaattccgcagcatgccccggatcgtcttccatccaaccctccgcagcaatcaggtacatttccgacaaacggattatcggaactttcggaaaaaaacgtttactattatcagaggtatattttacaatataaatttcactgtaccaattcaaacggtaatcatccagatccccttcatatatgctactctgaaaccctacagccatctgtaaattaccgtccgaaccagtcacccgtttatgtatcgcttcagcacctgtttttatagcctggttccgtagtgaaaagatatgctcactagaaaaaagcaaatctttatcgaccatatccacattcaaacttttctcataatccaataaggcgaattttttactttcaatcacctcttcagccaaacgacgggcttcttttttatattctccccccatatccagataaacccgggccaataaagcctttgcagcataataattcattcgtgcaacatactggtcagcctgatctttattttcatccaccccgtttcctaattcatagggtaccaccgaacaaatgggatcatctttcaggcattccaaagcgttttctaaatccccgaccaccagattcagatattcctgtgtcgtatatacagcaggtgtctccactccgaacttcagctgataaggtaaaatccgggcatccttatccagcttcacatcgggagcaaacaaacggtaaatatcgaaatgatgcattgcccttaatgccaatgcctcaccccggacctgattacgccgggcatccgacaggacagaagcatttttatcactccactccaatatattattgatggctgcaatattagcatataaagcataccatatggaatagatataagcctccatatccttgtcttcataatcataatccctgaatattttcatggcattcggcacccgggaataatcataagtacgcgacatcacatccagcatgccgaatgaaagggtctgaccatatagtcccgccgccgacatatcataatacaccccggccaacgcttcggaaaatccacgctccgtactgaacaattccgattcttcgctctggtttatcaatttaatatccaaccaggaattacaggagcataacaaacacacccaaactaaattccatatgctatttttcattttcataagttctatctttatctgttaacgactaaaaagtaacattcaaaccgatactgaaagtacgtgcaaagggataactcgtcccccgttcctgttttaccgaggacaagcggaacagatcggtggaactcaacagcagcttcactctttccatatacattttctgggaaatcttacgaggcaactcatatgacagggagacactttgcaaagccagcaaattgttatcaaataccaggcgggttgtctgatagggcgcactcgtatcgtcgatacgtctgaatttcgcatgatcccccggttctttccaacggtcgtacaatacccgtttatcagcattcttaagcggattaaccccttccactttcgaggccagggtagcattatatatttttccaccgtactgatatttaaacagcatatacagattgaatcctttccagttcagattagtgttcacatttccttcgattttaggcttcatatccccacattcgatcttatcgttatggttatattcaaaagtcatttccccgttacgtttaatataaatttcattcccggtagccggatcgattcctccggaacgcaccaccatcaaagccgtctgtgaacgtcccgcctcgaactgacgatataccaccgttccctggtttgcccggtcatcgttggcatattgattgatggtttccaactgattggataattgggtaatcttactccggttatggaaagcggataaggtgacattccatctcagatctttgactgcatcctggatcaggttgaaacgcaaacgggcttccacacccgtatttctcaatttcccgatattctccacataatcgataaatcccgtcgaaggagctacagttacaggcaacagcagactacgggtatttttaatgtaaaaatctccgttaaacaccaccaagccgtgcaagaaagtaaaatccactcccacattataagaaagggttgtctgccacttcaaactcgaattaccgtatccggccagactaactccgaaatttccgttatattccctgctaaaatcatacaaataagttgtcagcgcctgggtagatgaaaaattagttgtccccgtacttcccaccgaagccctcagcttcaatgcgtttttctcatgagcatgccaaaaagactcattgtgcacattccaggctacccccaatgaccagaaaggagcaaaacgcgaattacgtccgaatttactggaaccgtccgaacgaaaagaaaagtccaggaagtaacgattgccgtacccataatttacattggtaaaaaatcctaccaatctcgatttatcataggttccctgaggactggtattttcctgaaaagcattggctgcaccgataaaaatcatgtccggattgataaacccgactccggtaaaagactcaccttccgtctccgattgcatgatattgcttccgaccccgacattcagcatgtgtttatctatcgtcttattataagccagtgtcaaattaccgtcgaaccggtcactccgggaatttaccagataataactccccttctttttcggatccgtttctgtactgtaatccagtgattccggagatttaaacaaatcccgccggtcaaactgcctggtataactgaaacgcccctgtaaacgcaaagccggaataatcctccagtcgatattgaaattatcctgaacagaggtataagtgctggtattacgcttgggcagattggcactgaccagcggattccagtcacctgaagaaagtttttccacaaactctccgttttcgtcataaatccggtcatacggattctggttggcatacaaagagaattcattgtacggagaattcttcgctttcacattatcgaccgacaagtcattccggataaaaaagctggaaccgatattgtaattgaaagtcaagttaatccccaaccggtcccgtccggatttcttcatgactcctttatccgtatcatatcgtaaatccacgccataacggaaatattgatctcctccttcaaaattgagcgaataacgctgatttaacgaagtagtcagaggctgggacaaccaataagtatccacccctcttttcacctcttccaaacgtgaattataaagctcttccagtcgtacctgttctgaataaacaggatcggtatatacaccggcccggcgttcatattccagtttttccgcagcattcatcaaattataatccctcaaatccgggattgaaacgttgtaattggcattcaggtttatccggatttgtccggctttcggacggatagtcgtaatgacaatcactccgttggcaccccgagacccatataaagccgttgcactggcatctttcaggatagtcgtggattccacccggttcaggtccatatcatagatccgttctgccgaaacctccactccatccagaatataaagcggggcattggggtttgtcgtcgcatcgtcagcattggccctcaggtcaaaaccattctctccccggatcgtaatatccggtatcacattggggttagacccttgtgtaaggctctcgttcaagcggatagaaggatcgaaagcattcaacgcctgaatcatattcaaagccccgacttttttcagttcctcggtattgatggttacctccgaacctgtaaaactctctttcgatttctggaaataccccgtcacaatcacttcgtccatctctgcagcctcctcctccatgacgatagtcaattctttcccttccacataattcacctcctttttacgcattccaacaaaggtacacaccaggacgacagccttgccacggggtacctgaatagaaaatcttccatccatatccgtagcaacccccaggttcgtacccttgataacgacagtcactccgggcaaggtatgtccctgtacatctacaacttttccttttatggtctgtatctcctgctcaaactgatcctgtccctgtttagcagtaatgaccaccgtattatcgatcaacttgtattccaaattggttcctgtcaaaatatgatccaatacttcctgaagattcaaattcgagtaatccggattcagacgatccagctcacgtacataatcatgattataaaggaaagtcactttggattggcgttcaatctctttaacgacctctgcaaaggtcacattcttcattttcaatgtgatattttcctgcgaatatcctttcgcagtcacttgaaaagtttgtaacacaagtaataaagtcatcagcttcatcgtccgcaccattcgtcccgggagaaatacaccgggaaatttcctgtttttcgtttttttcataactttgtttgacttataagtaaataaataccagaacggacaggcggccgattccctacatcggctacctgtcttttattctgcgatataaatagtagttcctgaaacattaaattttgcgggacaagccagagccagcatcgacacgatctgtccgaaatcatcataacgtcttaaattaccggtaaattcaatatgccgggctttttccgactgaaacaccacctgcacatcataccagcgcgacaaagtcctcataatatcttccagagtctgacgttcgaatataaacctcccgtttttccaaccgatatatgcctgtacatccacttgctttttaactaaattaccagtcttcagctctatagccccctgttcattcgggtacaacaatatccgttttttgtcggtgaacatgcataccctcccttccaccagggtggtctgaatcatttcttcatcctgataagcccggagattaaaagaggttcccaacacctgtacctgcacctttcccatctctataataaaaggggacgatttatcagaggccacctgaaaataagcctctccctgcaaacgtatccttcgttccccggagggaaaaacaatcggatattccacttcactctccgagttcagccagattttcgttccgtcggacagtacaagtgtaaattctcccttacggggaatactcaaagaattatacaatagctcttccggcaaagacggaatattctgatacactaaagaggcagacgaagccttagctacagaaccatcctgctgctttatagaagtggcagtatctccgcacaaatgaatctgttccccgttggccaaggtaaggacagccttactactaccagcaggaatgacagatgtcgatacctgaggaacaagcgtaccgttcctgtcttcccggagccagcaccagtaaattcctattgcaatcagacatacagctgccacagcagctaacccacgcaacttcctgtaagaccatggacgttcccttgctattctttcagaaaaagcagtatacgcagcagccggatttatagacaaatccagttcgcgtttccgcctgatatagtcacgatcattcagattttcaaattgttgctgatgttccgttgatttcttcagccaaagcctgagttcttccatctcctcttctgagatagtctcctcctgataacgcaaaatcaaatcagcaatccgaaatgctttctcactttttaattccatattttctgccttttgtataaagacaggaaaaaactaaaaagtgggcaaaaatttaaaaaattaacaatgctaatatccagaaattactcaaccgtatccgcagcatcttcatacctctctttctataagcctttacagcctcttcggttatccccaacaaagaggcgatctccgcattggttttcctctccagtatcagataaaagatagtcctgattttagggggtaaaatatcaattgcctgtttcaatgccagatacacctcttcttcgatgatctgcgatagaaaaaaatcagcttcagcttccccgtttaattgtaagtattttttcttcaccttatcatgttccagataattgatacaccggtttctcactgatatatacaaccaggatttcaaagaagaaagttccgaaagatgctgcctctgtttccagaaatcataaatgacatcctgtaccaaatcctctgccagatcggtatctctcaaatattttgcagcaaacatgaccaatgaggaataatataattcaaacaaacgtttataagccttctcatctccttctaccaacagtttcagccaatgtttttcatatttaattttatcttccaccccattatgatttaaaatgcactactctctgtattttataaatacaaatttatccaatttctttaatttttcaagcttctcctttttatcttcatcctctattcattggattccacgcttcatctccgataacttacatccaaaaatagacggagggaatatggggatggaaacctgtccaatcctctctgttttaatccttcacaatcccgttgaaaaacaataaaaaaagaactgtctaaaagtgaaatgcccccaaaagttttatgtccaactttttgagggcacttcatttcttagacagcccctggtttcatcaaaacactttcgatcttttctttccccggtctatttcggattatagggccgggtatccaacggcaatccccactgcggattatattttataatgttattcggaatagggagaacgtaatattcggaatttatcgaagccgaataagtctgagttccgattttgtgctcgatagtggttttacaccacggcttgccattatccaatgccaaacgtttcagatcgagcacacgctggaaagttgcaatcggtaattccctgcggcgttctttcaggatttcctccaacaactgatcttcagtcagggcagctccattgggaaggtccgtacttccctgcgtattgtcatacctgtatttcctgagggtattcaggtcagacaaagcttctgttttccgactgttccgggcgtatgcttctgctctcatcaacaacagttcaggataactgaatccttgtgtcatttttatttttacatcccgataatattgtaagacaatcccgtcatcatacttcgtatcccctacagtcgtcgcatatcctaaatccttcagcataaacaaccggtatctcaaatccgtatttttatcgaaaagagagataaactctaccgaaggataaccactgcttcccatccctcctgaaggagcaacccgatagaacaacatttcccggtgataggtctgtcccaaataatcgtcctggcccttcaaatccaatgatacctccacatcagtacccggagaaggactggcctccggatcgggttcatagtagaaatcgttgtaattataaatcaaattatccaccgaaccttgctgagctaaggccgatgtccaggccatatctgcatattccagcatttttccgaaatcacgtgcaaacatgtaataataagccatcaaagtctgtactgcacatcgattcatacgggcaggatggtttacattatcgggaacactcttcagagcgaaatcgatatccgctttggccagcccgaacacctcggccgttgtggataatgccggattagcttctgtaggagaagctgcggtacgataaggaatcgtttttgtatcgttagctccggcaggatcataaacaggtccataaatcatggccattgtcagataagaccacgcccgggcagcccgggcctgtgccgacaattcctcagccaatttcgccgtcttttcattctttacgtcatttaccccgtcaatcacattgttcaacaaaccgacggcacgataagtaccccattcccaaaaataatcgggtttttcaggattaccgtaaggcaatttaaacgtataggcagcgtagcggttaatgttcggatgggttgcggtataattataattggcactattctcactgatttgcaggttatctcccaaagaagcgagaagcgtacctttattattgtccatatagtaccaatctaccgtatacgtattattgagtatattctcaaactcttctacttccgtaggaatcaattttccgacaggcttgacatccaaaaaatcatgacaccccataaacaagcccaccattaaagaaatagtcaataatttcgctttcataagtatatatatttagaatgaaaatgataaaccaaaataaaattcaggacgcaatggcaatgacgtgaatccctgttccgtaaaattattatatgctcctgtcatattcacctgagcagtttccgggtctatatccgtccccttagccgtcacagtccaaatattgcgtgcctggaagtaagcccgaacattgtttactcctacagaagacaaccaatgtttagggaaggtataggcaagcgtcacatccctcaatttcatataactggcgtttccggtcaggaaatcggtataagggaaataccaatgttccgtacttccactccggagttggggatattttttggtagcttcatctcccggcttttgccaacggtcggcaacatgacgattctgataattcataccatagaaaccgtctttacggtattgatgccctaatttggcgataaacataaaagaaagctgaacgtttttatatttgaacgcattggtaaacgacaaatcatatttcggacgtaccgtacccaaatatataatatcatcggtagtcaagttagcgagccggtctttctctccgtttgccgaataccccaaagcttctcctttatcgttcagacccgcatatttaaatccaaacatagcgtcggcagggtaaccttcagctaaaataggtgccatactggcccattggctggtatacatccgggttacattatatgttttaactttatttttattataactgaaattgaaaaccgaattccagacgaaatcctgttttttgataatatcggcattaacagaaaattctacaccattgttctgcatttccccgacattttttgtcagactgctgaatccggtcgtcgggtcgatggcatctctggccaacaaatcggagctgttcttcaaataataatcgaaagtcagatttatacggttatcgaataaagcgatatcggcaccgatattggtcgtttttgtcttttcccaacgcaattgattgtttggaggagaagcaatactataagaaactccaccggtcatttcctgataagagcctgccgcaagcatcaggtacggaccttcgcttaaagaaatatttccgttgattccgtaagaagcccgcagatttaaacgatcgatccaggagacggagaagaatttctcttcagccaatttccaggttgctcccaccgaccataacggtttataccggtatttcgaatctgttccgaagaaattggtcaaatccaaccgtacacttccgctaaccagataacggctgtcgaattcgtaagaaccgtttccataccaggaaacaaaacggttatcccgcaaattatacgccccgttttttaaagaataaaccgtagtcgagccgaacaacatatccgccttattcaaacctgaattccaatcttttatatttaccggaatgaaagatcctgccgtcggattatatcccaaacgggtcgcatactgattattactataagtacttttgcgtacttcatttccggcaaggaaggtcacccggtgcctgtcattcagaaacgaacggttaaagttgatctgagtccggagtgtccagctttcattgatgttacgccattcatcgatcattgctccgtccggaaaataatgactggcgttgtttgtcttggaggttgcatcattgtattgaatcctgatacgataagcatcccggtcataagtcgttttctccactttatttcctttggtccaaatccctccggtctcgatattcaatccatcgataatatatatctttaaggttcctcccaaacgagtctgaatatcttccgtatcggtcgtctccttacccacatcctcaatcggattatagctccagtccttcatattagcgattttctcataattggcaattttataagtactggtcgaaaataccgtcgtcggtttgcccgtctccggatcgaccagattatcataaggctgtatcaacgaagtattggtataacccaacaaatcgctccaacctcttaccggatgttcatctttagtatatacgacattagccattaatcccaacgaaatgtatttggacggtttccagtcgttcttcaaatcgaaaatcagacgggaattgtcggaatgaatcatatttccccgattatacatataattgacagctgcattaaaccgatttttctccgtaccgccattgatggctatattatgctgatggctgagctgattgcggtaaaagtatttctccgcctgcttcaaaccgtttatattccgcaatttatcgatttcagccaaagcttctgcctcagtcatatttccttcccgtgcctgcatcatcagccaggtcactttactcatattgctaacggattgcgtactgggacggttcggattctggtaatacaaatctaattccgcatcgatataatccgaagtcgacgcccggttcaatttagataattgaggctttaaaatcgtacttacaattcctttataagatacgttaaaacgatcggcagccccacgggtagtcgttactacaatcacaccattagcagctctggacccatagatagaggcagcgaccccatctttcagcactgtaatattctcaatattctcaggattaatcgattcgagccccccctcgataggataaccgtccaacaccaccaaaggctcgttttccgcattgaaagttgacacaccacggatttctattttaccgtctttatccagtacaactccagtggcctgtccttccaggacagaactcagattcgactgtaattttgtctcgatattccggggagttatcactccaaacgaaccggtagtccgttctttcgagatagtttggtaacctgtaacaatcacctcatcgagactttcggcagcgctttccaagaccactttcaattcctgattgtttccgatttttatttccttcgttttcatgcccacaaaagaaaattgcaaaatcaggttgggctcatcgtccactttgatctcaaaccgaccattgatatcggtcgcaacacctgtctgggtacctttcactataacagaaactccgggaagggtaattcctttttcatctttgacaattccccggatcagccttttctgttgcatcagagtttccagcacctcccgactgttttccctgtctttgattaccacaacatcccgcaggaaagtgtaagtaagttccgtcccctccaatatctcatccaatgccttctctaattccagatcatgaatttcgatccggcggttcccgatatttttcaatttctcctcattataaaaaaaacggacaccggtttgttgttttatttttttaaatacctgacgcaactctgcgttctccatgatcagggaaacctttttcaattgtgcatttgttgcagcaactaccgaaagattcaacatcacagtaaacaaaaggcataatttcataacccggaataaaggattaaaattaatgggtacactacgcccatacacttcgttttttttcataactttgttttagttttagtgaatactgaaattaactgctcggatgcggatgaaggttggcgctgacatccgctcctttattttttattctatcaaaacagtcttgccttttatgctaaaccggacatttccaccgatttccataaattccagaaaatcgttgattgtcttataacgttccagatcacctgtaaaatgtaattttttgacttcttcgcgtttataaaaaacggcaatatcataccacctggacaatacttgcatgatttcttccagtgttgcattttcaaaaacatattttccgtctttccagccggtatataaaataacatctactttccggggttgaagacttcctccttcttcatcctttatctgaaaaccaggttccaacatgatttcccgacccggttgtctctccgatcggtacaccacctttccctgcaccaatgttgtaacggttttttgttcttcccggtaatcccgaacgttaaaccccgtacccaacacctcaatcgctcccctggaaatgtgtacgataaaaggatgttcgctatctttcgccacctcaaagtaggcctctccttctaaataaacctcccgccgttctgcggtaaaactaaccgggaaccttagttttgaatcggcattgagccaaactttagttccatccgctaaaaccaactgatattcccctcctatcggaatatcaatggtattgtataccaatgctggtgtcttttgttttcctttatattccacgacggcagaatccaaattcaggagcgttccgtcttctccgatcagttgctgttttttatctcctaaaactattttctctccgtttgccagcgtaatcatcgccttgctcctgccgggttccaccacttcattttttaccgtcagcggggggacagaccgtagctgttcccgatgactccaaaccagtccaatccccacaaacaacaaaacggctgccgctgcggtaagaccgatacgcccaaacctccaccaccttttcctgtttttgtattgcaggaatttacgatacgctattgcagaatcgaactcctctttctgacgtaaacgtgctaaccaacgtttgcgatccggaaaaggaaattcccgttcttctattaagttttgaagacggattttctcacttcccttcaattgtccggtaatttctttacaccataaatcagaaagttcttcccttatttcgtcatctttgttcatataacgattatttatataaataatccacaaaaagacaaaacgggtacctttattaactgaatttttttcgaaaatcggataaatttatttaaaaagtcaatctttggggtggaataaaagacagaataaaatgaaaatgtcgggcgacagaattttccggatatactgataagcttcttttttatgttttttgaccgtattgacactgattcccagaatttcaccgatttcttccaccgttttttcttctaaacaaagcagcatcacctcccgtcgtttctccggcatccgggcaatcacgccccgcaatttacggacgacctcttcctcgatcaccgccccgaaatctccggcgctctcctcttcctgcccacattgggtcaaacacagttcttttatattccggtcacgtaaaactttcagacaattatgatataccgcccgataaaggtatccgcggaaagaaggcatatcttcgaaataagtatccgcttcccataaccggacaatgatcccctgcaccacatccatagcatattccctgtctttcagaattttcaaagcataacaacaaagcggagaataatactccgcatataaatattgccatgccttttcctgcttggtattgataccgtataagaaattctccggttcttccgccatatcgaaaacatctatgatggacaaatatagtgaaaggcgagagcaaaaacaacaaactggttggattgattttgccgaaccgcatcttatattatacaaatatagcaattatagcccattccccgattttatcggacaaaaaatcttatacagacagatgaacgagaatggattggagcagagactgacagtaaccttttcgttcaagtacaggaaatacccgaggcatgtaaggcaacattcgccactatactactatcaacgagctcatctgcccatcaaacgcggtaaattcaggcccgccaagaaaccagccggtatacttcgaggcaaaaaagccttccgatttccccgatgacaggaaccggaaagcttttacaccaagtatcacataaaatattactctatcggccgattcttcaactcttccagaattttgtcacaagccttttgctgggctggcgcaccgtccttcctcatgttggcgaggaacatggaataataagagaaagccagatgtctgtccatcttcgggaaattctgccggcaggcttttatcaatcggttgaaatcacccgcacggcaagcctgtaccacattccagaacggatacaattccgtcatcccggctgcatccagattcttttgaatggtagcccgttccccgggtgtcaaatcctgtttttcaaaagaagaccagcgcaggtattccgtattgcaacgcaccagcaggttatacaccgtcttttcgcccatcgccttctcataacgcggacggttggccagaaaataagcgtaaatatccgaaccgacagtattcagagatagattctgaaacaggaaagcatacttttcagacactttttcatcgtcatccaaagcggcaaacaattcgcccgccacctttcccgctcttttatcggaagcccccatcagcagattcagatactgcaacaggaactctttatcccgttctcccgagtcatagcgcgtctgtatggcaccccaggccgaagaagggtcgtaatccaattcgctgagcaaatcatttgccgtccgataaccgacaaaacggtgtaccatcgtcccatccgcatcgatcacaagaaaagtcggataagcggatacttcataacgttttttcaattcgacaccttcccctttttccatatcgtatttgacgcatacaaagttctcgttcatgtatttccccaccttttcctgcgggaagatatcatttgtcatcatcttacacggaccgcaccaggaggtataacaatccataaataccgttttgttttccgccttcgccgctttcagcgccccggcaaacgaaatgtctctgaactccacaccttgtgcaaagcctgccagggcaacacactggcacacacacataaaaaataatactcttaaattcataaccaaattttataattaactgttcaaatctcaagtttaggctcccatttcaataaaatctctaaatcaagcaggccggtatttgaagaagcgagtgtctgagaccccataatttttaagaatttatccaattcctcagttaaggcaggtattcccaaatacttcttcaattgaatatattcttttgcagccggattgtcaatctcttttaaaagaagaaatgagatattgaacatttagataatattgccagtggaggaaaatataaaaagaactttatgaattttataccttaaacacattgaggattacggacttgaaaaaaagtaaccatccgaaaagaatgtaaaactcataaaacaaccccaaaggacaaggaacgacgatgaaaagaaaaatagtcgtaattttgatggcttcaagtcaaccgaaaaggaaagcataacgaactctattccaatctattcgctacgcttttcccaaatttactattccattaggtgtttattttaacaaatcatccaagtatgtatagaattccgcactctctcctgaaaatattctgacaattttcccttccggatcaatgatacacttggttggataaccatttacagcatacagagcagccacgtctatatctttaccatcattgaagagttgcacccaaggcaatgcattttcctttacagctgtacgccattttgcatcagaatcccgacaagcaatacttatgaactcgatttttaccttatgtttttcgtaacttttcttcatatcaggaaaacctttgatacaccatacgcaccagcttccccagaaatcaagcaccacatatttgccccgaaaatctgtcaagctcacgtccttaccattcaaatctttcagtttgaactccggagcaaccattcccacctgaacctttttcttcgcctctttttgatacaattctgcttcggccattttcaccaaagtttctgcataagttttcattggcccttcttttacgcaactatccaacaaatcgaaagcttctcttcttttctcgttcactacacactcaatcaaaactgctgaagcgtattgtttcggattagttttcatatactccattgctgtgtcagagattttcctttttaacacatcaatttccgcttctaccgcgttaatggcatcgataggagaatttttgcctttcaaggcatttaactccatctgtttttcgtctaccaccttttgatccgcttccaactccttcttggctttctgaaggtctgtatagaaagtgcttccggttatttcataatttctgaaatcgccagtcacaacagctttttctcccggaatgattaccagtcggataggactgaacatagcagccattaacccctgcacatctccatatttaggtttgcctatgatgcccaccgcataggttgtatttttatcaagcgcatcaaatccgaatgctccagcgttagaggggactgtatccaatttcgttcgtcctgtttgagtattaacataagcaaccaataaagtatcactgggagttttcaaattcccgctaacttgatatgaactgattggtttccaccgattaaacaattcttcaattttggtttcagaaggtcgtggagctttcgcatccagtaatcgtccttccttgtcgaaaatcataaaacgcgggatattggttatgccgtatgtatcagcataatcaatttgatttttccccggaacgatatattgttcccaagctggtttatctgatgccagcttcttttcccaggtttctacatcagtatcaatggagatgctgacaaaacgaatgtcctgatattgttcaaccaacttttcgatgaacggaatctctttgcagcatggtccacaccaagttgcccaaaagtcaatataggtatatttgccatgcccgaccagttgatcaagagtcacttccctcccttgccgatcgcgcatccttaatgaagccgccaacgttcccggggttgtattgtctataatctttaactgtttgacagccatttcccgaagctgaggatcggtggatatttttaaaaattcacgatacacgaacggaatcgtctccgagatatccgctcctaacatctgtggaaacaattgtgcagtgagcaaagtcttgcttatattgtttcgcacaccctggtcttgagtcaattcacccaatacacgtatttttacagctcctataggtagttcctcatcttttttgtacagatcagggtttgccgtgacataccaatcaatatatggcacaattgcagctacttgcaacgtgtcattgaagttgattttgttcacaaactccatgaaatctttatctttccgcatatctactcccgcttgttgtttggctatggcatagttgaaatagagcatctccaccatctttttccaaccctgtttttcttgtgctacgaacgtctgattttttacctttgtcaaggctttctctacaggagcaagttgaatgtcgacatatttcacacatgcgtcaaaatcaggaatatctctccatgtattgttactgaatttttgggaaagggtaaccgtttcgcggtgtatgttcgtataatcggtttccggaccggtatcccctgaataaacgagttttatatgatcttgcttttttacaatatcaacgtgcagcgacttgtcaggagcaagatacagcaaataagaatgggggttatcttttccatcatggaccttaaagaacgcattcttcacaccagggattacgatttcctgtgagaatgttccatccggacgaataagcagggtgtccggtttcacatgttccatggaaagatcacagataagagtgggggtatcggtaaaacctttcacccgcccgcttaatgtcattttacttgtcgtttgtccatacatggatatgctccccataagcaaaagagctaccataccatttttcttcatgctatttttcatattctctctatatatattttaatttttaacaggaaggcgtttccacaggcaactcggtatcccacgccacattatcgtaagaatggcataacgccaatcgataatgacagacctgcgttttttattcaatgcatttaccgcaattttagccaccttttccggtttcatcagtagaggataggtcttttcactgctgtccaacaaggccgtatccacaaacccgggtttaatatctgtaaaacggattttcagtttctgcatatatgccaattgctcaagcgaatcgatatagatattctggaatcgttttgttgccgagtaggccggggcaacacccaatccctttgttccggcaatagaactgattacagccaaatgtccgccaccttgttgacggaaataagtatatgcggcatttgtcatacggataaatccgccgacattagtgcgtgccgtatcgatttctatttccggttgcaagtcccggttttgtttgccgatacctgaacacaataaaaacaaatccattccacccaattgttcaatcagcccattcaatttcaatacagcatccttttgggttacgtccaacgcttgcgttgctatttgttccggattccgttcttgaaatgctgtcagaagttcttttcttctgccggctatccctattttccatccttgcgcaagcagtacctttgctatttcttgcccaatacctgaagtagctcccacaataatcgcccgtttcatactttatgcttcaaactactattttaatacctcggccaatatctgccgtacctgactcacactatgcggagcacacaataccgttccgtcgggtgccactaacatatagtaaggcactccgtttcttacttggtatttattataatagaaatcattgaatcctttttcagtcatcacataatgtgggaacgggaacttgatacgttccatggccttacgccaagcctcctgctttttatcacacgaaacagctatcacctctaattgaccagagtactcttccgccaattttttcacttccggcatactgtgaatacacatcccgcaccaacttgcccaaaaatctatcagcacatacttaccctttggaaccacatccaccaactgaacctgtctgttgtctatatctgtcaaatccaagtcgaggagcgccgcacccactgtagtttgcttagctaatgccacacgttttttgaattcgttgtagcgtgccgtgtcacaaggacatccgatgatgttgttttccaaagtttccacttgttctttggtcaaattatatccgcgttccaataaaccattggctaacatcacagacactactgatcgagggtgggaatggataaaatcccattcccgattactccccttcatattcataaattcttcatagtcttgatgcgcttgtcccccttttacctggagtttggatttggaatccaattccgagtatgccccagacgtgatacttatttccgtgttttccacaaataaatccgtgtaggtccacttgattttcatccccggatttttagtttgtatctccatgttattggtaattaacatgaacgcttgtgggctttccactctccccttcaactcaaaacgctcatcttttacgatagtttccgcttttgtagagcgtttcccttctttctccatcaaagtaactttcacgccatccggcatgcccggaatgtaaccccggatgacaaatccctccttctgcgcccaaagattaaggcttataaacaacgctaaaataaaaatttttattctcatggcattcaaattttaatctcactctatgtcattgggcattacgtaccaaacgcaaactcaaatattgcgggttgttttctatactctgccgatacacctgatcggattcgtaataaagcttacgatagaaataatattctccgttttttgattcatctttggtgctcgtccaatagaatccatacgctcccataaaacggtatcccggtgtctgcataatcatatatggagtataataaccggccaattgaaaattcaatcgggtcccttcttccgcttgccgcatcaatgtacctgtcccgccgcctcgccaatccaattcatctgcgtttgccgcagacatacccaatgctcgctccaactgcttgaaatcttcatcggtaggaatgcgccaaccttcaggtacagcgtttggggcatcgagaagggtataaaggaaaccatacctatcggaatagacatccgagggattagtttgtcccgtgttcccgtaatccacataatacttgcaatcggacgtacgataacggcagttttccgtcatccattccaaattgcctatacgcacataattataggtgttgtcatctcttgtgtccgtgaatgtcccggtcgatactgggctaataaccggcagttcgtgtgaatcgtcatcgctacaggaggcaaccaatcctacccatacgatacttaacaataatttatttatccatttcattttttcctccttcattaataaatgtaacctaattctattaccagatcgctcaataattgcgcgcgctcaataattttcggatattccgcatagtccacctttatctgttccatcgtagaactgaaaatcagttcgacataggcgttgatgtcatccgtcttatcaggatactttcctaacagttgaatcacataactaccaattttaagcactccggcaacaaggaagcccgcttctttgcaatgatgtagattaagagtcatatctttttgagggttatcggcgatactaaactttccttcatgcagattgccgcatgcagtatagaactcttccaaagccgcttcattatccataaaggagccccctaaataagagataaagaacgactcggccaacgcattttttccctcctcggataaggtcaggatgtccccgacggccaacgcgacggcacgttcaccggaaaccgtgagagtagaggtcatcgatcctcccatcatagcgtccggatattggatatccgttgacaaaaaccaggagaatggtcttatggacgcggacaagtgaggcaatacatactcttgcaaaaaggaggtcgcctgcttcttctcttccatgctctgcaacagtttgtaagaataggtaagggacgagttcgtactagcgcccacggaatagttgacatccaacagttcaataaaatattgcatatcaccattggaatcctttcccaactcttctcttcgaagcgtatcactaaagagcaaataacagttttcctgttcgaaaaaagtgcgccgtagcacagattcctcatccatcgcatccgcggcaggggcaaagcaatctatattggtatccacctcgggtgtcaaagtgtcttccttggcgcaagccgtcattcctgttagaaacaacacacttatatagaggatgttgtatcgtgtcttcataatcaattgtcatttggggttattactgaaaattctcttacagggcgttcgttgttcggcatacccgtgttaaaatccaatacctcttgtgggatcggcagagtgtaggccggatcgtttgctttcaacacaaataaatgggcttcttccatagtcgttttgtctgcataataagtgtatttatgagtcaattctttcgattccggataaaactcacataccccatagcgacggaggtcaaaccaacgaaatccttccaatgcgaactctttacggcgctcttcgcggatgtcctttactaattcttcgccagaaccgattacttcatagctactccccgaaacataccttttggcacgtaaagcattcagccatttgcgagcttcatcctcctgtcctaagtatgcggaagcttcggctttgttcaaataagcctcggccgtacggaaacagaacttgtcagaaacaggcgctttttttcctccccaagccacattgtaatatctattgtaatagtcactttcttccggatctccgtcatccgtcataccgggaccccgtactaattttgtgctaccgatgaacgtgtttcttttccaccaccattgcgtcttccgtaaatcatcctcctcgtaagcgtcgtataattcgtgagaaaccctgtaagacttatattcataatagaaaaagttgggaatatcattatctcccatggagaaaatcatctcttcggaatcttctgaaagaaatccgtcgtacggttggcggctgttcaaatcaaccaatgtgttttgtcttaccaatacggaatccgcatagtctgcggccaattgccaattctgcatatacagatgaacacgactctgcaataaattcacggctgtcaagtccgcccgataaatattgcgggcctctcctgtttccgccaaacaggcttcagcggttttcagatcggacaaaatcaggccataggtttcctgtaccgtattacgactgaatttgatgtcgagcacactctctgtcgttttgaggggtacggcaagatcttctttcgcggtagcaacgtcatacggtttaccatagagattcaccaaccaaaaataataggcggcacgcagaaaatgagcttcgccctttacacgttttgctcccaatcgttcatcggcagatacttgaggaacatcctcaatactggaaatgacgttattcatgacattaatcaaacggtagagttccgtccaggtcccgttttcagtgataaaaccggtataggaatcgttttgtcccacacgttgttgccaggtgtagtatccaaacagattacgtctgaaattgtccgcaccagaagcaaaaccaccgccccaggcactgtaataactattttgttcctcgatttcatcggctaaaaaatggataaaataccccatattactaccgcaaccattcacgggcagataaccatcccctgccaataattcatccaaatcctcataggaagaaacgtagtacgtgtcttgcgaatattctttcaggaagtcggagcagcctattgtcaaaaggacgagcagaccgcctaatcctatatatttcaaagctttcataatctaattattttagtaagatttagcgtatcgctgttagaaattcagattcagaccaatggtataagtcggtgtatccgaaagttgtatatccgagaatcctccttgagtcggagtctgtccgcgtaacttactgttacaaaacgtgtacaaattagtagctcccaaagttaacgccaatctttccaacttccaacgactcaatattcgccgaggaaattcataggtcagcgaaatactggaaatcttcaaatagtcagcactcacaactcgtaaatccgagtaatcatacatcgtccaggcgttatccgcaattttcaccacatccgaggtggaagcggaactccaatgataactgtaatagttgtaaccatttgaagcggaacccatgatggcaggaatatccgtagtcagttcatctccaggctttttccatgctttcaacatatcccgattgatattggcttcagcggaataaccgtttacaaagtcttccatcatacggaacaggcgagtactaccaccgatactgtaattcaatgaaattcccaaacgccattgtttgtagttaaaggtgttattgatgctacccgtcatatccggatcacgttgtccagaaggtaccaatacttttgtatatacactatatttgtccaaatctaccaactcagatttgcggtcttcccaatcatcaaacatcggacctccgtccacagggcttaaccccatatatttgtaagaatagaaagttcctatcggcataccttctaccacagcagtaccgttcagaaaatcactcaattcatacgtttcctgtcctggcaaagtactcatggtatttgtcaccttggagagagaaccggaaagaatccagttgaaatctttcgtttttaccggagtcgcggttataccgacattccaacctctgttacgaagcgtcccggaatttacgacataggtattgaaaccgttaacatccgagatagttttactcataaacgcatcagaagtctttttgtaatagtattcaaaatttatcatcaagctgtttttgaatactgaagccatcgctcctaagttgtaagatcgtgtcttttcccattttaaattcggattagcgaagccaccggaagccacagtggaaatcatctcatcgcgatagtcgctgtaactacctttcttcaacaccagcacaggcgtttgtccgtcaagcatgttaccctgctctccgtatgaacctttcacggaaaatgactccaaccacgaaagttgtaaaccggaaacagtcttcaagtccaccaaaccggaaaccgaccacacaggtaacaatttttcgttactgcgtgaaccgaatttgttagaaccgtcgtaacgggtattagcgtttaaggtaaagtagtccttataaccataagtagctgtcgcataagctgataataggtttgtaagattatccgtgatggtcggaacattgctttgcacccaactggaataatacgtaggaaaagaagacggagagagatccgtgacaaaactctttcctcgatcatcgtagtaaccgcgctgtgtatgggagtaagcattgtagcgggaggaatttgcctctgctccgatagaaacgttcaaaaaatgattctcgttttcgtccaaatacttgtgaaaatccgcctgtagacgggcggtatagctcttcgtattataattattggtcgccaactcgccaccataggggcacaagctactttcaggtgctttttctccgtaatccgaaccacgtaaatcggcaatataatgggtcttttcgccccaatgaccgttcaaattggcagaattgacagaacctgatacagtggcgctcaactttaaccattctgtcacctcgtaattcaaattcacagtagccgtaaagttactggtactctgttttttataactattgaccaattcattcaatatattgaaatttaaataactaccgtacctattatagacaccataaaaatggtaagaaccatcttcgctaaaagcgggaatagccctactggtattataagcataatctataggattcacttcatcctgagtgtatttacgctcgttcaaataaccgtttaaattgaatgaaagcctccatcgggaagagagagtcatatccaatttagccgcagctgtatagcgtcgattagttgtacgtctgataacatcgtcctcgcttgtataacccaacgaagcgtagtaacggatattatccgaacctccagaaacattaatggcataatctttggaaaacgagtcttttgtcagcaagtcaaaccaatcggtattcatggtctgcaggcgatctacttctgtctgaaactgttccttggtcaaagctccgctgtaataccggctcaacacatattcatagccggtcaagggcatattgttggggtaaatgtagtgattggctaccaattgttgtgaaaactgtatacgttctttggagttcatcaagttgattttatcgtctgtatagcgaggatgacgacgaaaagtgcccgtaacggagcaagaaatcaccggcttacccacatgccctcttttagtcgtcaccacgataaccccattggcagcacgtatgccataaagagcggtcgctgcagcgtcctttaacacatccaaacgttcaatatcctgcgggttcaaaccggaaatggcattaccgatacggttcacataatcagggtcatttaatacgtcaggagacaagtttacgggatcattcacgatgataccgtccaccacccataacggctcacgatttccgataatagtagaagtaccgcgtatacgcaaacggggagtggcattgatttccccactgttagaggtgacaaccatatcaggaattttaccttccaacatctgatttaggttagtaataccaggtttttgtatgtcatccattctgacagaggtaaccgaactcgtcaaatggcgtcggtcgatattcagataaccggtaacaacaacctcgtcaatctcgcttacctcagcctgcatgacaatattcagttccttttgaccggtgtaggccacttcttgcgattgcataccgacaaaggaaaagacaaatgccatctctttttcatctatgagcaacaaggaaaatctaccgtcggcatccgtcgaagttcctaatatggtacctttcaccctaactgtgactcccggcagaggattgcctttttcatccttcacaacacctttgacacagtccggggccggactcagtaccgacgattgcgggcgttctttcaccacaatgatgtcttcattaataacccacgtcagaccggtggaagcgaatactttatccaacacttccgccacggtcgcgttctcggcgttcacggacacccgtcccacacgttccccttgttccttgctcatcataaactgcaagttggtctgctcgcggatttgctccagcacctgccgcagcgacacttcctgcaatttcatgctcacccgttcccgttgcgccaacgtggtagcggacaaactgaaagagaacaggcaaaccagaataatacacaatttcatcatttttccgattttttgccagcggtaatgataaataccgaggcattctgatttctttttcataaatttgtaactgagattaaacatggctaccgaacggatgacagccgtcccgtagcaaacctatcttgataagggaagtgtggggacacttctcttattttattccaccacaatcatacggtcgccgacctggaaaacaatccctgtggattccgaaatggctccgagaattttccggatattttcataccgtttcagatggcccgaaaactggatgtgctttttcccggccgaccggtagactatccttacatcataccagcgtcccaactcttcgagaatctcctccaaggtgtcgtcgttaaagcagaattccccgtttttccaggcggtgtacttccggacatccacctcacggaaagtgatttccccgctatgatggtcgcaagcggccaactgtcccggacgcatccgccgctctccggtacccccctttccggaaataccgatttctccctccaccaataccgtttccgttgcccggaggccatgggtattcacattaaaagcagtgccatacacccggatgctcacctcgtccgtttccacataaaacggacgctccgcatcttttgccacttcaaaccaggcctcgcctttcagatatacttttctttccgccgccgcaaaagccaccgggtagcaaagttccgacccggcattcagatgcacggcgctaccgtcggcaagcagcaaacggtattccccgccattgggtatggataaggtattgtaaaccacgttttccggctgcgacgccaccggggcggaatagactacttttcccgaatctatccggatgttcccggctgtttcatgcaagtcccgttgtcccgatttttccaaaacaatccgctcgccgctgcttaattgcaaaaaggcccggcaggtacccggctccaccacggtttccgccattttcacgctgacttccggtctgtcctgtttcactaacaaccatactacacctaaggccatgagcagactggccgccactgacaaacgaatgaggtttcttcggatgctctgccgccgcatattcttccggaacttccggtagccccgtacaggttcccaaccgacatactgccggaattctcctatcaggtactcatcatcccccacctcctcatacaaccgccgcatactctcgtcctctaacaaacacgccatctccgcccgctcatctgccgtgagtcttcccgcataggatttccgaaataaagtcaccgttttttcaacacttttatccattattttttcatttttatacctattgtgcataacaaatgaaaaagggtgacaagaaaactgattttttttgaaaaagaaggtattttataaggagggatattatttaagttttcaagacaagaaaaacgccaaccagaacacgctggcgtcccctctcattttcccgcgcaattgtttaaagctacgctttttatgggtttttaccgtgttgacggatatgcccaacttttcggcaatttcattgacggacaatccatctatgctcagccggatgaccttacgctgttcggacggcaattcatcaatataaagatacaattgccggagcaactcttcacggacagtcgccataaacatttcatcggattccggatcgttttccagcatcaaccggttcagatgcctggatttacacttttcgcggcgtaaccacatcatcgaccgattataaacagcccggtaaaggtaattggtcagctcgtctatctgaagaaattttcgttctccgttccaaacatacaacaaaatgtcctgcaccaaatcttcggcaatgaccgggtcctgcaccaaacgcccggcataagagcataaagccgcgtaatagcagccgaaaacttcctgccaaagttcctccttcttctcgtttaccgcttccaatatccgacttgcatccatatttccggcactatcgttcgctttaccacactaaccgatagtcttccaaccggaatcccctcagaaagtcctccgtccgcattcttttttttcctgacaactgcaactccagcacacgaacgatacctccctccacatatacatcaaaaaaggtttttccatcggtacggacttcccccgcgggcagattatggctctgccgtatcctggcggctttaaatattttaagtgtcaacactccgccatccttcccgacagcctgtaattccgtccatgccccgggaaaaggcgacaagccccggatatggttacagatggtttccagtttcccgttccaacggattttcatgtcttctttgaatatcttcggagcgagtaccgcttcgcgcccccgcagcaatccacactggtcggtcaacggatagtcccctgcctccatcgcctgcacggttttcagcaacaagtccgcccctttctccatcagttcgtcatgcaattctccggcggtcatctcctcgccgatttccaccttttcctgaaaaataatattgccggtatctatctcctgctttaaaaggaaagtcgtcaccccggagcaggtttccccattcattacggcccggtttatcggtgccgctccccggtaatccggcagcagagaagcatgcagattcaccgtccctaagggaggcatattccaaaccacttcgggcaacatcttaaatgccacaactaattgcaaatcggcttttagctctgccagcgcctgtaaaaaatcgggatccctgaatttctcgggttgcagaatcttcaggccgatttcccgggcgtattttttaactgcggattcctgaagctgttgtcctctaccggccggtttatcaggattagtaacgactcctacaacctgaaatccagcctctataattcttttcaagggcaggacagcaaaatcgggagtacccatatagacgatacgcaacttatgacttggcatttttcttcttttttataaaggcaatcaatttcttaaagactcttgtgtaagcttctgtattcatcatctcggaatcggtcacggatttataagtcagtataattcccaaaggcaacagaataaaggcagaaatccacatcccggcagccggagagataacagcctccctggccgacctttctcccatcatcgaaataatataatagatgataaacaaaagcacggaaaccaccaccggcattcctaatccccctttccggataatagcccccaggggagcaccgataaagaaaaaaataaagcaggcaaaagataaggtgaatttacgatgccattccaattgactctttattacattctcttgctgagccacataataatgaagatcgtcctggttccgttgttttacctctctggcatattgcagggcattatcgaccgcccgacgttgttcttcaatatcaaaagcagtaaaaaggctgtcgggatcactgaactttccccggctttgatcggccagtatactatcccgttgcggactgggacttttgcttctttgataattattcgccaataatttcttcgtatctcctgcttttctcactttcaatgcagctcgtgccgaatcgatcgaatgactcaattgtttgagattcagcatcatcgaataagaacgaaatccgtcttcgtcgcttcgtttcaggtcagttcccggcaattcgatcaatacggtttccttatcgaactttaatcttctgaaaggaaatgttttacgggaaccgggattcttcattccctcatctgtataagaatggccattatacaagaccagttccatcagattactttttgcatcactgatcatcatcccggaatcggctttggtaacatcataattcccggaaccgtccttatgttcgtatatcagcatgttatacatcatgccggtttctttattgatcttatcgattttaatactatatccttccaaatcgttcgtaaagatcccttctttaaacgacatctccggtttttgtttccggatatcgtaaagcaggctataaaatttaaggttcgccaccggaaggatattgttcgaaaagacaaaagcgaatactgtgaggcatataatcaggataatcaaaggtttcataatccggtagagagaaatacctgctgattttaaggcgatcaactcataattttctcccaaacttccgaaggtcatgatcgatgaaagcaatactgccaacggcaatgccatgggtaccaaagtggtcgccacataaatcaataactcggcaattaccgtaaactctaatccttttcctacgatttcgtctatcatacgccaaagaaactgcataatcaagacgaacatactgatgaaaaaagtagctacaaaaggcccgataaagcttttgagcataaatatatgtagtttcttcatttgccaataagtaacctgtacattatcaaaatcttcaaaacaggtacaaaggtacgtttttttgtttacaatactctctctccggtcatcaaaaaccgtatagatcaggcccccaggttccggtgcaggatatccatttgtttattccataactctatcgtatcgttgacttcgtcttcatcggcaaaatcggtaataatcagcgctacatctccggtcaagggctccacatgtatattaaattcaaaatattcatcttcctcttctgcatcatcccaccgaaacctcaccacggcattacttttcaattctacgagcgtagccggctgctcactaccattccatataaaaataaactgattacctttttggaatacgtcatctgcaaaccattccgataaaccggcaggggtacttaaacgagaaaacaagacttttacagaagacgaaaaaatgtactctaactctatctttcttctcatatttctaaattttgagccaaattactcaaaaaaaatataagtaccaaacagaccgaaaaaaatagcattcgctcaggagagcaaatcaggctcaagcaaaggtatcctgaccgaattcctgtctgactgccccaaccaatctgactttccattcttcacctttattctgatccaaatgagataagcgattaataatatccgccacagaaagacgatgaaaatccactgccgggaaataagaaacatcatcgtcttcttttacttcgaccaggattttatgatctaccaattcctgtaggattactctgactttactggaactcattcggagtcttttacaaaccatagccagcgtaggacttccttgtccatgaatatacaaatcggaaatatatcgcaacatccgcaacgtcacttcaacgttatccacccatttattatccgcattcattgcattccggtacaagaaatggcggttgcgcataatataacacagctccgttccccacaaaacgatactccaactcaactgtaaccacaccaataaaagaggcaaagcggccaatccaccataaatcgcattatacgagctcacaccgatctggaaacgcaaatagaaccattgtacaatttgaaaaacagtaccggcaacaataccggccaccaaagcatatttgaatttcacaggtgtagtgggcatgaacatataaagaaatacgaaaagaaaccataccaagatatagggtatcaaagtcagaatagctttcaaagcagcactggcataactcaataatccttcgtccatggcatattcctgcaaattagccatcataaaaacattcatactactgatcaatacgaccaggatcggagcgataaacagaatcgacatgtaatcggtaaatttttttaccagactccgtcccttcttcaccccccaaatccggttcatagccagttcggtactggaaagcatccggataaccgaccagaggagtaaaacaataccaaaacctgcaatcacacctccctgcgtattatccaaggctttattcgcaatattcatcacccattgcatcacatcgggattggtataagattgctctttgagccaatcttcgaatgcctttgcagcaccgaatccacgggcgatagctaaaatcagggcaacgacaggaataaaagaaagcgtagaataaaatgttaaagcagaagctgagatcatcgaagcatctttaataaaacgatcgatcgagacaatgacaacagccactgttttcaaaacaagatcggaaagaaaagtggaaatccgccaatcccggcgcaaaaccgagtaataaaaatccaaatacaaaaatcgtttcagattattcctgtgtttcatgacctatgtatgatttatgcagcaaagataaaacaaaattcaatacctgtagtgtacaataacgaggttacaaagttggccagaaaaaagatcgacatttaaatcattacagaggttcgaaaagttacagcagttagacttaacctctaaaaccacagtaactctccgaacctctgcaactaaaaagaagccccacaggtgccagggcactttacggactttataaacctattccattctaccacgatcctgtttaagggaaaaaactttaatcggttttctcctccggcaggatcaaataaacaattccatcacagtttctttaattgtatcgggatctgtatcgagtgcaaagacacaatcgggctgtttataaaccactttattttcttttttaaattttgcgatacctccgcctgtaatattcagcataatcacagcatcggtttcgacagctccggtacgaatggcttgcttcagggaagccactgcaactcctgcggccggttcgatatcgatcccttcagtgcgttcgaacaagaccataccttccatcgcctcttcattcgatatggcaaacatatctccgccggtttcggtaagcgcgtcgaacaatcctcctttcaacgaataaggaggtttacggttagaaagtactttagcacatatttcttctgcctgcttacgggcaatcgtatcgtcaaccggcaaaagagcccgcgatccggccttccaggcatcatacatcggagtaaacggaatattttgtgacaccatcaatttcatcaggttatttccgtaacgaccatctacgataaaccgtttgtttgcctcccaggcagcgatcgcccctgttccgcttccgacagcctgaaaataataatccggaatccgtccgatcgtggtaacggcagaaagtactgtcgtccccattccatcgcgccgggcaacgtttttcgctcctccttccggataaaacttatctaattcacaaataatattcgacaggtaaatagcatcgaaataatcgcttcctctttcggtagcgaccaatttcacacaaggattcaacggtttagccgaccacatggcatcgatacaatcctgcggaatacatagtaacaaaggaatattattttcggaacaaacccgtgcaaaagcccgagcggtattaccggccgaagccaccaccatcactttatcgttcaagtcattgatccgggcacaaaccgcataagcctcacattccttgaaagcccctgtcttcatcagagcccccttttcaggccaatacccgttaaaagtgatatacaaatccgacaatcccaattcgccggccagcccttcacttttgtatgtgacaggcgctccggaaccgtccagtgtccgacaaacaggtaaccaatcggaatatttatacaatcccggaagattttctttcacctccagttgtttctttgcatagttggcaaaaatcaaagctgcgccatcccgattcgggcaatccaactcccatttttcatctgcgaactttgtcccacaacatcgggattcaagtacataatcagtcatttctagtgtcttcactttattactatttacaacttacaaaaataagttatttctaatagccgaagttgggtataaatactacttttttgtttatgtaacagatttaccggaccggcaactgccgttctgacagtttttcctgccataccccttcaccatttttataaaaaaaccgccatttttacaaaaataatccggagaaaagcactggcatgccatttgataaaaaataaatgtgtttgaatcaaaacctcagacacaccgaaaacgaataataggtaaaaacgaatagtaagtaagtaaataaaatacattaacattatgggaaagattataggaattgacttaggaactaccaactcatgcgttgctgtaatggaaggtaacgaaccggtagtaataccaaacagtgaaggtcggcgtactaccccttcaattgtagcttttgtagacaacggcgaacggaaagtaggtgatccggccaaacgtcaggctatcaccaatccgaaaaaaacgatatactcgatcaaacgtttcatgggtgaaagtttcgatcaggtacagaacgaaatcaaacgagtagcttatgaagtggtgagaggtgacaacaatactccccgggtagtgatcgacaatcgtcagtattccccacaggaaatttctgccatgattttgcagaaaatgaagaaaacggcagaagattatctgggtcaggaagtatctgaagcagtcatcaccgttccggcttatttcaacgatgcacagcgccaggcaacgaaagaagcaggagaaattgcaggtttgactgtaaaacgtatcatcaatgaaccgacagctgccgctttggcatatggtttggataaaaagtcccaggatcagaaaatcgcagtattcgacctcgggggtggaacattcgatatctccattctggaattgggtgacggggtattcgaagtaaaatcgactaatggagatacccatttaggtggggatgatttcgacgataagatcatcaactggctggctgacgaattccagaaagacgaaggggtagacatccgtaaagacccgatggctcaccaacggttgaaagaagctgctgaaaaggcaaaaatcgaattgtccagttcaacttctacagaaatcaatctgccgtacatattcccggtcaacggaattccaaagcatctggtacgtacgctgacccgtgctcagttcgaacaattatgcgacagtctgatccaggcaacgatcgaaccctgtcggaaagccctgcaagatgccaacatgaaagcttccgatatcgacgaagtgattctggttggtggttcaacccgtatccctgccgttcagcagaaagtacaggaattcttcggaaaagctccttcgaaaggtgttaacccggacgaagtagtagcggtaggggcagctatccagggaggtgtactgaccggagaagtaaaagacgtcttgttgctggacgttactccgctgtcattgggaatcgaaacactgggcggtgtaatgaccaaactgatcgaagccaacacgaccatcccgactaaaaaatcggaagtattctctacggcagctgacaaccagccttctgtagaaatccatatcttacagggtgaacgtccgatggcccgcgacaataaaacgatcggccgcttccatttggacagcattccgccagcaccgcgtggagtacctcagatcgaagtcactttcgatatcgacgccaacggtatcctgaatgtttcagccaaagataaagccaccggtaaagagcaatctatccggatcgaagcttcttccggtctgtccgatgccgaaatcaaacggatgaaagacgaagcagctgctaatgcagcctccgaccagcaagaaaaagaaaaggtcgatacgatcaataaagcagactctatgatcttccagaccgaaaaacaactgaaagagttcggagacaaattgccggccgacaagaaggcgccgatcgaatctgctctgcaagaactgaaagaagctcataaagctcaggatgtcgcccgcatcaacagcgccatcgacaaactgaacagtgtctttcaggctgcttcacaggaaatgtacaacgctcaggctcaacaacagcagggcggtgcacagcaaggtcctcagggtaacccgaatgccggtcagccgaacaatggcggaaaagaccaggaagtcaccgacgtagactttgaagaagtgaagtaagatagcaactatctgaaacgataaataagaaaaggagtgtaaaataattgcactcctttttattttactaatattgctcaatctttcgttatttactgatttttaacgtataccatggggaacgtctactaatttgagatatgaaattcagacaatcatgttccaggaaccagcggagttgcaaggcgcacttaaattttatcttgagcaagattacatgtgtaaactgtatttaacttttccaaaaagtgagacgctatctcactagttgacgtgagccattactttgaattactcaagtgtaatgatcctatggagttgcagttctatataaaggaggatatcaaagaatgttggaaggtcaaagcactgaaacgccagatcaactcgtcactattccagagacttgcgctcagcacagacaaagaaggtgtacttgctcctgccaatgaggggtatgaggtactaactccagccaacattattcatgccccgtacgttcttgaatttgtagaaatacctcaacagaagcgttacaaagagacggaactagaaaaagctttgaagatcaacatggagcaattcctattggaattaggcagatgcctttattggcgtaccaattggtgccagacatttcaaagttaatttagtgttctatcacgcaattctaaagtgctatgtcttgattgatttgaaacgtgcaaaaattaaacatggtgatataggtcagatgaatctctacctaaattactctaagaacgaaatctgtcaaccagacgataattcaccggttggtattgttttggggacgaagaaagatgagccattgatggaatatgcccttcaaggtatagacaaccaactttttgcggcacgctatcagtaacgtcttcctaatcgagaggaacttcaagctcaattaaatttacttgataatacaaaagaaataaatatattatccagaaataaaattagagagttgagggacgaacaagggttgttgcaacgtcaacaatctgtagttttagagataaataccccaatgttcagtaaaatagaggcatggtaataggcttgccaaacgtgaacaagtaataaaacttgcagaattattaggatataatagtattcagtaataaatcaggcaacagaacagcagtttccggttcgtctttcggtgcatccttaggcttccatgccacgatgaaccgaacggatgcagattttacttcatagcctctttctttccattccgacaaggttttctgcatgttttgtgacaacttcgccaccggtttatgggtcaaagtgtcgtacaaaatggaatctttatacttcaaaacatctcctccccttaaggtcagtacctcctgcttaagttccttaaagaatctcagattaacatctttatgagaaagttgcagcactacttcttcaggcataatatactcttccgggtcaataagatactcatctgcacttacctgattaaagttgtccccattcgtatgtacaaacagccgattttttgcacgagtcatccccacatagtaccgacgcatcaactgatcatctttcacataatggtcagcaatgagcatatatacgtcatcaaactctctccccttggctttatgaatggtcgataccacaacgtctgctcccgaagtatcgcagaaatcttccaccgacgactcaaatacaaattctttgaagtcgctaacgtattttgttttattggtttgttcaaacagctctacacaacgcttcacatacgccagactctggcttctatcgtaagcggaaaaggtagcatgttttgcattttcccataattcttcagggatcagaggtgttttcacccgtttgtctatatacctcagaaaatacctcatttcgaccatgttccaaaagaggaaaccgtccatcgattgtatcagcttgctgtcaatcccccatttccgcaaaagagccatcaaaattacagcctcttcatttgtctgggtgagtacacacatagttccattcccgcgatagcgaaccaattcctttacaagcggctgatacatatattttgattcatgacgtgtcaccctcacccaaccgtcctcttttctcatcgagataatcggcgtgcttttcattcttttacccaagactttcacaaatttgttggcgaaatctaccggatggcgcgcactgcgataattctcggtcatctcgataaacttactgccgggctcttgtgctaaccgatacatgtagccggaatccgatccacgaaactcataaatattctggtcatcatcccccaccgctatcacacgcatttcctcattattagccataagagccttcaccagtgtatattctgcaacacccatatcctgagcctcatctatgaccaacactgttttaccgattttgttgggttccacctccccctgatttatcatcccggcagctttggcaacaacgtccctaactgcttcaaggttacctatccgccccatgagatcaaagcaataagaatgaaatgtctttatctcgacaaagtgggcagcgttacctatcaattccatgagtctctgtttgaactccgtagcagctgctcttgaaaatgtcaacatcaaaagttgctcgtgctttacatcttcgagtaataaaagggatgcgagtttgtgaaccaacacacgtgtttttccactgccgggacctgctgcgacaacaatacaacgagaatccttgtcggaaataatctccatctggcatttagacaactgaccgaacaattgtcgatatttcttcggcgtcagattacgctgtatttcatttaccctgtcccctttgaaatatttcgtgataaatttcttatagtccatctgaaaatagtcccgcacatattgcaaagctgcattataatccttcaccattaaattggcatactcacctacgatatgaacttgctgaatcttctgcttgtagaattcattcagcattcggtagtcatccaacttatatctcgatttattgtcctttattctttggatatccatggcgttataaagaaccaaaaaaccgccttcaagtttgagcgcaccgatttttgagagatacaaaagcgcctcctccacctcttccaactgtacattgtcgagtttagtgaacaaggagtgaggacctgatattatctgattaagaagttctaccacagagaattgaactatctgtttttccgaatttccttttctcgtagcagcaactaattgatataaccactccagagttaaacgactaatttccaatcgtttttcaaaacgattaagggttgtttccccatctgtctgacggctgatttccatattgcggagggcatcttcttttttacggatatatcccttgatggcaaggaagtagagcagtgtccggatatccttttccctggaggtatcgattccgtcgttcatcgcatcctcattcagctgcttgcaggatatccgtaaagcttcgtcaggaatacggttaaggatgtatttttcaagttttgcaaaacgttcgaggaggatcgttgattttcgtttcgagtcaccggcatccagcaaataggcagatatatccttactatctgccaatataccttcctggcgcattcgctccacaatcgatacgacttccttcttacttagccccaaaatatctgccagataatccacccgcgattctgcctctgcatcctgagccttggcaatatacttctgtgaaatcagtgacctaataattcggacagtcttttctatttcatccctgccaaataactgtgactttgatatacgcaccctcgcttcatccatgtttctcaccatgatgcctgtagcatatacccgaggcacattgtttcctcttatcaggtatccactttgttccaaagctgctaaagctgtccgtacacgggtttcgatgtcggataccgaatcgtcccatcctgcctgccgggctatttccaatgcagaacaactcactctcatacgtcgccgggtaaggtcttttacagctttccacacctgctgtatttcgctgatacttagctttgtctgattcaataatataaaatgcttatccaaatcattgtcaccataaagcacatagcaacgggcactgaggttagggtcgcgaccggctctccctgcctcctgcacataattctccagagaatccgaaatatcgtagtgcaccaccaaaccgacatctttcttatcgactcccatgccaaaagctgatgtggccacaatgatgcgaacctggtcattcataaatgcatcctggttgtcaatcttttcgtcagtttccatcttgccattgaaaggcaatgccttataaccgtcacgagttaatttgttagccagttctttcgtacgtctggtacgggatacataaacgatggtcgaacaatcagattctgccaccagtccccttagttttaaatatttatcatcatccgtttcagcatggatgacagagtaatgcagattgatccttgaggccgtcgatgcaaacaaccgcaaatccaaattcaacgtttgcttgaaatagtcacaaatgtcctgcactactttctgtttagccgtagcagtgaaacaggataccggtatcggatttctacttcctttcttttgctggtattcctggataaattttcctatatagagataatccacccggaaatcctgtccccatgaagaaaaacaatgtgcttcgtctatcacaaatctcacaatatgacgtgccaacaatattctctcgatagttttagagcgaagcatttccggagatatatacagaagtgaggcttccccatcctgtactctttgtatgaccagtgctctggtaatggggtccaacaaaccgttaatggttaccgcatcggtaatacctctatcggcaaggttatctacttggtccttcatcagcgactgcaaaggggagatcacaaccgtaagcccatgcacagcactgccggccatgagtgcgggcagttggaaagtaagcgattttcctccaccagtaggaaatatcgctaataacgacatgcctttcactgctgcctgagcggcttgttcctggagtggttctccttcgtatgtccggaattgttcatacccaaagaatgcttttaaattataaagcacgttcagttgggtattacagtaatcacaaccttccttacaactggtatgacgcaggagttttagcacaaattccactttaggataatggtgaagtacccatccgggaataacggaacgttggtcggtcgtgtcgatcagagccaatgcgtatgccaattcgcaaggatattctttgaccagcataacaaggtctgcatgcccacaaattttccccttgtaaaggtcccttattacttcggtcaatccctcattgagatactctgcccctaccatactgagaaatccttcaaattctttcttgtcctttagcagcgaggcaaatagtctgcatttttcctccggaaacgacttccagcgtgctatttcgtccaacagtaaatctttggctttttcgcaatcattcaccggattatttatctgttcgctcatgagtttgtcgtctttcaacagcctatggaatgggcgttccgggaataatagcggtgagatgtaaagtgtatcgactaaaagccaacaacatgttttatccgtgaacaaatatttagcatcgtgatgaataatattgtgaccacaaatataatctacgtcactaaaaaattcaaaaagttcctctttcgaaactttatgatatactgcaccatcatagcgaagtgccccaatatcatgaattttgtaatcctccaaaccaatttcaacatctactatggcataacgtagggcattatattgtacagatattttcttattactgatggaatcctcagcatttctgagtcctataaacctgttccatattgacatgtattctatataataagttgttttatgatatggatttattataaaaccaacatgtttttctattgttgtccggatacaataatccagtttcacttacaaagttaagtgataaaacaaagaaaattgttaaagttgccaatttctttttagttcatcattaactatcgagaaaaaatctaatctataatcaggagcaatttttacgatagttttcagttatgcgataacaatggtcccgggtaaaaatttaaaatgcggcatatttactgttgaaacggaaaccgattcccaacatcaggaaattggggtcgtgaaatttctggaggttataacccacatgtaaaaaagtatcccgtgacatggctattttcaaagtcaacatttgataaaaagccctcagatcgccttttccgataaaattagtacccataccgatccctacggtaaaaaaaggcatgacatactctacccgccccgacatacccagggcaaattgattataaagagcaggccgcctgatttgtgacttatcgatgtctccatatacctcatcggaaagatacaaatttgcacttccatcatatactccatccaaagaaacacctagccgaagtttatagtcgacgttatacataggggcaaaattaaatccaaaaaccggataagactcgggtaacggatattgcccctcctgcatccagattcctttccgccgccatgaaccgaaaaatacaaaatcataactgacatgccgctgaaaaggaggaatatgataagaagcggctgcatgtaaagaggtcagatcttctttccggtaaaaattatattctacaccgagttttcccccaagggtattcacccctgcattggggaaatttgtatttccatttgaaaaatgggtcaaagtgactcccgaagtcagacttaaacggggagaaagtgcccaacgcagataaaaattaacattgagataagcattgatcttcgatcccaccatcttattgtaagaattatactgttcatcatagggtttccagccgccagacaatccgaaattccattcgtagttaaacgacaaccacggacaaatccgggcgatacgtgctccctgaaacagataaaaggcaacaggattaccgatttgccgggattctccaaacgaataacagcccaatccgattccctgataaacattcccataaatccgatcgtaaatacttccgggctgataatgaagcgcatatttaaaatgagtagaaaaagctccgcgaatcagtttccgctccggattttctcccctcaaaaaaggatgagtaggaaaaacatattcgggtcttgcttctactcccaggccatgaacgaaccgacggggcagcctattagccaaactatcctccgtctgcccgaaaacggacgcaaccaccccaaccatcaccatacccgacaaaacgataactttctgaatccgcccaaccttattcatatatcaatcctgatttcataggtaagtcttcactatttttaatgcacgcaaatatagtaatagcagtccaatataatccccccctgcaccattaaattttgacagttatatacatatttacacttacaaacgtaggtttaatttttttctttctattccgattccgggttttatcccgtcagaccggttcgtctggaacggtccggtaaggagttccttcaccgacgaacggagtgaggagttccgccggtcagtgaaagaaaaagccagacgaccgacagaagcgaccgggtctccaaacacgaacaccggagacgaataagtaacgaacctacgtttattagtgtaaatatgtatataattgtctaataaaattcagaaaagagacacgttaatttgtgaaatatacaaaaagaattcattttttcaaaaaaaaacagtatgtttgcacatattataatat

SEQ ID NO: 6033 - DNA, 174 bp, Unknown
  gut microbiota DNA sequence
gttctttgtgccgctttatgcttatttttacctgcctcctttcgattttttaccttataatgtgggttcggaaatcgaggtagaaaatgccattcatctttatgatacgggttttaatgaagtgagtgatcaggtgttttccggcggtaaacccacttacatgatcggtataaa

SEQ ID NO: 6034 - DNA, 460 bp, Unknown
  gut microbiota DNA sequence
gcgtatcatcgaattaaaccacatgttcctccgcttgtgcgggcccccgtcaattcctttgagtttcaccgttgccggcgtactccccaggtgggatacttaatgctttcgcttggccgctgacagtatatcgccaacagcgagtatccatcgtttaccgtgtggactaccagggtatctaatcctgtttgatacccacactttcgagcatgaacgtcagttacagtttagcaagctgccttcgcaatcggggttcttcgtgatatctaagcatttcaccgctacaccacgaattccgcctgcctcaactgcactcaaggaaaccagtatcaactgcaattttacggttgagccgcaaactttcacaactgacttaatctcccgtctgcgctccctttaaacccaataaatccggataacgctcgcatcctccgtattaccgcggctgctggcacggagt

SEQ ID NO: 6035 - DNA, 216 bp, Unknown
  gut microbiota DNA sequence
ttccaatctgtatcccgctcgtcgatcgacacactgatcatattgaaatctttgccgcatacttcataaagatgtctcaaatgaggtatttcaccccggcagggactacaccaggaagcccagaattcaagcatattgtaagcacccggtttcatatattccgaaagcggcacattttctcctttcagatttttcagaacgatatcatgataagtc

SEQ ID NO: 6036 - DNA, 13502 bp, Unknown
  gut microbiota DNA sequence
tcttataaatcaaaaaaaataattgttttttagtagtatgtttggataatatgctgatcgttagtttgttatttgttcggcttgtgtcggtaaaacaataaaaagagataaactttgtaacaataaaaagaatgcactatatttgtcaatgtataaatgtctatacatattaatgtggtgaaataatggaatatttattaggaatcgatatcgggggaactcatgtaaaaggtgggattgtcacagggactaccgggaagatggatcagaggactatagtttatgagaaaatagatgccggaggctctgctacttcgattataaaggggatacttcgggtgattacagcattgaagaaagggcgttctgaaaacgaatggcggggtataggaattgctatacccgggcctttcgattatacccggggaatagctgctattcatggggtacgaaaattcgatgccttattcggtttggatttgaaagaggaaataaaaagggtatgcagtttaccggttgtcttcctgaacgatgcttctgcttatgctttgggagaatattatgggggagcggctcaggggagtgagaggagtatggtcgttacggtcgggaccggactgggaagtacgtttatggcccgggaagaaatattggacgaaacgacgcccgccgttccggaacacggatatttgtataatattccttttcgggatagtattgcggacgactatttttctacccgctggtttgtaacgaactggaatcaccgctttcccgataaagcggtgatggatgtgaagacattggcggaatatgcttatcggggagaacaggctgctaaagtcctgtttgaagagtttgccgatcattttaccggatttatagctccttttctgagacatttctgtccggactgtttggtgctcgggggaaatatcatgcggggtgccgatttatttctggaacggataaagtctgagttggaaacccaggggatcggagtgagaatagatacttgccgtttatgggaagatgctccgctgatcggggcggcgatgtatgcgaatcaggtcttgggccggagtgggatggaagaagaggcggtaaagagaaatacaaaacagtatctggctcctatgaaagcacaggcaactccccggggagtttatgatttgtatccggcttttccggtcggggagaataagatccgttcggggatagggtgtttggccgattggatagagcgacacgggcaggtggttatcgatggttatggaggagtgttttgggacgaactggtgagcgaactgggagatgaatttcgtcggagagggaagtgtgtacgttggttccgtaccgatgtcgcgatgcgggatgctcggacgttggaggaaatgctcgctcccgatctgggaggagaagatccgttgttcggccggatgacggagagacaattgagggattggtttgatcccgggaagttgaacgcttttaggccggaccaggaggccgatatcaatgtgctgatcggtataggagctgctttggccggatggaaagcacctttgatctatgtcgatgtacctaaaaatgaaatacagtttcgcatgcgggccgggtgggtgaaaaatctgggtatgaataaaccgaagaataatcagcaaacctataaacattttttctttgtggattgggttgtgctgaaccggcataaagcggagtgtctgccacagatagagctgattgtggatgaacaacgcaggggacagcaattgctgatgatgagcggggaggatttgagagagggattacaccggatgggaagaaatttcttccgggttcgcccttggttcgaacccggcgcatggggagggcaatggatgaaacaacacatcccgggattgaatgaagaagtgcctaatttagcctggtctttcgaattgatggttttggaaaatggactgatgttcgaaagtaacggatatcgtttggaagtttctttcgattttctgatgtataacgattaccgtcaagttctgggagaatcggccgatgtgtttaaaaccgatttcccgattcgttttgattttctggatactttcgatggaggtaacctgtcggtacagtgtcatccccggactacgtacatccgggaacagtttaatatgccttttacacaggatgagacgtattatatcctggatagccggcagaatccccaggtttatctgggatttcaggaaaatatccggcctgaagagttcggcgaggtattgaaacagagccaggcagaaggtaagacgatagacattgaaaaatatgtacagaaatttccggcacacaaacacgacctttttctgatacccaacggaacggttcatgcttccggaaagaattgtatggtgctggaaatcagtagtgctccgtatatttttacttttaaaatgtacgattggctgcgattggatttgaatgggaaaccccgtccgctgaatgtacagcggggaatggataacctctatttcgaacggaagggagaacgggtggcaaaagaattggtttgtcatcccgaggtattggaaaaaaacgaacattatacactcgaacatctgccgacccatgaaaagcatttttacgatgtccatcggtataccgtcgaagatgcggtggaagtagaaaccgaagggagttgccaggtttggatggtggtggaagggaaagcagtaagggtggagactcgcgaaggaatgaggcaacgctttaattatgccgaaacgtttgtaattcctgctgctgctgctacttaccggattataaatgaaacaccgggagaaaaggtgatactggtaaaagcttttatcaaaaaaggatatgggtttgaataaagtcggaaagaagtaggataccggcaaattcagaaagggattttgcgtacatcggttttgcatccttgtagagggaaaatatacttgtaaatttaatatatacaaacttaagaaaaattcttaagtttgtaaaaaatattctatagacagatggtatgaagaataagatgcaaatactgggacgtatatcgttgggattactgatctgtataatactgggacagggaatttggttgtatcgggtacgtgaaatggaaaatcatggattcgagcagacggtcggccggggactgaacgatatcttgtgggtggaggtgattttcctgatcgggtttatcgtttgtttagtttggcaaagggttgtggcgaaaaggattgaacgaagggcactggtacagatgatggggaagacaccttcggaagagatacctttaacggagtggatggcagtgatcgacggtaagctgcaatgcgaggggattgctttgtctgtggaggaggaattgaaattgaatacgataaaaacgcacttggtggaaatggctgaaaccatcgatatgcagcagagtgctttaaagacctcggtatggaaaatcgaccgggaaaatatcgatctgaaaccggagatggaaatgatcgttgagttgttttctctgatccggccacaggcactggtgggttaccaaatcgacgaaggagcggaatatccttgtttggataaggtatatttttattatctgatcctttgtttggtagataaagctattgtatctgccggagttcaccccatagtgaggatcgaattttataccgacaagaaacattatatgttgacagtcgaagataatggcaggaaaatagatccgggagacaggcagccggaacaatccaccggggcgggactggccttcgtcgtacagcaagtggtcggtggttatggaggaaaaatccgctttataagtaaaccgaacggaaacaagtgtgtgatcactttaccacagaaacggaattaattgaagtacgaaacggcgattaccgctcgctcctcttttcttgaaggaagggcataaaaaatagagaggaacttgagaagagagtctggcagacaatcttacttcaagttcgctctcctctatagtatagcaacaacactagagatggagtgttataatctcggaatgattgttttcctgagataaggcataaatggtattttcttcggcactatagctgatcgaagaacaagcattttccaggcggtaagtacgcacgtgcgaaccgttccagtcgaataccagtatggttttgcctttgtcgacgtccagattatgttgttttagcgtccgtcctgaatacagggcatagatgtaatcatccgatacagccagatcacagaacccgaaaatatgatatttggaataattgaccggatggactaaaccacggcctttgggacggtgacggttgaattttaccttggcaggggtcagatgcacttcattgacacgggtcagttcgttaccgttgatttcacagatgtccaggcaaccggtttgcatattggcgcaggccaagcgttcgagcgtcggttttactgctaaggtattgctggcataaaatgcacttttgagcgtatccgtcagagtggggtcggcacaggccggataacttacactataggtgtcggctccggatgcttgactgatgcaataacggccttgggtataaactccggtcgacagcaggcggtcaccgatccggatggctccgataggggtcttgttgttgtcggtgagggaagtgaacgtaggctggtaacccggagtcgcatattcgttcaagttaatttccacgaactttttagttccgaaatcgaatgccgaaacgatgtctccgtttaggttcatactgataaaatacatgccttctccttcgtttctgcctgccggtactaaacgggtaacggttccgttttcgctgttataaatggcgaaacggtaagcgctactgggagtaagaaaagcatataagtttcctttttttacaaatttataaggagagataatgttcaatgcctccacatcaattttgtctgtttgggcatattgaagctctgtcaccttcgtccgtactaacggagaagattcggtctctaaggtcggatcggattgacaactgccgagcagaagagcagggatgatgaagtaatatagttttttcatatcaattgtccttctaattaatgttattctttataactacttaatccaaaatgatttcctatatggccctctgcgtctacaccaaaacagaaagttccgacatatatacatgttgcgtccgggtcaatggattctttttcggctaaagcatctatattatcaaaggtgatatcagtaattgtagattctttagaaaacataaaattaatagacaatgcggtcagaataataattcctcccataaaaattctagctttttttctcatttttatatttgttgattttgacaacgcgaagttaggaaagattcttaattttgtaaaaaaaaaattgttctataatgtaccccaagctaaggtatgaaaaatagtatgaaaacgataggacaattgtccgtcgtattattaatatgtgtattattgggtcaagggatgtggctgtatcatgtacgtgaaattaagatggaggagtttcgcgaaagtgcaaatgatgctttattaaataccacctataagtatttatttgatgaaggtctgaattttggtaaaaattatagattaacatatagtttaataaaaaatgattctttctattggtattatgataataaagagggtatcattccgatcaaatctccagatatggtagataaactaggaaaattgattacctatgattgtttgtgtgaacatggattatttgatgttcttaggctaaataaattatatattgattatttaaaagaaaaaggtattactgaaaatcccatattaaaagtcttgaatattgagggagaagaattacaatctacaggaaatctaaagaaaaattgtaattctattatgacccttcctatcgagttagggtatgagaataaacatcaattattagctactttcgagcttccctttatctttcgcgccttaagtggtattttatgggttgaattgatattcatgatcggttttatcttctgtttggtttggcagtggtgttcgatacggatgacaatgcgtagtgcgcggatacaaacgatgggaatgacgcatttggaacatgaattgaagaagcctttggcaacgatgatttcggtagtaaatggtattctggaggggaaagattctgtcttatgtccccgggatacgacaaaattgactatggtaaaggcgcgtttgatgaagatggcggatatcaccgatacgatgctgacttctctaaagacttctgtattgatgataaaccgggaagtgatcgatctgaaattcgagatggaaatgacgaccgaaatgttttcattgatccggccttacgcacgggtgggttaccggattgctgaaggactggagtatccatgtttagataaaatatatttcaattatgtcgttgttaatttggtggataatgccattaaatatggcggtactcatcccgtggtgaaagttgacttttatactatcggtgacaattatgtactgaccgtcgaagataacggtatgggaatcgcacccaaagatcagaagcaaattttcaaacagttctaccgtgtaaaaaatcaacaagtgaccaaaactaccggtttcggactaggcttgactttcgtccacaaagtagtttgtgcatacggaggaagtatccggttggaaagtgaattgggaatcggcagcaagttcaccatcaccatacctcaatagctcacggggacagggcagtgagctattgttacgctttttcaattttctcaaccggtaaccctgtatatttggatatggtgtcgtacggtaaaccgtctactttcatttggcgggctataacgagcttctctttttctataccttccacaattccttctgctcttccaacttctatgccttttgtcattccttcttcaattccttttgccattcctttccggatagcgctgttatatagtgttttctcgacactgatgatatcccagaatttttcgtaacccaaaagctgtgcttcggtgaaagcagattcttctacggcgttcacggctttttttacttccggattggccaacagctcaggcggcacttcgcgggtatgttcattgatttccgtcaggaaacgaagccagagtacttgcattttcttctcagaataggtatgtgggttgaatttgggcagttcgacgaaaatcaagtgtaggccttcgatcactttttcagtgtgttccatgtgtactagctgataataatgataaaagccttcgagctcaggctcgaatacttcatttaccagattcagcgaatataccggctgcaacagttcgtattcctgaccggtgtcgatttgccgtacataggccttcgaagcattgaacaatacccgttggcgaaactccggagaccagatcatttgcatctcgacgataaactgacgtccttctgcatcgcggcagcggacgtccacgatactgttcttgcgtaaaggattttccggtacgagttcggccggaaggtattctatctccctgatctcatgcctggggtttaagggcaacagggcgttcagcaagctgatcaccaggtcgggatgctcgccgaaaacatgtttgaaagtcagatcggctttaggatcgagataacgcatagatttcctttcctttttaatttaaagcaaatatacgaaaaaataggcaaataaaaaagtactgtgtttgtgagagaaaagatagcgcagggccctgtccccgcgggctatgttattttaaaaataattatttaaatttaccccatgttatagatcgggtctattgtgaactcactcagttgtaattggtatttagtatgaaaaaagttggtggaaaattattgggatttgtttttggtgtaggtatattgtttgctcttttgccagagaaacaggccggtgctcaggatttacttattaacatttaataaaatcgtatgaaaaaaggaatttatcttttgggattaggagtcttgctgttgctgtgtatggatttacaggcaaaagtacgtctgcctcacttcttttcttccaatatggtattgcaaagggatatgcctatccgggtgtggggaaaagcggataagaatgaagtgatttccgtcgctttgaatggaagtgtgcaaacggcaaaaaccgggaaggatggaatctggagggtggaattgcctgctatgaaagccgggggaccttacgacatgcagatcgaatccgcagaggagacgatcggtttaaccaatatattgatcggagatgtttgggtttgtagcggacaatcgaatatggagttcggtttgaataatgttataaatgccgggcaggagattgctgcctccactttgccggatatccgtctgttgaatgttccgaaaaatatgcaatcgaaggagcagttcgatctggagccttgcgaatggactgcctgtaatcctcagacgtctcctctgtttacggctgtcggttactttttcggtaaagaattgcaacccgaaatcggagtgcctgtcggattgattcatacttcctggggaggtaccgatatagaaacctggaccagctgggagacggctgttaaaaccaacgacacttataaaaaatatgccggaaaggatcaggagaaagcgatggggtattcgatggataatatcaggttatataaagaagccttgaaaaaagacaaaggtttggttcagaaatggtatgttccggcttataaaaccaaagggtggaagacgatggcagtgccgaaagtctgggaggcagaactggcgaacgaagatgggattgtttggttgcggaaaaccattgatttgccggcgggtgtgacaggaaaaaaagccagaataaatctgggggcagtggatgacgaagacctgacctatgtcaatggggtgaaagtaggagaaatgaatttctggatgcccaacaggtcttatgaaattccggcaggtgtcctgaaagggggaaataatgtgattgctgttcgcattacggataccggcggcttgggaggaatcctcggtaaagctgaggaagtatacctggaaatcgatggacagagatattcgcttgccggtgattgggtgtataagccttcggtggtgacttcgatgtataaagtcagtgggattagtccgaatagcttctcttccttgttgtacaacgggatggtgcatcccttgatcggatatgggataaaaggggtgatctggtatcagggagagaataatgcgggcagagcttatcaatatcgtacgttgtttccggccatgataaacgattggcggcagcagtggggatatgagttcccttttctgtgggtacaattagctaattttatggcggtggaagatcagccgaaagacagcgattgggcagaacttcgtgaagcacagaatatgaccttgagtttgccgaagaccggacaagccgttattaccgatatcggtgaggctttcgatattcatcccaaaaataaacaggaggtggggaaacgattggcgaaagcagctctgcaggttgcttacggacaacctgttttgggagaaggtcccgtttataagtctatgaaagtggagggagagaaagtgatcctgacattcgggaatgtcggcgacggattgacgaccagcgatcgtaaccgttatgggtatgtcaacggtttttccattgccggagctgatcggaaatttgtatgggcaaaggcttacatcgatgggaataaagtcgttgttttcagtgagaaagtaccgaatccggtagctgtccgttacggttggagcaataatccttatgacgacaacctcgtaaatagcgccggtttgctggcttctcccttccgtacagaccagtggaaaggaattaccgaaaaatgagcaggtttttctggtttgacagaaaagatcagtaaaggctacggtttctggttagtgctacgctgagtggtggaacttcgttccgggtaaaaaattccctttcagaaccgcaggttcgccaatcaggagcctgcaaggcgacattgaccagaaacgaagtgacacggatccatttagaggtgctccttcatcacttaaggttcttgacgcactttataaaccaatttaattcccggactgaattttacggaagaatcggttgggggttggtataaaatttgtttgcaggaggcatgatagcaaaggattgaatagataatgaaatattgacctgatgaaagcgattattataaccataggggatgaaattttaatgggacaaattctggacacgaattcgcaatatattgcccggagtttgaccgatatgggggtagagattacagagattttatcgatcccggataagagggacgagatttatgagacggtggaatatgcgatgtctgaggcggatttgatcatcgtaaccggaggtttgggacccacgaaggacgatgttactaaaaaggtactcgctgaatatttcggttcacagttgaaaatgaacgaggaagtattcgctcggctcgaagaaatgttgaagaggagaggattgactatgaacgaaggaaatcgctcccaggctttattgccggataattgccggattttacgtaatgataaaggtacagcttcgggaatgtggttcgaaaaaggctggaagtcactgatctctttaccgggagtacccttcgaaatggaacatttgatcgatacttccgtgatgccggaattgaaaaagaagtatccgcatttacaattggaataccggatgctgaaagtatacgatgtcccagaatcccaattggcacaaatgctggaaaattgggaagatgccttaaaagagggattgaaattggcttatcttccttctccgggactggtgagattacgtattacggcgaaaggggaaagtgtaaaacacctggatgaatgttacgaaagcctgaaagaagtattaaaggacgtgagatatgccgagggagacgacgttctggagaaacaattaggcgaactgttgcgtaataagaaagtcactatggccacggccgagagttgtacaggaggttacatcgctcatttgatcacttctattgcagggagttcggattattttaaaggaagtgtagtttcctatgcgaatgaggtgaaagtaaatgtattgggagtgaatgccgcagatttggaacgggaaggagctgtgagtgaggctgtggtattacagatggccgaaggagtaagaaagatcaccggagcagattatgcggtgtcgacctcaggcgtagcaggaccgggaggtggcacgccggagaaaccggtagggacggtttggatcggagtagcgacaccccggaagagttatgcaaaattgttcactttttcgtttacccgcgaaaggaatatagcgaaggcagcctctaaagccatggaaatgttgctggaagaagtgagggaaaacgaaaagtagaagaggatatgatgaagcgacgttatatgatacctttactgatccttgttgttttaggcattgcctattgggcgggcccccggctacctcgtacggaattgaatacggacctaccggatctaccggttggaatcgaccgtatcagtgagtatgtgcaggacagggaggctcggttaccggtgaagcccgataatcagggaatcattttatggggagattcggttgctcggcctacaacctacgtattgctttatctgcatggatttacggccagccgtttcgaaggccagccgatcatatccgattttgtaaaagaatttagagtgaatgcttatcttccccggctggcggcccacggcttgcaaggtacggaggctatgctcggtatgacgccggctaatctttacaattcggctaaagaagccttggtgatcgctcacaaattggggaagaaagttattataatggggacatccaccggttgtacgttagctttgatgttagcggccgattttcccaggctggtggatgccctgatcttatattcaccgaatattaaaattaaaaatcctatggcccccttgttgagcggtccctggggattacagatcagccgggccgtacatggagggaaatatgccgtttcggatgatccggcagatagtgaagattgtaaatactggtattgtaaataccgcttggaagcacaggtttatttacagcaactgctggatatgagaatgaaccgacgggaattcgaaaaagtctctcagcctgtttttttaggttattattacaaagattccgatcatcaggatgagacgatagaagttaaagcggcgttgaacatgttcgatgaattaggaactcctaaagacgagaaacgggccgttgcttttccgaatgcaggcgtacacgttattgcctgtggtttatcgtcgaaagctattcctgaagtcagacaacaaactttcgattttgcccgtcaagttttgggtatgaaataattcttccaacacgtttgtcaataaattatacaagtattgtctgtttttttgacagatttaaggtgctgtttatttgataaatatctgaatataaatttattagttaaattggcatgtcgattgtggatctagggtaaaatccatattcctatgatcgatattaaattatttgtacgcaacctgattcacaataagctttattttgctattacggttttgggatttgctatcgcattgacttttgtactggtgttgagtgtttatattcgtcaggaactatcggtagaccaatttcatcaaaataaagaccggatttatcgggtggtcgatgaagagggatcgtattggggggctgtgattggtagcgaactgcaaagtaaatatcctgagatcgaatgttatacaagatattataatcagaactatatggtagaaattcctcatcaggaaaaaatcctgatgcaaacagctctgatcgattcttcatttttccggagttgttttacttctgtctgggattggcgtaagcggtaggcagacaaaagggtcgctatcagtttggcattatcccagggtttgacgacaaagtcggtagccccttctttcactgtttttacggccagttcgatgtctgcataagctgtaaataggacgaccggtagatcgttgcttattttccgtatttctcccagccagaaaataccttcgtttccattatttataccactggaaaaattcatgtccaacaatacgacatcgatattttccgtttccagcatcgcaggaatccggttgggattactgatggtgatcacttttttaaaagtgccgctgagcagcatatcgatggctgccaatacacctttattgtcgtcaacaatgaggatggtaccttgttttgtcatatggaaaattataactatgcaaatataataattatcgaccgg

SEQ ID NO: 6037 - DNA, 255 bp, Unknown
  gut microbiota DNA sequence
caacaccagcactccggcagccaacccgggctgccggtaattaaaatgatttccagcctgccggaaaacattccacaaatgaaaaccggccacaacaagcaaaatcagattcttcgcaaaagtagccccgttggaaagatgaaccgcttccccaaaacaaccgcattcatttataccaccatagggatccgtataaatcgaataagtcagtatcgtaaatacgaggataaaaagagtcactgccactgccgtaat

SEQ ID NO: 6038 - DNA, 10463 bp, Unknown
  gut microbiota DNA sequence
aatatatcaacactcttgataatttaaagaataaattttatctttgtcatgaaaagattgagttatggcagcaaaacacgatgccgttataaacgagctgaattttaaaatagataaattaataaaactatatatatcctctctggaacagaacaaaagtctggaaagcaaaatacaggatttgcaatccgagcttgaaaacctgcaaagagagaacaaagatttaaacaataaactaaaaacaaccagagtggctagtgcaatttcggaagggaacggaagttatgaagcgaaaatgcgaatcaaccaactggtgcgggagatagataaatgtattgctcttttgaataattaattatgtctgaaaaacgcaacattaacttaactattgccgatatacctctgaatttgaatatttcagcagcagatgaagagatcatccggaaagcggcaaaggaaattaatgaacgtgttttaaaatataaaaccggaaatacagaaccggagcctttttattttttagcttatgtttcgctgttgcatacgataaaaatgctgcaacaagaacagaagtttaatgaaatagaacaaattaatttgaaacttgatgaattcatcaaagagtaagtatttttagagttctttgaacatagatattcccgcattatttcgactttaagcgaaaaactcaacactcaaacaattagagcagacgcttatatttgcacaagacaggcctcgactcttcggagttccttcgggacagtggaagtctgaatcaaatggcagctctacccgtgtcatacaggggttttattaaaaagaaatagtgcgggatttttttgtgcatttacaaaaagagaaaacagtgtaacattaaactatattataaatttaattaataacagaaatatgacaatgacaacaataatcgcaagcgtgatagctttgttcgtcggtatagcgatcggctggtttattatgagattagccatgaaataccgggcacaaaatatcatcaaagaagctgaagctgaagcagaagtgatcaaaaaggataaaattctccaggctaaagaaaaattcttacagatcaaagccgaacatgaaaaacaggctgctgccagaaataataagctgttgatggccgaaaacaagttaaaacaacaggaaaccgatatttcgcgcaaactggaagaaatacaacgcaaagggaaagaactccaaagccagcaaagcaacatagaagtacaaaaagaattgatcgaaaagaaaacggcagaattggacaagatcaaaaaacagcaaatcgaacaacttgaagccatttcaggtatgtccggtgagcaggcaaaagaaaaactgatcaactctctgaaagaagaagcagaggcagaagccatctcttatgtcaacgagatcatggaggaagctaaaatgactgccaatatggaagctaaaaaggtcgtgataaagacgattcagcgtgtagcgaccgaaacagcgaccgaaaatgcagtctctattttccacatcgattcggacgaaatcaaaggccggattatcggacgcgaaggtcgtaatatccgcgcactcgaagctgcaacaggagttgaaatcatcgtcgacgatactcctgaagcgatcgtactctcgggtttcgatccggtaagaagggaaattgcacgtctgtctttacaccagctggtaacagacggacgtatccatcctgcccgcatcgaagaggtagtgaataaagtgaaaaaacaaatcgaagaagaaattatcgaaaccggtaagcgcaccacaatcgacttaggagtccacggtttacatcccgaactgatccgtctgatcggtaaaatgaaatatcgttcttcttatggtcagaacctattgcaacatgcccgtgaaacagctaatctttgtgcgatcatggcagccgaactgggtctgaatgtgaagaaagccaaacgtgccggattactccatgatatcggtaaagtgcccgacgacgagccggaattaccacacgctattctgggtatgcaattagctgaaaaatataaagaaaaaccggatatctgtaatgctatcggagcccaccacgaagaaatcgaaatgacgacactgatcgcacctatcgtacaggcttgtgatgcgatctcaggagctcgtccgggtgcacgtcgggaagtcgtcgaatcttatatcaaacgcttgaaagatatggaagatctggcactctcgtacaatggagttgtgaagacctatgccatccaagccggacgggaattgagagtcgttgtagggagtgaaaaaatctcggatgcagaagcagaaaaaatctcattcgatatcgcaaaacgaatccaggatgaaatgacttaccccggacaggttaaagtaaccgtcatccgcgaaacccgggcaatcaactatgccaaatagtttaagattcatctttataaaaaacagcaggccctgaaaaggtctgctgttttttattccgtactccgggacggacctatcgtcccattttactccttttctcgctcaaaacatgctaagtcgatattgtagttggagagtagcaatgaagcaaacggacaaagcggtaccgttttcagaacttaaatctcagtgagagtagaatccattttctatttcgttttttgtgtcatcagaccggttcacccggaatcggaatagaaagaaaaaataaacctggaattaaattagtttagaaagttcataaggtttaaaacttattctattctaaacaaaaacgatgagcattcagttttaacgttgctatcgctacacggctacacctttttaccgtaaaagaaggattaggctgtcgcccttccattattgccaatcccagatccgcttagtcgtcccggggattttttcataattgtatttgtagatcattttcttgtcggcatattccccaaaagtaactacttccccattaatccaatttttgaaatccggataagcttcgaacaaagaaattttttcttcggcataagcaaacgtaccgtgactaccgttcagaccataaacgaccagaccataaggcatcccttcctcattcaataaatcatagtcactgtattcagcatcggcatttattgcaaaataccgattatcatctacttcaataaaccaggcgatactagcatattcatctttccctttttccaattcatggtcgagacggcgttccaggctataacagaccggttgcagatcgctttgtgtattgataaatcctttttcaccaccgaacaagtctttacgcacatcttccgaaatgatatgttcgcttttatcattaccgatcacacatcccagtttgatcaccttttggctccctaaagcaatcggttgaatatcgatctgcaatttattccaggaatgtaaattccgaacatggataatcaaatcattgtaatcataatcaccggaacgggtatcttcgaacataatcgcctgccaggatttattataagcaatcttagcatctgtatcgttcaatacctcatattcgatcgagatttcatcaccggtacttcccttcgtcgatactttcatccctttcgggatttgtatggtcatcggctgagtgacaatagcgacagtatcttgcccatacatcacataggtggcacacccctcctgaaccggtacttcaaaaggctctgaagtaacacaattagcaatccgttgtccgccattatataaacttcccggacgcgtacacgagctgatcaaagcaatccccaccaatccgaataaaattttactcattgttttcgattttaggtcatttatctcccccaaagatagaacgattaaaccaagacacacttataaaaaaaacggattgttttatacaaaacaccaatcacactctttctaaaacccggactatatctgcagaagaaggattttggaatacttttagaccaaaataaggaactaccgcaaaaatatgatcgaaaacatcggcctggattttctcataaggcacccaatctttctctctggagaagaaatacacctccaaagggattcctttttcggtcggttgtaattgccggaccatatacgtcaaatcagaatttacgacaggtaaatttttcaggtataattcgagataagcccggaaaacgcccaggtttgtctggtgtactccattgaccggcacagaatcgtcgatcccctgctgctgattgtattgttgtactttctgctcggtttgctcgatatattcctttaaaataacgatctttttatatctttccagcatttccggggtacagaaacagacactattcacatccaaattgacagaacgtttcacgcgacgtccaccggactcccgcatgcccctccagttttgaaacgaatcactcaccaatgcataaggcgggatcgtaataatcgtattgtcgaaattacggactttcactgtattcagagtcacttcgatcaccgtaccgtcggcattgtatttaggcatcgtaatccaatcccccgggcgcaacatatcattggccgaaagttgcactccggaaacaaggcccatgatactatccttgaaaaccaacattaaaatagcagccgaagctcccaaaccagccaaaagatggataggagatttctcgatcaatacagcaataatgcaaatcgaaccgacaaaaaacaaagcgacctgaataatctggtagacacctttcagaggccggtcacgaaatacttctttctgtgtggccaactggaatatgactcccagaaaaatgttgataaaccgcaaagcagccgctataatatacaccatacacagctttcggataaacgccagggcatccgatccgtcggggaaagcgatcggcaaaagtatatataccaccacaggcggcaggatgtggcagaaattattcatgacccgatcgttaaacaacagatcgtcccaggtcacctttgtcttttgggtaaccttacgcaccaaccgtacaatccctttcctgcaaatccaatctgtcagaaaagccaatacggctatcaatacaagaacaatcaggcgattcagattagtcatataactgagatcgagacctaaagactccaaaaaataatacacccaccgcgtaaatgtttccatcgtctattctcctttttttctaactaaataataataacacagaggtacccaatacagactgaccagagtaccgatcgtcatcccgctgatcatagctaccgccagcggccgctgcaattgggaaccgatatcgtcaccccataaaaaagggatcaaagcaaaaatagtagtcaaactcgtcatcagaatcggcttcaaccgcctcaccccaccttcgtgaatggcttccagcaaaggaaatccctgttgttgaagccggatgatcgtatcgatcttcagaatcgagtcgttgatcacgataccactcatgaccacgataccgatcatcgacatcagattcagtgagatcccacaaatccacaatgccagcaaagtcatcgccacatcgatcggaatctcgatcaatacgatcaaaggtaatgtcaacgattcgaattgactggctaaaataaagtagagcatcagcagggccacgattacgatcatcaacatctgccagaaagtctcattcccctcgaaataagcccctccgaaatgaggatccagattagcttttaccgcttctgtcctcaccgtctttataatttcttggatgctatctcctgtatggtaaacctgaacaggcacgacgactccttcttttttcccgaaaattttcttgtaatcgtattccattgacaaatcggtcaacgcagctaccggaatatacttcctatccgaattagacacatacacctcgttgagaatatcccggatcgtatgttcattttcagtaatgacaatcggaatataaaggttccccgtattcaattttccgatactgaccttactgatattcttttccaacgtattcagcaacacattctgattcactttatacaacgccaaacgttcgggcaagatatggactacgattctttcctgtacggcaggcttattcaatttcagtccgggcatttcctcattcaaatggtcgataaatgcattaattttcgatagttcctctatcttgcgggcagattctcccgagaggtaaatgatcaaaggagcatcttctcccttaaacaactgttcgaacagattttccaccttcgccggttctacccgggcttccggatagtttttcttaatataagcggttatatccccgaccaaaactttcaggctttcattatcggtagtttttatataaaactccgcctcattgatattaccgttatcctcgggattcaggaaaaactgtttttcaccgatatgacaggatatttcagtacaacgtcccttaaactgccggataatatcctgcacccggttataattttcatcgacatgaatactattgttccagtctgtccggatcaacatttcattgatttctaccggaggcatccgttccactttagtgaaaaaagccgtagcagcacccaacaataccagcacagccacgatcagcatggtcttatggcggtgatagaacacaaagtgatagacaatcgtatagtacttatccagatgcttaaaactgatccgtttgacgaaattactgatttttccgtcttcatgtgctcttttaaagagaagaaaaaaaatgacagggacaatcgtcagcgaaacgatcagcgagacaaaaagcccgacacctacagctaccgcctggtcatagaacaaagccccggcaactcctcccagaaatatcaacggcacaaataccgcacaagtcgtcaacaccgaagacaacaggggacggaaaatctcggccgtaccgtccgcacaagccacaaacagcgaatctccccgttcccttcgctggttgatattatcgatgacgataatcgaattatcgatcatcatccccacccccatgatcaaaccggacagagaaatggtattgatagacaaaccgatcaactggaaaaacagtacactgataaccacagaaaccggtatactgatcccgataatcatcggtgaacgggcatcccgcaagaaaaacagcataataaacacagccaggataatcccccatactaaactctgctgcaaattcgtaatcgagtaattcagtaaggcagcctgatcccgcgatacggaaaattcgatatccggatattctgtttcaaaattttccagcatttcactgactttctctttcatctccgacatccgggcactcgattgtttgatcaccgccatacacagggattgtttttcgccattcacgaacatccctctcttatctctcggccgtatgcccacttcggcaatatctttcacctgcatcagacgcccttcgatattcaggtatacctcccggacatcttcgaccgacatcagctgactggtaaattttatattatattggtagtaaccgtcccggatcgacaagcttcccgacacccggttattttgatcgatagcttctttcaattggtcttgggtaatattcagactcttcattttggcttcatcgggcaagatatacatttcgggctgatacatcccgctaatatccaccatcgcgacatccggcaattgctccaaccgctttttcaaaacggcatcggcaaattcgcaaaattccaggaatttgatatccgattccaatttttttaaattcaactgaatataaaatacaggaatatccgaagtcgaagctttaataatcgtaggccgttgcatctctttagggaagctgttcatcgcagcatccactttctgattgacctcgataaaagcataatcgatcgaagtgccgtattcgaacttcatggttatcgttccgctcccttccctggattcggaagtaatgtccgataatgacggaatctgttgcagctgccctctcagtaagttggtgatactgttttccatttcattgaccgaggcattatcctgagtataatgtatactgatctcgggaatatctacatccggcatcaatgaaaccggtagctgaaacatagccactgcccccaataccaaaaaggcaatggtgctcatgattaccgcgacgggacgtttgagtaaaaaaccaatcattttcttaatatttaatgaccaaaaaggaaaacatcaatgctttatgaatccccgtatcttattcaattcaatatgacttaaccattttcttcccccttccttcatcccactgtttttccgtctgcatcccgctttatcttccttacgcataaaaaacaaaggcagataaatcatcaacaccaatacagaaaaaataaggccactcatcgtcccgatcgccaggctgatccaaaaatcggccacgttacttccgatcaggaaagggataaatcccaaaattgtggaaataaccgtcagcagaatcggaataattttcgcattccaggcactcaaataagtttgtaaccctctcgcttttcccgcaatgatcttattattataatcgttctgaatatacaacaccgcattcaccgataatccgcacatcaggataaaggccgccaatcccccttcgttaaataccagcccgaaacagtaaaaacccaaaaaacagccgataaacgacaaaggcacgatcagcattacgatcatcgcttgcttcaaggattcgagcaagatggcacagataaaataaattataccgaataccagtaagatatacagaatacgccgatcgaacccattgctcatcttccagtatcctccccaataatcccggccttccttcacccggaaaccgatcggcatactctggttcatttccttcatcactctctctttcaccttattcgacaacatataatccccgataaaatcatattgtaccgatacatcgtattcctgattcgttttcgtgatcttatcgaacgtatcctcatattggattgtgccgacgtcactcaaacggaaagtggctttatcgccctgtaccggataattctgcatctcccagatactggtctccaccgtatttttgggccggataacaatagaagtctgttcgttatcgatataagccgtagtatactcatcccgggcataagacaaactcctcaatctccacataatatcattgacattcgaattattacgggccagtttagctttatcgactttcaccacaaactccctcattttctcgggattccgggcatttccgatatataatttcttcacccggcggttttcagatagcttgttcttcaagacttcggcatacttcatcacttgccggtaattatatcccaccaccttcagcccttcactgcggtaaccgtctcccaggctattggaaaaactccttccgactccggaaatctgtgaatcggcattcccgatcgaattacaataacgcaccaactcattcttcagcctctcggggaaaccggtcatctcggcttcttctttaaaggtgattttcattcttccctcgttagcagaactgatactcgtcgtaaaaaggtcgacttcttgaaatccggagacaaaattttccactttcataaatgcctcgttcatttgttccagcgtcgctccatgcggcattgtcatcactacactcagggaggtccggatacggtcgttattgtcattttgcctccactccccttttcctccttccacgaacaagcgcaggcttcctcccaacagcttatccatccagggtctgatcgtcagaaaccattcgctgctaaagattcggttataggtctcggcatacgacttatcgcggtccactgaagaaggaatcataaatacaggtaatccgaatccgagaatagccaaaatcacccatgctttcctgaatctccaggtgaacccgataaaccgcttgtatttccaggtaaattttacaacttttctcttgcgggcaacacgcactctggcttcttttttccgcaacggtattttttccatcaaagccggtacaaagaaaagagctacaaacaacgatacggacaaattgacaatgataaccgtagtaaaatcccacatattccgcatgatctcattgtccatattgaaaatgacggtcaaagcccccatcgtcgtcagcgtcgcagccagaatagccataaatactttccggtcacgatgatgtctgtaatgatcggccataacgatcacattatcgatgatgataccgaacgacacagttatccctgccagagtataaatatgaatttctactttcaggaaataatagaaaacaaaagcaatcagcacattagcagctaaagaaacggcgataatcaacaaatagcggaaatcccggctcaccagaaacacaaaaatcagcagaatc

SEQ ID NO: 6039 - DNA, 969 bp, Unknown
  gut microbiota DNA sequence
gcatttgccccaaagtatttagcaggattttaatgtttatctaagaattaacccttatatttgctctccgtattttttataaacctaatataataatatagtacaaagaaatgggtaaagttcttattatcggtgcaggcggtgtaggtaccgttgttgcgcacaaagtggctcaaaatcctgatgtgtttacagaaatcatgatagccagccgcaccaagtccaaatgtgacgctgttgtcaaggcaatcggtaacccgaacatcaaaaccgcccaggtagatgccgacagcgtggacgaactggtagcactcttcaatagtttcaaacccgaaatcgtcatcaacgtagccctcccctaccaagacctcaccatcatggaggcttgcctgcaaagcggagtcaactatctggataccgccaattatgagccgaaagatgttgcccactttgaatacagttggcaatgggcctataagaaacgcttcgaagatgccggactgaccgccatcctcggttgcggtttcgacccgggagtgagcggcatctatactgcatacgccgccaaacatcattttgacgaaatacaatatctggacatcgtagactgcaatgccggaaatcatcataaagcattcgccaccaacttcaatccggaaatcaatatccgtgagattacacagaacggccgctattatgaaaacggagaatgggtgacaaccaagccgctggaaatccacaaagacctgacttatccgaacatcggtccgcgcgactcctacctgctttatcacgaagaactggagtctctggtgaagaatttccccaccatcaagcgtgcacgcttctggatgacgtttggacaagagtatctaacccacctgcgcgttatccagaacatcggcatggcacgcatagacgaagtggaatataacggcatgaaggttgttccgctgcaattcctgaaag

SEQ ID NO: 6040 - DNA, 685 bp, Unknown
  gut microbiota DNA sequence
aaggaatagtgaagtacatacagatgatgcaggaaaaagatgcttccgctacagctcagaaatgggcggagcagtttgccaagaccgatgtctgtcccgaatgtaagggagccagattgaacagggaggcattgcatttccgcatacacgataagaacatctatgaattggccagcatggatatcaatgagttgtatgattggctgatgaaggtagatgaatttttagaggataaacaacgcagaattgcgagcgagatattaaaggaaattcgtactcgtttgcgtttcttgcttgatgtgggcttggactatctgtcattgaaccgcacctcggtgtctctttcgggaggagaaagccagcgcatccgtttggcaactcaaatcggttcacaattggtgaatgtactctatatattggatgagccgagtatcggacttcaccagcgcgacaatctccgacttatcaattcattgaagaaacttcgggatacaggcaactctgtcattgtggtggaacatgataaggatatgatgttggccgcagattatgtagtggacatgggaccgaaagccggccgtttggggggtgaggtagtattcgccggaactccgcaggaaatggttaaaacagagacacttacctcgcaatatttaaacgggaagatgaagctggagattccatc

SEQ ID NO: 6041 - DNA, 2566 bp, Unknown
  gut microbiota DNA sequence
cgtttctacttctctaatcttctttttcctcatttccttgtcactgccaactaaagccaatgactgccacaaccacttgaaactcaaaacaaatgctctattttgctattttttgcctttttaggcgttattttatagaaaaatcaaatgccttataggtatatcgctgaataaaatcaatatctgtacctccaaaaatgcccatattataagctttgttatcaatatgaaggtcatatcgtttcatttcctctggcatatagctgatagcatgacggatatcacgccacatctttccataatagtcagttgtagtttcttcattctggacaatgagttcatgatcccttaggctttcatcaatttttgtccaaatgaaaacatcgccatcaacatggataaatggttcctttatagactggtaggccttaatttttgccaatgcccacaagttcggattataatgattcagacagtcaagagatacgattacatccgtatatggcaagtgcaatttgttgataagaacatcatatccttgactgtcggttaccaaagtaacatcatcataataacgtcgtaactgataacaactaataatccagctcagatagttgaatataggtaaaagccatccataactatcggtcagactattcttgttgccggtccaaaaactttgtataattttcattttcttatttctttatatcaggcaagcgattagtttcattgttgctgatgtttatatctgcctttttagctttttgcttgccgaaattataagtcaatcccacacggaatgaggtgttgtcattgtttattctgtttctaaagacataatctttatattcagttctgttattgctcttagtaccactaaagatgtcttgggcttgtatattcaaaagaagtttgttcttaataatatcaatcttgcatcctaagccgacacaatcgatgtttccagtgtgaaaggattcttctattcctggaagcacatgataatagttcgcataaaagttcaaaactttgtaacggtaacttaaattggcagaaaaagatgtattcagacttcgcaaatctttgtcatccagctcgtcaacgtaagattttgctttaacgtagaacatagatacacttgaatacaaattgaattttccaaatgagaaattataactagcatctgtaccaaaagtattaatggtaagacaattctttggagaatacttggtgaacaagtcatccactacctgagtcagattctgtatggcatcagatgtgtgataataatacaggttaatgaagataactcgctctaaattggactttgattgaaaatcaagaagttgggcgtttgcctatattatataggtaacaatatggaaacgagcggacttctgctcgtttctgtattttgcaatatgcaaagaacgcctcaattcggggacaaagatacgatatttttcttaatatcccataatttgcaagaagagaaacatagaaattaggacttttttacataaaatcttctgttcagatatattcctattcatttatattatcacccccactgacataagaaagaaccaaacggcgaaccacggcatgaatgtcttcattagggaacttctggcgatatttctccgtaaggtcttcgcagaaatacatcttgctatgaaccaaagaagaaggaatatttagatgcataaacacatcgtatgttgcaacaggcttgccatcctttgtgtcgacaggcacaatatccatcttataccaagctagtccagatacggcagagaacaatctataattgtccttactctccgctttaccagcgatgctcagtatatacccgtcagcagacttatcgtcctcaggattcaccgcatatagcatatatacagcaggaagcgtcgagtatttttttgtgataaactgatatttcctgcttcctccaaaaggagggtttgctttcaaatcctgctctatatcctcacgaatttgtggcgcatccaccacaaactctacttcgccagtataattgacgacagatttcgatggctgtggatttggctgaataccttcaccattgtcattgctgttgtcacacgcacaaaaagccaagactaccaacagtagtaagactgatttttttactaaatacttcatatcctaatttgtttattaaacctattctgattaaacgtagaatatgcctaaaaattgctctattttgaaatattaacatccactttataggtattacatttgttgatggcataatccacaaatgctttaccgtagccgtgtccttgctcttcgggcagtacgaacaacatttccagcatattatcgcttaatcccataaatgcggcaatccttccgttctcattgcgtatgacaaacagtttgaccgccaggaaatattggtctctcactaagggtttgaagtattcgatatcttcttccttcagaaaatgatgagaactacgtactgatttttcccatacgatcaataattcatctaaaatttcgtctgataaggattgcaatttttctattt

SEQ ID NO: 6042 - DNA, 1708 bp, Unknown
  gut microbiota DNA sequence
aatttaatatttaaaagaatatgaaaagaaaattaatttttggaagttgcatatgtattatgttaacaattttcaatttcataaacatgttaaatgtagataactcaaaattagaacttctcttcgataaagtagaagcatttgcagcaggagagactttacctcctgttgacgttaattgtagcggcaaaggatggggacgttgttatgaaccaataggttctgcccactattggtggtgtaaagagacaggttttctaagtgattattgcgataaacctttcgattatatgtaaaatgaaaaaggaatttgttttcatcatgtttcaacaaaatttgaaaacaaattcctcaaattatttatttaataactaccattgaaatgaaaaataccattcttatattagttctctgcctatttatcggcagctgtaaagactcactcaccgttaacgaagaagtagatactatcaccgcttctatcgaacaggaagacgagatatccctgttcgatttcgtttcccaggtccgtctgattcctttggaaacgacagattcttcattagtcgcccatattactaaaattattacctctaaagacaagatttttatttacgatcgtatccagaatcaaattttcattttcaaccgagaaggacagtttatttctaaaataaaccgaaaagggagaggacccgaagaatatatgtctatttcagatttagccataaatcctttcaacggatgcctggagatactcgatccctggggaaaactgcttgcttttgatttaaacggtaaatatctccattctttcaggttacccaaagacctgcatgcatacgatgaattcattcctttgagccgagacagtattgccttttatagtctatcagaaccttctacattaaatatttattcccggactacttcaaaaatcgtttacagtggttttaaaagttcaaaaaaattatccataaactcgcccttgagcagtttttaccgtttccgagacaccgtatatttttcccgttatttatacgatgatgtattcgccattaccccgacaaacatagctcctgcctatcgatggtttttcccgggacacaaatacgacccgaacgaagtgattcccgaatacgaccgaaataatagaaaagattattttgccatacaggaattactcccctatacgcatgtcaataacctggaaaccgatttataccgttatacttgtctctctatccgatccggcaaaaaatatgtaaatgttctacacaataaaaagacacagcggaatattgtatttcacaaaaccaaagaaggagtcatcttcactccctatgttctaaacgattccattgctctcggtcccatcgaaccctggagaaaaaaagaagaatatctgaatgaacaagtactcgacgacgaaaacaatcaaatattaaatcagctgacagaagatagtaatcctattctaatcgaatatattttaaaaaaggaatagttatgaaaatgaaatatattattattcccacaatcgttttcaacttagtatgtttatccatatttatatctcgacaatataagaaatatcatactcggaaatccaattatatacactatattgaaacaatcaaagcaaaaataatcaaagaaatagaaaatacccccttctatattccgttaataaatgtttaaactatag

SEQ ID NO: 6043 - DNA, 25920 bp, Unknown
  gut microbiota DNA sequence
aagctagctgccttttgtggctttcatgaaccgatcctcgacgaccgtttaaaagaacttaacttcggggagtgggaaatgaagaaatgggacgatctcaccgacccccgtcttgaactttggtataaggactggattcatctcccggcaggaggaggggaaagctatgaaaatcagtgccgccgtgtcgctcaatttctggatgaactccgccattccggccataccgatgcctgtattttcacccaccggggagtcatcgcctgcgctatggtctacgcaggcatttgcccgatcgaagaatcattcagtatagaggtggactatggcagcaaaaatgtgttggaattctgaaactgtattattccagtaatgaattcagatacgcttcatccacttcctgtatcataacttctttaccactcaaaatattgtcgaataaaatattctaacaattaaaataacaaacccgataacttgacgaatcaaggattaccgggacactgaggttaactatctgttgatcactttgtataaacacaaagtttgctatttttcccgccaaatggggagagattgccaatacttagggaatcccatatctttgaggtcgagcaaacggcaatcggatttgagcaactctttgatattctttttgaagtcgctacctggactgataatatcaagtatatacgcgatacaagacagcacggcaaataatttgtttgtgcgtatttgtccgattgtagttctatccataaagggataaagagtattgtatggcaggattacactgaccataaaacgacgattccacactcggctgtggtgagcgcaacagttacggagattggaaatggagtgtagccaattttccaagattgccactttcttcaaaccgaattgttcggtaatgtactctttacgactgtctaaccttaaggattggaacaaacggctcaatgtggcaaacgacacaacttcgagtgccatccaactcggcggcatcgaaggattgtcgtatttggagttgtaatgcttgatgaaatcttcattgctgcgatttacatcagcatcaatacgatccatcaaatcatcatagccgaaacgatataaactttcatcattgaaccaatggctatcgcctgtgctttcggcatatacctgtacaatttttgtgcgcactgccacttctatcttctcaatagtattgaaaataagtgaacgcagtctgcggtcgaaacaataaaggtcaatgatgtccttgaagtgaatatctttgcgagtgaaggtgtgttcggaatcttcgccgttctcttggaacggataagtgtatgcacgaagccgatagtagctgatattgaaaagataagcagttgcctcgctttcatcatcaaaaacaagcccccgttgttttagccgtgcgacttgctcggcgagagtcaacggcttctttgtataatcaattttatcagtcaattctattgaaactaccatataaaaactcgaagacctccccgggtgcgctgttcaacgggaagcgtgggaggtcatatcaattgcaaaggtaatacttttatttgaaatagcaaaggtaaaggcaaaaacaacaaactaagtcaaatttcatttttgatatacttccatttatttctccaggatgacttttcagccaccttcttctgttctacctggcaggccgcccctattttttcaattcaggccggatcctttccaaccaattatctaccctatcttctgttttatcagcctcataatcctcatccagcggtaaaccgataaatttaccttcctgtaaagcacgcgaatcgttaaagatataatcgcgggtctctgtttctccgatcagttgtccgccgatttccccgatcgtctggcccaatatgcccattccgtctacaaaattattcggataactgacatgatcccccaacccgacgatagcaacctttcgaccttccaaacgaatccggagcattttgggtaaaaatgacgaccagggatctttttgttccatttcccaggtattccggcctaaagtcgaacagaccaggatcagattgtgataatccagtaatcgcagtggagtgacatcagaaataacaaagagatccggttgcagatctaccagtttttgtttgatcagacgggccactttatgaacgctgcctcccgaaggtgcataaaatattcctaatcgttttgtagccttatgctctttatctatcaaataattcccttccagatcagctttcagctgataattccctggttgattttcctttttcatggatcgcataatttaatgtcaaacctatatgatatctaacctatatacggcaaaggaacgggacggtttgtttttgttaaaaaaattttctctgcgctttatttttgtttaaataaccatttatcgtcttgaatctgaagttcataaattttgtcattacctccgtcagtagtcgaatcggcatcggcatcctctgttttagctttgtgtctcagatcatccaaggccgatttatagcgggatttttcctctgtggtcagcgaaggcatatcattgatccggtcagaaataaactgcatcagtttttcattgttgcaaatattcagattacaggctaatccggcttcccgtatggtttcattaaactgaagtaacatctgatccaccctctttttatccgctttccaatatcctttcctgaccgtctcgagcagacgggcaagtatcgactgataggcatataaattgccgctcttcttaaaccgttcttttatatccagtcgatatttatccatgacataagtatcatagatttgattccagtcgttatcgctaaccgattccggtaatgtggcctcccagccccaaagattaaaaaccattttattgataaaacgggcaccggcatatccctcgtccaccatcgcatccacccatttgggattcagataacgggtcttcagttcacgtcccagaaatttctcgagtgtctcttgtcccggagccgaaggatcgaccagattcgtcagcatgaccaccggtgatttcccgtcgatcgtccgaacggccaaaccggtagcaccgaggtactgaaacatatcgtcattatccagcaaagcatacagattcgaagtcctgctgtgtaaagccaccctggtgcccgacaaagcatttttaaatacagttttcgaaaagcctttcggtaaataggtatattcgtcctctactttcgttccccaaaatccctggccatacaaatgactcatcttgtcaaaataaacttccgccacgtccttttcatcctcccaggttcccgaagcctgcaccgtcccactaaccccggtgccataagcacccgaaggggtcgtaaacaaacgtaccgaagcgatgcgccgggccagcgaatcttcctgaacccccagttgtttcaacttatcttcagattcaaggatatgttcccggacaaaattatctttttcatcggcacttctggccaggctgactgccttatccagcagagccatcaattcgggaaaaatatccctgtataatcccgatggagcaaaaacgacatctactctcggacgtttcaactcatgctgcggaatcaattccagaccgacaacctgattggaagcattataaacaggtctcacaccaagtaagcttaaagcctgggcttccatcgtaccttcattccggatacactccaccgcccacaaatttatggtcactttaggaggacactccccgttgtgttcggccttatactgttctatcagctcctctgccaattgctctcccaaccgacaagtcattctggaaggaatcagtctcggatcgaaagcaaaaaagtttttacctgtaggcagagcacccggattccggatcgggtcgtttcctgttcctgcccggacatactttccattcaaagcccggataaaagcatccaattcttctttccccgattttgcgatattcttttgtacctgctccctgaaaagttccaaatcttttcccatcaaatccttttgcattgatacaatagcttccgttgtcgctttcgtataagcctcatcaggggatacaccgaaagtgtgcaagccgaaaggggttttattttcttctatctctttcagataatcgtcgatatcttccagattctgatccgttatggtatccagcttcaaatccttatccagtccgagtgtttttatccgaagaaccagatccctgaattgcgccatcgacgagatcgggcttttgcttttttgatcatagtatttagatatgccacttttcaaatcccgcaattccggatttaaagaagccttatcgaaaggaggagtcatgtggtcgataatcacggcctgtccccttcttttcgcctgcaggccttcacccacattatccacaatatacggataaatattaggtacatccatgatcagcgcttcgggataatcatcgggaccgagtccggcttcttttccgggcaaccactcatgcgtgccgtgagtaccgatatgcaccagtgcatctgcgtgaaagccatacttcaaaaaaagataataagccagatactgatgagggggaggaaccagaggatcgtgatataaactcttcgcattgtcttcccatccccggggaggttgaggtgtcagtatgatatttccgtatttcaccaccgggatcacaaaataagatttcccggaagaatctttccaaaccatcagttcagactcttcgggttttccccatttgttctccatttccgtcctaatcttcaacgataacttatcgtaccattctttgtacacttccatcggtaccaatacaggatctcctttacgcaccaatttatccacctctgcaggagcccaggaaccgatattccttccatagtccatcacccggttaaaaatagcagcactgtcgatcggctgcccgccggtatcatacccctcctgccgcattctctgtaggatagataaaatacttcggggaagtacattcaggtagctggcccctatgttttcttttccgggaggatagctgtagtaaatcagggccactttcttttcacgattaggctttgtctgcaggttatggatattctttatacgcccgagcagcgtttccatctgataaccgatcatattcttaatccggatattatgatcgaaatcgtcgaatacgacagcaacagaaggttcgatataaccggctaattcgggtatagccaccaaattcgaccgattgtaaatatctattccgactaaagatttttcccaatctttttgattcgtactcagtataatcccattgatcaccggcactcctaatttttccagtaccaccctttcctgctcaggccttgtattataccaacatcccagattcaagagggcactcacgcggggaagactatcacaggaaataaaaaaccgttcgatcacctgttcttcgtgatgtcccggtttttgagaggtgaacacgggtaatacattaaaacctttctcttcgatattccggataaatacatcgatatacaaatactgcgatttggtcagatcgcttctcccaataatcaatccgatccagggagcctgggtgtcgatatcggttctctcggctaaataagaaccgatataggtatgtaattttttatttctatagttatatattccggaaaggggagtttcttcaatatcctgatattcacaatcgaaatgtaaatctttattcagttttttcagaacgatattcatgatattgttttctcctccgcttttaaaagcggccaatgtccagggatcgaaacagatcccccattcctgcaattcggcatcgtattcatgggataaattaagcgcataaaccttcgctccgcgtttcaaagcagacaacagctgaggtttagctttaaaaaccaacccattattatgcaaagcgacgaatatcagatcggaattttcaaaaaaatccatatcactttcgtgatagttggaatagataaattccttgaactgacatttctccgctacctccggatgcattttcgccagtaaatgcatgctccggtttacgccgacccaaaaaccgtcatcgataagaaaactgactttgttttgggctgtcaaagatagcccaaaacaaagtgacaaaataacaaaataatacttaatccctttcataccccattatatatccgccatcagcaacaaatacatgtcttcagatcaaaaagtcatagcagctcttacctgaaaattccgcccaggcatattataaccatccttttcggtataattttcatcgaataagttgttaatattcaaaccgaccgacacattctttataagcgggcaagaggccgaaaaatcgaacaccataaattgcggatgcttaatcagtttatcagttaaatacccgggttggctttcacttaacaaatcgttcaatgtcggacgatatttatcaccgataaagtttttctcgatgcgatgtccggcaaaacgtccgttcagccgcgcactgaatcctttctgatgcaagaaatcgagtccgaaattggcattctgtttccgaacggataatgttttgttccatactcctttagtctgatcctgataggtaaacatccaggtcagatttccataaagcttcaaagcaaagtcactatcgaacagacggccgaagtcataagaagccataatttccattccacttttttttgctttatcggcattcttgaacgttttgtacttttgtccgctttcttcatcggtccatgcctcttccacaatcagatcatcattccacgtataaaaataagtaaaatcaaaatttacccccaattccggccggctgaatgtcaaaccggcatccaacgtacgggatttttcaggatccagatcaggatttcctacggtaagcgtaccgctgtacaaaaattctccggctttctgataagcatcggtcatgctgaaagctgtaccgaaactggcatggacggccataccgccgtatatattgtattttgcaccgatattgggattgaaagtgttgtaactttccgctttctcttcattctccaaaccaggtgttttccgaagtttaaaatcgatataatcatagcgcaatccgaccgacaagtccaatttttctttaaataatttcaagttactctgcaggaatatcccccaagccgtattccggaaacggggttgataaggtgctttaatctcaccacgcgctttaaaactggttatctcactgacttcattattgttatcgaatccgaaagcaattctttgtttgcctaaaatcagattatcgtgtgctgtaaatccataagtattcagttcgttacccgaatacacataagccgtatcggtgtctgccgtataagtatcggtcttagctgtagagtaatgaggagcgaaaaacaaattatgattattcacttttccgttgagttccaatttttcggtataccgggtgacatctttctttttcaatccgttagtcccccagacatttcctcccgtcggcagatccttacccacaaaaagaatctcggtaaaattcaaagaccagttttccccgaaatcataaccgatacggcctttcccggcgataccgctatgccgagagccattcattttaataccataagtatctttaccgaggatagctttatccgttgccgacatatgcaagagattatggtctccgatcttatagtttcgtgcctgagcagtataatcgaaagaggcatcgaaagaaagcccccggtagatccgtccaccgacatgaaaagcccctttggaagtttgataacttccggctgcaactttgattcctccggtgagtttatccttattccgtttggtgacgatgttcaccactccacccatcgcatccgaaccatacatggcggagaaagggcctttcagaacttccacctgctctacatcgcctaaagaaagtgtcgccatattggtagtaccggccggtactccatcgatcaggactgtcgtgtattttccttctgtcggtttgaatccccggatactgaaataagaattatatcccggatattcaatcacatccacattaacaaaatttttcaacaggtccgtcagattattgatccccgaagcttcgatctgccgcttggtcaccacctctacccggttcggaagatctttcaataaagctccggttttagtcgcatggatcatcacctcctccaaatctatccgacgcatggaatcggtttctacagttacaggttgctctgcatacatgcccatacagaacgtaagggcaagagaagttaaaataaatttccttttcatcttgaatttgttttacaccgatataaattattatttgttaattacatacaagtttattcgttgtaacagcggcaaagccactcccaacaaagtgaaagtttcctctcaaaaaacttgcataaattcaccccattcatgtgccaccggcgcttctccgtttaccggaaacattttgcataattctaaattcacctgaaaagaaatcatattgcagaatcctgactggaaattgttttccggcataatccctgccgtaaagcacaccctttgcaaaataaaatcaagtccgaatcgagcaaccttaatccccgaaggtttatcaatcatacatcatttcggcaggtcttctgacttactccaatcttcaaacgcccttcccattctttccagaacagtggctaaagtattgttgaagattttagcagagcttacagcagcgggtctgtccaggattctcacctgattcccttttcatcacttttccgtagcagcagaatcgtgacaccaaaatcggatgcaaagatattgatttttttattttaagaagatacttttacgatattttccaatttttcagacagactgcgaccatattcttacaggagatctgtatttccagccaccggggagccattgactgtagcatggtctatgcgagattttgttccgttaacgattctttcaggggctatcatggcgaagtttatcaatccttttacagatgtcggattcaaaatcattttcggacaggaaatgacaaaggacctgctgatcgactttctgaacgatctgttggtaggtgaacggcatattcaggatcggtgtgttcttcatgaatttccgtctggatgattctccgggcaaactgcatacggacatcgtactctccgaccgtgatacacacgaggtattttcggataagctacgctttattttcatcgaacttccggcttttacgaaggaagaagaagaatgtataactgattttgaacgctggatttatgtattaaagaatatggaaacactaaaccgattaccgtttaaggcccgcaaagcggtgttcgaaaaactggaaaaaatcatcgactcgcatcactgacaaaagaagaacgcgaaaagtacgacgaaagtatcaaggtctatcgcgaccagttagtgacaatcgctttcgccaaagaaaaaggaatagaggagggaatggagaaaggccggaaagaaggcgaaaaaaaagaaacagctggaaatcgcccgtaatatgaaagcaaaaggttttgctgcagaagatatcagtgagctgaccggccttcccgtcaaagaaattaaagaactttaaattgttgttttccgactgaataaatcaattcagaaaaccgcattttatttatatctttctttcaacccttcccttatccggtgcggaagtgtcccctttgcgggatgctaccgctaaaaggattcccaataccactcccaacaaggcagcacacaatacccgcatattgccgggcaacagaaaagtgatggtatgagccgggaaccagaagaaagggatggttttcttaaagacaaatccccacaacaccttccaattcaaactgctcatgatccctcccatatccagtggtgtgaagaaaccacggagtgtaccgccgtgcatcagaatatgggtatccgtaattttatgcagcgtcataaataccggagcgaaaatggtattcatactcaccgacacggcaaaagccacccctactttagcccagcacaatcccggtgcatgaaaaaccgccggagcctcctgcatgccaaggtattgcaaaaatgccggagtaccattcgaaaaaataaccatcgccatattaatgcccatccccaatatcccccatacaaacatccggggcaaaaccccgaatcctttccggcaatacacgccggcactaatccgcaagccgatcatctctcccaaagtcgacaagacggcaaatttcaggaaactcatgatcatgccatgagccgcattaaaagcatgataccattcgtaaacaggccggcagataaaaaagggtagcagcaaaaccgctacccccagtataaaaataaagtcttgttttttcatttttcaatccggatacgggcatccaccgccaccacattttctttattaccgagtaatggattcaggtccatctcaaaaatttcaggagccactttcactaacatggacaccctcgacacggcttcggcgaatttttgttcgttcaccggttcttgtccccgtactccctgaatgattttatacgatttcaagctacggatcatatccaaagcttccggttgggcaatcggagccaagcctgctttcacatctttcaaaacctcgataaagatacctcctaatccgcacaacaccatatgtccgaatttatcttcccgtttagccccgataaacacttcggtcccggacaactgctgagccagcatgacggcatgcgtatctttgatctgcatcatccgacggaattcgctgcgtaccgtcgcttcgtcccttacgttgagggttaccccaccgacatcggatttatggacaggtcctactactttcatcactaacgggaaaccgatctgacgggccagaccgacaatttcttcctctttatcggccacaccttctttcgcccgggcaataccggcagcatccagcaattcatggatctgttcaggtgacagatagccgttttcagcctgatcgacgactgcccggatccgtttccggtctacttccggcaattcgggctcggcaggttgtggagcaggggtacggtatattttacacaaagcattaccaaaattcacttcataagggaagtaaacgccacctttccgtacaaactcgtcgatttcctctttcaccaccatcgaagaggggaatatgggataaatcggtttcggggaagtagctattttttcacgcaatacttcatatacatcgaaaacggggaaaagcccgggactaccgaagatcactgcaataccgtcgatattatcgaaatcgcgattacaggcatccaggataattcccaattgttcggctgttcccgtcgctaaaaagtcaatgggattacctacagaagatccgttaaacaactgtgccagcaatgcttcagccttcggcccttccaaatgaggaatttccattcctccatccgacaaggcatctgtcagcattacggccggtcctccggcatgggttacgatagccatattctttcccctcaattcgggatagttaaaaatagctgccaccgtggccagttcatcccgcccgttacaccgtacgataccggctttccggaataaagcttccacggcaacatccgagctggccaaagctccggtatgcgacgaagcggcacggcttccggcagcggaaccgcctgatttgatcgcagcgatacgacaacctttccggatcagtgaggaagcatgcttcaataatttttccggtttatcgatactctctacatacatcaatttaatccgtgaacttgtctcgggatcgaaagattcgtcccaatattccaggacctcttccacgcctaactgggcagaattaccgactgaaaatacactcgaaaattttacacctttctgcataccggcatccataatgaaaagtgccgttgctcccgagcccgatacgaaatctactcctttcggatccaatttcggtataggggtcgtgaataccccattgtagttcgttgtcaatacgccgatacaattcgggccgatcaaagctcccccgacagaatcgatcgtttctacaatttgtttttccaatgctttcccttctgcattctcttcactaaatccggcagacagaatgataaatgcccgggtatttttttgtttcgccagcatctctaccgtcgacggacagaatttggcagcgatggccaggatagcgcaatccacttccggcaaatctttcacgtcccggtaggatttgataccttgtacttcatccattttcggattcaccacatataaactccctttaaaatgtccatcgatcaaattcttcaataccttaccacccggtttctgaatatcgtccgatcctccaaccaccacaatgctggaaggatttagcaattgtttattaatcatatcttccgaattttactataaaattcactattcaattttatcaattatatattattgaaaaacttcaaaaattcccctactttagtgaccatattttttgagccggtataaaaaggtatccgttggtggatattttcaggggtcatgtccaatatccggtttccgccatccgtagccaatcctccggcttgctcggcaataaacgcaatcggattacattcgtacaacagacgcagttttcctgtcggatggctattggtttcgggataaataaaaatacctcccttcaataaattccggtggaaatcggccaccagagaaccgatataacgcgaagtataaggacgcttggttttcttatcggtttcctggcaatactttatatattttttcactcccaccggaaatttctcataatttccttcgtttatagaataaataaaaccattttccggtgttttaatattcggatgtgaaagacagaactccccgatagaagggtccagcgtaaaaccgttcactccgttgccggccgtatataccaacatcgtagaagagccataaataacgtaaccggcagcaacctggtcacaaccttgctgtaaaaagtcatcgatattcgcaacttcgcccagcggagatttgcggcggtaaacagaaaaaatagtaccgatagagacattcacgtcgatattcgaagagccatccagcggatccatacaaaagatatatttcgcatcacggctcaatccatcgtcaaaaacaatgatatcctgattttcttctgaagcaacaccgcaacattcaccactggctttcagttccgacaaaaaagtctcattggcataaatgtccagtttttgctggtcttcaccttgtacattctcggagccggcacgccccagaatatccactaaaccagccttattcacctcccggttgacttttttggctgcaatacctacgtgatgtaacaaacaagaaaaaccccctgttgcctgaggtactcctgcctgctgttcgataataaactgatttaaggttgtaactttattcattgattctgattctatttgttattagatgcaaatataaaatgataaatcgtaatacacaaacgttttcatgaaattagtattccctcagaatcacagattttttgaaaatcaaataagttttcattcaatccgaattgattccacattattattcaattttaatatctaaattagcgccatgaattaattatcgtgtttaaatttaaacgcaatgaacgtatataagtttggtggcgcttccgttaaagatgccgaaggtgtaaaaaatttatttaaaatcatcaatacccagcgggaaaatttaatcattgtcgtatcggcgatgggaaaaatgaccgatgccctggaagttttgtgtaattcttatttcgggaaaaccggtaatattgcagaggtttttcagcgcattcaagatttccatcagcagattatccgggatcttttcggttctgccgacagtgaagtaaatgcccgggtagaagccctgtatcaggaattggacactatcctaaaaagtgatccttccctctgttacgattatgaatacgaccggatcatctgtttcggtgaattgctctcgacaacaatcattgcctcctatctcgagaaacaagggcgaaaagccaagtttaccgatatccgtaaatgtctgattaccgaccaaaactaccggaatgcttgtgtaaatatcgaattatcggctcagttgtgccggaagacattcaattttcaggatacatttatgtatatcacgcagggattcattgccggaacgacgaccaatcaaacgaccactctgggacgtgaaggttcggactataccgcagcccttttggccaatttgctggatgccgaagatgttaccatttggaaagacgtgcccggtattatgaatgccgatcccaaaatatatgaaaatacagaaattatcagtaagctatcctataaagaagcgatcgaactatcgaactgcggagcgaaagtaattcatccgaaaaccatcaaaccgttgcaaaataaagggattccgttattcgtaagatctttcctttacccggaaagtcatggttcggtgatccgggaattggacgagaaattgaaattacctccgatttatatcaataaaggagatcagttattactgactctttccccccgggatttttcttttatagcagaagaaaaactgagccgtattttcgctacgttagccaaatacagactccgccttaacctgatgcaaaattcagcaatcacattctctttttgcatcgactataatgaagcgatttttgaaagtttcatcgatgaactccatgacgaatacgaagtactctacaacaaaaatgtgcgcttgctgacgattcgccattacaatgaagacatcatccaacagctgaccagccataaaaatgtgttggtagaacaacgcagccgtttaacagcccgttttgtcgtagccgacaattaaaacgatcctgccaatgaaaaaactatctatcatcatacctgcttataatgaggaacgttcgatttcccaaattctcggaaaaatacaccagacccgattgattggagaaacagaaaaagagatcctcattatcgacgacggttcaaaagacagtacagctgaaaaatgccggcaattcatgcaggcccaccccgatctggatatacattatcacctccagcctttcaatcaggggaaaggagcagcgttgagaacaggcatagcattagcgacaggagattggatcatcattcaggatgcagacctggaatatgaccccgaagattataatcctttattacagtgggtgatcgaaaacaatgccaaagtagtctatggttcccgtttcctgaaaccttcgaacaaacattcttacctgcgtttttatttaggcgggagattagtcacttttgtcacgaatctcttatacggccaacatctgacagacgaaccgacctgttataaattcttcgatgcacaatttttaaaatccattccattaaaatgccagggctttgaattttgtccggaagtaacggcaaaagtttgtaagaaaggaatcaaaatccacgaaataccgatcaattactacccgcgtagcatcgccgaagggaaaaaaataaattggaaagatggcctggaagccatctggactctgttaaaatatcgttttaaaaactaacaggatggagaaaaaaacaaattattcaattcagacgttactagagagccgttcctttttatatgtcttattactcatcgttacgatctgttttgtgagtacctacactaagatttacgatgtaaaactggatatgaacggagataatatccattattatgctttgggaaaagcgctggcagaaggcaaaggatttaccaataccatttctttttccgaaactccacatactcatttcccaccgggatatccggtttttgtcgccggagtgatgaaattctttccggataatatcaatgccgtaaagatagcaaacggtatcttgctctatgccgctatcttgctgcttttctttttattgaaaaaaatatcgggaagtatcatcgttgctttcctgacttgtgtattttgttctattcatgcagagatattgcggtatgccacgatcatgatgagtgaaatgcttttcctgttttgtagcgtggcagcaatcttcctgatgctaagcataaaaccggaacaactttttaccaaaaaaggggtacgggatacgatcttactcgttcttcttctgttcctggtcaactatatctattttgtccggactatgggcacttcgctcattctggcaattatcatttatagcggtatactctttctcaaaccgtgttatgccctgtacaaaaatagaaaagccctggaagaatccccgtcccggaaaatttctttccaacagctactgagatacggattattgttcgtattactcgccggttcgttctggggtacgaaaacggcctgggacatacggaacaaaaacgtcggcaaaacaagcaacgattacatcagtgactttatgaaaaaaccgaatggacaaacgatggccaattgggacgactggaaaaaccggattaccgataatttcggatcctatctgaacaaatggctgcccaacgccattttgaataccccctataatctgaatgccaaatcttccgggggagaaattttccgggggatgctgatcgcatttctgatcattttcggtctcatcaaattgcccaaaggcggattgctcctgtttctctatttgggtgcaaccatggcagtcctgctcgtgtggccggaacaatacggcggtcttcgctatttcatcgccgctattccttttttcatcttcctgtttttctacggtataaatgcggtgattctttatccgggtaaacgccggagaaaaaatattccggtattcttaccggctgcctgcatgattatctttgccctgattttcatgtttcctgcctattcccaggctttggtcgaaaaaaagcagctggcgaaatacaaaacctggagtcctgaaattgccggaaatgcttttgcagaatttacggctgccatgcaatggtgcgggaaaaatcttcccgatagcgcacgggtgatttgccggaaaccggaaatattctttatgtactcgggagggaaaaaatgcggtagtttttcccaatacggaaaaccggaagatatcctgcaacagctgatcggtcaaaaagccacccatgtcatcatcgaccattggtttcggcatgcctactatacgttgtatccgctgatctcgacacattatccggaaaaattcaaattcgtcggtaagtttgaaagccggggagcccaacaggaacccccgaccctcattttcgaatttcatcccgactggactaagcctgagacaaatgcacaataattttatctgattataaaagagaactgtatcaatttccattcaaaaatgatatatttgcactttgtttttataaaagtgcacaacaaggtgtgtcatttactattgcaaatataaaaatcacctataatgaacgagaaatttcctgaatacaaaggcctggatctttctgaggtaaacaaagagatattaaaaacctgggaagaaaacaagactttcgaaatgagtttgaagacacgggaaggtcacccttcattcgttttctatgaaggtcctccttcagcgaacggcatgcccggaatccatcatgtgatggccagaaccattaaggatgtcatttgccgttataaaactctgcaaggatttttagtagaacgtaaagcaggctgggatacgcatggtctccctgtagaactcggtgtagaaaaaaaattaggaatcaccaaagaggctatcggtaaaacgatcagcgtcgtggaatataacaaagaatgtcgtgcagatgtcatgaaattcactaaagaatgggaagatctgacaaagcaaatgggatattgggtagacatgaaaaatccctatatcacttatgacaaccgatatatcgaaacgttatggtatctattgaagaaattgtatgaaaaaggatttctttataaaggttataccatacagccttattctccggctgcgggtaccggtctgagtacacacgaactgaaccaaccgggatgttaccgggatgtaaaggatacgacttgtgtcgcccaattcaaggtaatccgggacgaaaaatccgaaaagctgtttgctgacagcgaaccggtatatattctggcgtggacaactacaccctggactttgccttccaataccgccctggctgtaggacccaatatcacttattatgtcgtaaagacttataatccttatacctatcttccggtgaccgtcattttggccaaagaccggttcagtgcctatttcaatcccaaagccgaaagtttggccctggaagattatcaggcaggagacaaattgattccctatcggaaagtcggggaattcaaaggtccggaactcgaaggtatccgttatgaacagctgatgccctggatgcgtcccgaaggagatgcgttccgggtaatcctcggggattatgtgagtacagaagacggaaccggcatcgtacatatcgctccgactttcggtgccgacgacgaccgggttgccaaacaagccggaatcgctccgatgttattggtcgacaaagacggtaataaacaaccgatggtcgataaacgcggacgtcttttcgttttggaagaaatcgatcccgaatttgtaaagagccatgtcaataccgaactttacagtgaatatgccggccggtttgtcaaaaacgcttatgaccctcaactgactgaagaagatgccaccctcgacatcgacctgtccgtcatgctgaaaaaagaaaataaagcattcaaggtcgagaaacacgaacacaattatccgcattgctggcgtaccgataaaccggtattgtactatcctttggattcgtggtttatcaaaactaccgctgtacgtgaacggatgatcgagctcaacaagactatcaactggaaaccggccagtacgggcgaaggacggtttgggaagtggctggaaaatctggttgactggaacctttcgcgttcacgttactggggcactccgctccccatctggataagtgaagacggcacagaaaaaaaatgtatcggttcggtagcagaactagtcgaagagatcgaaaaatcgatccaggccggctttatgcaggaaaatccttatcagggatttattgccggtgattattctaaagagaattacgataaaatagatttgcatcgtccttatgtcgacgacatcattttggtgtcagacagcggacaaaaaatgtaccgggaaaaagatctgatcgacgtgtggttcgactcaggcgctatgccctatgctcagcttcattatccattcgaacatcgcgaagatatcgatcagaaactgcgctttccggcagactttatcgccgaaggtgtcgatcagacccggggctggtttttcaccctgcatgccatcgcgacaatggctttcgactcggttgccttcaagaacatcatttccaacgggctggtattagatgccaagggcaataaaatgtccaaacggctcgggaatgcagtagatcctttttctacgatagccacttatggatcggacccattgcgttggtatatgattactaactcgcagccctgggataacctgaagttcgacatggcaggtatcgacgaggtgaaacgtaaatttttcggaaccctctacaatacctacggtttcttcgctttgtatgccaatgtagaccatttccgctatgcagaggcagaagtcgctattgaagaacgtcccgagatcgatcgttggattctgtctttactgaattctctgatcaaggaagtgaccgaagcttacgaaaaatacgaaccgaccagggcaggccgggctattcaggatttcgttatcgaaaatctgtccaactggtatgtacgtttatcccggaaaagatattggggaggtgaatactcccaggataagatttccgcttatcagacgttatatacttgtctggaaacgatcgctattctttcggctccgatcgctccgttctatatggaaaaactattcggtgacctgaataaagtgaccggacggcacagcggaagcgtacatttagccgatttcccgaaagccgacgaaaaattgatcgataatgaactcgaagagagaatggaacttgcccaacaaatctcttctatggtactgggcttgaggagaaaagttcaacttcgcgtgcgccaaccgctaagcaaactcatcataccgattctgaacgatcatatgatccggcaactggacgctgtgaaaaatattatcctctcggaagtcaatgttaaggaaatcgaatacatcaccgatacgacaggtgttttagtcaagaaaatcaaaccgaatttcaagactttgggaccgaaatacggtaaatatatgaagcaaatttccactttgatcgccgcaatggaacaaagtgatattttcgagttcgagaaaaatggccgctatcaactgaatatcggtaccgaaccgatcgatttgagcctggaagatgtcgaaatattgtcggaagatatcccgggttggttagtcgccaacgaaggacgcctgacggtagctttagatatcaacgtaaccaaagaattgaaagaagaaggaattgcccgggaattgatcaaccggattcagaatcttcggaaagaaagtaattttgatgttacggataaaatcacgttagctatcggccggcacaaagagataaacgaagctgtcgaaaatttctcgcaatacattgccagtcaggtattagccgagcacatcgaactaacggacgagaaggatgataaagccagggatatcgagatcgacgacattcacacctttatcaaaattgaaagaataaactgaatgccgaaaccggcgaacaatcccgccggtatttcgtatgaagaaacatctgtaaaattttcaaatgttgatgttttttattaatttagacaaaaacttataagctatggcagagaagacgagatattcggatgaagagttgcaggaatttaaggaattaattctggagaaactcgataaagcaagaaaagattatgacttgctgaaaggtgtcatctcgggaagtgacgggaacgacattgcggacacttgtcctacattcaaggtactggaagaaggagcctctgttctttctaaagaagaggccggccgtttagctcagagacaggctaagtttatcgcccatttggaagcagccttaattcggatcgaaaataaaacgtatggtatttgccgggtaacaggtaagctgatttcgaaagaaagattacgtgctgttcctcatgccacgttaagcatcgaggccaaagaagggaaagagaactgatccagtccggtcagcggattttcaggtctgatcagcgggcccttcgaacactctgattggcaaacgacttccggttctgatcaataaatatgaatcagggtgttccggttatgccaatcagctttgttccagtcagtctttgaaaagaatctgattattttttctcttttatttaccgtttcggatttgcaattttaaactcttagttcttaattctaaactcctggttttcattatgagtgtgcggaataaactggtgattttcattatagtcttacttgttctggatcaagctgtaaaaatctggatcaaaacccatatgatgattggggaagaattcagtgtcttcggaaactggttcaaaattctttttattgaaaataacgggatggctttcggaatggaactgggagatgggaaattcggaaaggctgtgttgagtttattccgccttgtggctgttgccggtatcggttggtatatcttaaaacttatccgtgaaaaagcccctttaggcgtactgttttcttttgccttgattttttgcggggctatcggaaatatttttgacagtcttttctacggtatgatctttaacgacagtcactatcagattgccagcctattccctgaaggcggtggttactcttctttcctgcacggacgggttgtcgatatgttatattttcctttaatagaaggtacgatccccggttgggtacccgtttggggcggtgaagattttcttttcttccgtccggtattcaacctggccgattcatatatcacgatcggtgtgttgatgttaatccttttttaccggaaatttttcgctacgaaaaaataatttattttaaatcatttttcaaagcacactgaatctttgacttgccgtactgtcatgccggcgaactttataatgttttgccagaaaacagaatagcaaaaatcgaaaaatgacaccgctatgggacaagaaaaaacgaatagtactgtccgtatagatatgcttcacggcggaatcttccgcaaattactgctatttgccttgcctctgatcgccagcggtatcctgcaacaatcgttcaattcagtagatgttgctgttgtcggacaatttgccagcagtcaggctttggcggccgtcggtagcaatggattggtcatcagtttgattatcaatctttttatcggcatatcgataggcgctaatgtagtcatcgcccattatatcggacggcaagatgagaaaggcattaaaaatgctatctccacaacggctatcattgccgtaacaagcggcattttcctgctcattaccggtctgctgatagccaaacccattttggaagcgttagacacaccggaagacgtcatcgaccttgccgtactttatcttcgcatctattccttgggaatgcctttcatgatgatatacaatttcggggcggcgattctccggagcctcggcgataccaaacggccgttttacagtttggtggtggccggagccattaatgtgggactgaatctccttttggtcatcgaattcgaaatgagtgtggcaggtgtcgccgtcgcgaccgtgatttccaacatcgtcaatgccggtatcatcgtttttttcctgacccatgaaaagggcgtattccgcttggaactgaagcaattgtccatatccaaggcggaattgaagaaaatattacaaatcggagttcctgccggcatacagggaatggtattttccatttccaacgtctttgtactggccaccataaactcgttcggttcggcagccgtagcaggctcttcagcagccctcaattacgaatattactgttacttcgtagtgagtgcttttgcccaagcaaccgtagctttcaccagtcaaaattacggagccgggcaaattgaacgttgcaaaacaatcttccggcaaagcatgttgcccggacttttgggatgtgccgcattaaatctcctgattgtatggcaaaaagaatttttcatccgtttttttaccactgaacccgaaatcatccggtatgccgccatccgcatggaatatgtgttacttttccaattcatagcaagcagttatgaaatcagcggtgccgccctgcgaggcataggttattccatgaccccaaccgtactgaccatattcggcacctgcctgttgcgcttggtatggattttcacagttgtccccctgtcgaaaagttatgaaaccttactggctgtctatcctatttcctgggtgattaccggcatctctgtctgtacggcatacgccatcatccgtcgcaaggctttttctctggcagtcctccagcaacaaaaataatggtaggtataattttttctttctattccgattccgggttttatcccgtcagaccggttcgcccggaccggtccgctaaggctttccttcactgaccggcggaactcctcacaagctcgtcagacaccaccggtcgggcgttcggaaaacctaaccggatcctcgttcccgctccaatggtcttccggcataaaaccctgcatctcacggcagagctaaccggcaaagaaagtacaagcagaaatttacggcaataggaatccaaaccatccggattatttccaggaagaatgctatttctcaaatcaagattggtctgcaattcagtgataacgttaggcggcggtgatcgggattggcgaccattggagctctgtcgagtgtcgtcttgctttttctgaacgaccgaccggtggtgtctgacgaacggagtgaggagttccgccggtcagtgaaagaaaaaggtagacgaccgacagaagcgaccgggtcgccaattccgatcaccgaagacgaattagtaacaaaatatacctactatattagtaaaaagtgtgtaagattataaaaattctattgatagctatccctcacttggcctgctgcgccaaataagcctcatacatatccagcatccacgtgccgtcaccgtccgcatcggcctcttttttacgtgctttaccctctttgcccttaaaccagtttttactgaattccttcaaaccgggtttcttgtctttcagcaggacactattcaccaacattggaatatagacaatttctccctccttgccttcatcgtggaaacgaattccatgataggtaactaagcgtcgtttcattccctgctgattggttgtgacatcccagtctttccaccagtacacagaagcgtgctctcccgtattttccagacatacaaggcggcgtatcgtacggtaacgatcggcaatggaaggtgacgccaactcacgcgattcccagcggataccgtcaggattattctctgtcttttccgtataatcgatacatacgacttcatccgccgtatatttcaatacttccttatcatccggtgtcgcagtcattttgaaggaataattgctctttttgaaagcggaggcttcggcatgccagcccctcttcacatatccttccactttttcaccggatgtcaaggtcaccaccacacggcgaaactcctggtcttttactttctgcgcattcgcctgcggtatgtacacacacaaggccagtactactaaaaaaagatttttcataattgtatgtttaaaggttaatgtccgatatgatattcctgtaacatcaacacggttttatcacgccacgtatccaaactacggatgcgtctgcacaattccgcatcgtcagccacgtaacggcaaagccgttcccgaaaagcgtttcccgtccgcggcttcatttttccaggagaataatagagggtgtcacccgatttccgcagataataaatcacccgcgaacgactgaagacccctctccgttgccaaacctggattcctccgttagaagcgataccatagccccgtccggagtaaacgtaagcctcgatatgcggcgtagcaaaatactgccaacaccaaccgataccctctgccagtatgaatttccgccggaattccggtgtccggggatgccaacagacaattgaatcgatttcctccgccggataaacctctttctgtttgtccctggtgaaaatgccccggaatgctttaacatctttgccttttttgggaatacacacacgatgatcacccgaaaatccgacactttttccctccttgaaataaataataccctccaccggaacggctgcccgaacagagaaaactcccacgctccacacacaaatcaaaaacaattttatactcatttaattttttttgtgacaaaaatatggttaataaaataatttaactaactaa

SEQ ID NO: 6044 - DNA, 9834 bp, Unknown
  gut microbiota DNA sequence
tggacttcgtccctatcggctgttccggcagccgttaataacacgcctaaatatattctattacgataaaatgaaagatgctgtgattttaattttttttcgtaggtttgtagccgatttccaaaggttaatttcggtatgtaatgtacctgctattttgaaagtatatgattgagaatttagtgatagtggagtctccggcaaaagccaagaccatcgagaaatttttagggaatggttataccgtgaagtcgagtttcggacacatccgcgatttggaaaaaaaagatttaggagtagacatcgaacataattttcagcctaaatatgaaatatcttccgacaagaaaacaatcgtcaaagagctgaaaacactggccaaggaagcgaagaccgtatggctggcttccgatgaggaccgtgaaggagaagccattgcatggcatttattcgaggtgttgaaattaaaaccggagaacaccaagcgaatagtatttcatgagattaccaaagatgcgattctccatgcgattcaaaacccaagaaacattgacaaaaatctggtggatgcccaacaggcccggcgggtattggaccgtttggtcggattcgaaatgtcgccggtgttatggaaaaaggtaaagccttcactttctgccggccgggtgcaatccgttgccgtaaaactgatcgttgaacgcgaacgcgaaatcaatgctttcaaagaacaacaatattaccgggtttgcggaactttcgaaacccagcaacatgctcaattaaaagccgaagtacagacccgttttaccgataaagaaacgacacttacttatctggaagcctgtaaaacagctattttccatgtggatagtgtagagaccaagccgacgacccgcaagcctgctcccccgttcaccacttccacattacaacaggaagcttccagaaaactgggtttttcggtatcccagaccatgtcggtagcacaaaagctttatgaacacgggcttattacctatatgcgtaccgactcggtcaatctctccgatctggccatccggacagccaaagctgtcatttgcgaaacattgggagaaaaatattccaaaccacggaatttcgcgaccaagaccaaaggagcacaagaagcccacgaagctatccggcctacctatatgaacaaaacggccatagaaggcgaccggaacgagcaacaattatatgaactgatttataaaaggactctggcttcgcaaatggcggacgcccaactggaaaggaccaatatgatcatcggtttatccaaccattccatcccttttacggcaaccggtgaagtgattattttcgacggttttctgaaagtatacatggaatcacatgacgaagaaaccgatgatgaacaggccggtctattacctgctttagctccgggagaccagttacaacgtcagctcattacagctatagaacaatacacccttcatccgccgagatacaccgaagccagtctggtaaagaaaatggaagctttgggtatcggacgtccttctacctatgccccgacgatcacaaccatacaaaaccggggctacatcatcaaagaatcccgggaaggcgtcgagcgtaatatcgaacagatcgaactgaagggcaacgatattaaaatcaaacccaacaaaaagatattcggcgcagaaaagaaaaaacttttcccttccgatatgggtatggtagttactgattttctatcggagcatttcaccaatatcatggactataacttcaccgctgaagcggaagaagctctcgacgatattgccgaagggtctgtcgaatggcaaaagatgatcggagaattctatcatcctttccatgaaactgtcgaatctaccctcaaaaattcggaacggaatagcgggcaaagaattctaggtacggatccggtaagcggcgagacggtgagtgttcggatcggccggttcggtccgatggcacaaatcggggaaggagagcatgtacgttatgcaggccttttaaaaggacagctcatggaaaccatcaccctggaagaggccttgggtttattcaaatttccacgtaaaatcggccagtacgaagataaagacgtcagtatcgggatcggccggttcggaccttatatcaaacacaacaatgtgttcgtatctttgaaaaaaggagaagacgatccggggaccatcactctcgagacagccattcaacgtattgaagaaaaaagagaaagtgaccggaataaactgataaaagttttcgataatggagtgcaaatcctgaacggccgcttcggaccttacatttcttacaacaaagcgaactataaaatccctaaaacatgtaaagcagacgagcttacattagagaaatgtatggaattgatcgagaaagaaagtagcaagaaaaagacaggcggaagcagcaaaaaaacgcctgtccgaaaagcccaaacgaccacgaaaaagaaaaattaaaccatttcctttattaaaaggatgtgtgtcaggaaataaacctgaaataaagtgaggaaaagcgagcctgaaaatttgcacaacaatgcacttttatctatcttcgtagcctctaaaaataatgtaaaccgtaaaaaacattaaatttttaatataaatggcaacattacaaacaatcagaaatcgcggcggactacttgttagtattgtgatcggtctggccttgatagcattcattgtaggagatgcattaaattcaggttcaagaattttcaatagccaacggaatcagattggcgagatcgcaggagagggagtatctatcatagatttccaaaaccgcgtcagtaaaaatgaagaaatgatcaaagcgatgaacaatgtatcttcactgaatgaagaacagcagaccatgttgcgggaaaacacctggcagcaaatgatcatggaacaattgatgcaaagagaatatgatgaaatcggtatcgatgtcagtggtgatgaattgtacgatgcattactcggcgaaaatatgagcccggcattacgccagctttttacaaatccgaatacgggcgaaatcgattatgccggtgccagagattatgtaaaaaaagtaatctccgcgcccaataatattccgcagaaagcgtattggctgaacatggaaaaagaagtttccgacagccggaaaatggcgaaatacaatgcaattgtcgccaaagcgctgtatattacggatgcccaggcacaagaagcagcagccaacagtgctgataaagccgacatcagttatatcgtcaaaaactattctacaattgaagattctacgatcaacgtaagcaacggggagatcaaagaatattacaacaaacatcagaagagcttcgaacaaccggaatcgcggaaaattgtttacgtcaatttcgatatcgaaccttccggagaagatttctccgaaactgaaggggcggtgaacgacctggtaaaagaatttgaagaaagtgcagacccactggagtttgtaaacctctcttccgataaaaaagccgaccgaaactatttcaaacaagatgaaatagcaaacgatagtatggctcaattcctatttaataatgagaaagccgtattcggtccttatctggaaaataacgcctataaaatctccagagtagcttctgtcaaaatgttgcccgattctgtaagagcccgccacattctgatcgctcctcaaaatcaggattatgcacaagcaaaaaatatagcagacagcttagccggtctgttaagaaaaggagctgatttcgaagaattggctaaaaccaattccgtagaccaaaattcagcagtcaacggaggcgatctgggttggtttacgtcgagaacgatggtacagcctttcagcgattctgccttcttcgccaagaaaaacgatatcaaggtagtcttgacacaatatggcgcacatgtgctgcaggtaacggacatggctaaaccggtgaaaaaaatccagattgcaacggttgaaaaagaagtttctccatctgctaaaaccaccaatcagatttacaacgatgcacgcacttttgctattgaagtatccaatctcgacaactttaacaaaaaagtcgaagaaagcggtttaaccaaacgtatcgctaccatcggcaaaaacgataaaacaatcgccggtatggagagtgcccgtgaaatgatccgccaggcttatatggccgaagaggtggacgaagttttaaaaacaaacgacggttcgaccatctttgaaaacgggaacaaattcaccatcgccgtactgacagaaatcgacgaagaaggtatcgctccgctcaacaaggtagccggtaatatcaaacggatcctgatacagaagaagaaagccgatttgttgaaaaaagaactggcatcggctaagagcggtagtgaaagtttactttccattgcccggaaagccggtttggaagtcaaagaagccaacgaaatttcattcaattctttccaaattccgggagcaggaatcgaacctaaagtaatcgctgcttccagcataaccgaacaaggcaagatttccgaaccgatcgcaggaaatcagggggtatatctgatcctggtcaacaaccggacaaccgaagaggtaacaccggatatggtcgctcaaagcaaacaagccttacaacaaagtaatatgtatcgtgcgaactatcaggctattcaagctatcttgaaaaatggcgaaatagttgaccagagatacaaattctattgatagaaagcataaatatgaaaaaaacaggaggagtgaatacgactcttcctgtttttttctcctcctccctttctccccatagcggcacgtacttcaccgacaatccttccgtccttatcagacaccaatcgataaaatatcaggcaggtaggtgaaaatgtttttattaatctattaaagtttacaaaggactcgaaaagttatccggcagacaggcgttggaaaatgcctgtctgccggacaatgcccgttattcctgccggaacggttatttcggcatggcattcacccaattaggattctgctgcgtaccgaaaccggcattgatctcaccggcaggtatcggaaatacaaaactccggacattgaaattcttatattttccgtctgccacttcgatcttctcacctgtgcggcgggcatcgtaccaacgatgtccttcctcgaacaactcccgttggcgttcctctgcgataaaggcaagaagcgcctccttcgtaccgggaaggtcatcctctgtccggattgccggattgcgtttcgccgtattcaagagttcctttcgggcaccggatacatcacccgactgtgctgccgcttctgccatgataaggtacatctccgatacgcggaacaccggaatattgttcaccgcatcagctccggcaataccgggaaacttcataggacgtctcggattttttccatcaccgaccaattgtgcacggatatcccctttcgcaaacagaccgacagcccgtttcgtcaatgcgccaccgtaacttccatacaacgtgttcagactgtttgctgaaagattgtcatccgaactcttggctatggtaaaaatatcctcgcccgatatagcggtcgacttccacatgcccacgtatgcctcgtcttccaccggagcagcattccgcaacttcaacgcctcggctgcagcctctttcgcttttccgtatttgcccatgtacaggttcacccttgcctctaatgccttgactgctgcgccattaaaatatttctgcacatccctgcccaccacattcggcgtcttcaccgctttttcaacatcacgcaaaatccactcgtacgtggctttcacggaactgcgcgacaccttggcacgcaactctatcggcttctcctccacgataaccagaccgccatgttcatcattgtccgttccgtaaggaagcccaaaaatattcaccagttggaaagccgaaaatgcacgcaaggcataacactgcgccatcgccttattgagagtcgccacgtccgcctctcccaatccgccggcagctagcaacgcttctgtcccgttgatgctacgggtagccagatctatcaccttgtagccgtattgccatacatcccccaaaaccccttctgtttcggaaaacgtgtaagtgttgagagtcacgaaatgccctgatttcgcatctgccaccgccatatcggcagacatatcgccaatcgccaccgcattgcggcccatgaagcggtagctgccgaaagcgtaataaactccgttgagggcattctccacatcggaaacggtagcataggcattctcttgcgggatattctggtacaggtcctcgttaaaatacgaatcacaacctgccgccaacagcccccctgccacaatcaaactatatattcttttcataatacattcgatttaaatgtttaactttaaaaaccaatattcagcccaaacatcacattgcgcggcgtagggtaattccaccactgaacgccgttgggtgctataccggacggatcaaaaccgcggaaatcctttgccacgaacgtatgcaagttgtcggaacttacatagatacggacattgttcaggtggatacgttgcaccagatccttcggcaaggtatagccgagggtaatattgcggattttcagataatcgcctttcatcagataacgggtagaggcggagtttgcaccggatttgtcaccaaatacgaaacgtggcaccaatgcctcatcaccgggcttctgccaacggttttcatacacatagcgcgtcgtgttctgcactccggccgcaccggtctgctcatcataacggaggttgtcaccgaatatcttgctgccaagcgaataattcaactggaaagaaaagtcaaaaccgtaaagattcaacgaagaggttaaaccgccctggaattttggcgacgccttaccgacatattccttggtagccttattgtaattggtggtcttctcgcgagagatctcctttccgtttttgtcccggttcacaatccaccacatcggactgcccgtatcaggatcgacccctgcccattctttcatcttccaggtataaatgtcacgtcccggttccactattgtaatactcgactcgatcggcaagtcggtactcagtttcttaatttcattcttattcgcgcttcccacgaaagtcaatgtccaatccaccttatcggtacgcaccggcgtgacaccaacagaaaattcaaaacccttgttctccaattcccctacattggtgggaatggacgacattccgctcgttaacgacagaggaacattgaacaccatatctttagtcaggtgacggtaatagtcaaactctacattcaccctacgctcccacaatgcgagatccacaccgacattgaacttggcggtctgctcccatttcaggtcgggattgcctgcttgttgacggtagcttcccggctggctgttatagttatacccgaatccgtaaagcccgcgtgacgcataccacgaaccgcccacatcctggtttccggaagtaccgtagcttacccgcaacgtcagttcgtccagccaattgcttgccaactgcataaaactttctcccgtcaggcgatagcgtgcacccacggaatagaaagtcgcccagcggttgttggaaccgaaacgggaggatccgtcggtacggacgcttgccgacaaataatatttgttggcataatcatactgcccgttaaagaagaaggacgcaagagccacattatccaaagaagtggacgcactcgaaggctttgccgccaactcgatttggctgagatattccaccggataattgcttcctgccagataggaggaattttcgcgggtatgctgcgcttcctgccccaccatcatattcacgtggtggtcatcgaacgccttgacccagctaagggtatttgtgatgctaagcagcgtacgtgtagtggttccctgttcgcccataccccgcatacccttgccttgtggctgcaggaaagaccaatagccgaattcttttatcgaatataaatccaagcctccccgtgacgtaaacgaccaggcaggagaaaagcggatagtcacataaggcgaaagaatggcgcggtaagtcttcgcttcgctacggtcaccgtccttactacgttgggccacaggattatattgagtattttcaaaattccattcccccaatttgttcctgacagcaataagcggattcatcttaccgtaggccaacgtaatcggatcgctgtaataacctccgcccgcgcccatgttcatgatcgaataagagaacgaactgttcaaaccgtacttcaccaccttgcccggctcctgttcaagattgaaacgtccggaaaaacgttccaggtccttgccgataatgatagcctcattcttaaagtagttgaacgaaaggaagtacttcgcagcgttttccgaaacgccaccggaagaaatgtctagattatagtcctggatcttgccaacgcgggtaacctcgtccatccagtccgtattggccccctcacccggcttcaaaccgaacgtgtcatacaaatcagctaaagcagcatctttgttctcataatcgtccggataagcagccaacaagccgtctaccatcagattttcatattgctcctggttcagcaggcggtagcggcttgtataattgggcatcatttccaaaccgaacttagccgtcagattgactttcaatttaccgcgcacaccttgcttcgtagtgatgacaatcacaccgtttgccgccctggctccataaatggaagtcgccgtggcatccttcagtacggttatactcacgatgtctgcggaattcagtgtagccaacggagacaccgacgcaccttcgcgcgtgcgcatacccatagtactgctctcgataggtataccatcaatcacatacaaaggttgcgtaccggaattataggaattgcgcccgcggataaaaatggtcgatggcgcacccggctgtccggatgccgtattgagctggactccggaaacggcaccctcaagtgcctttacaggatttgcatcggttttttttgaaatattgtcagctcccaaaaccgcagccgaaccggtaaacgaccctttggttgtcgtcccgtaacccgtcacaaccacttcgtcaataccgatcgatgccaaacgcatgttgacattgaccacagaacggttgtttaccggtatctcctgtgtctgcataccgataaaggtaaacaccaaaacagcctttccatctatccgaatggaatattttcccatcgcatccgtagccgttcccaggtgggtacccttaattacgacagataccccgggtaacggcgaaccgtcgtccgcatcggtgacaacacccgtaatggtcttctcctgtgccattcccacctgtacgataccgacaagcaagacaagcagtaaataaagtttgtttctcataaatataagttttaataaaatactgcgattcccctcccctgacagaagtaaaatcaatcttttcaaatagagacaatcgttaaactactacttatatctgcttgtttttcctcctaaaatccaagtcaaccaatttaaacgttcgtttttattggaaaaaagagtaaactttaattctatctttttcaactctccgttctccgttttccgttctccgcttctccaaatttatcgaacgtttttattggtcagatatttttgctccgttttttcagg

SEQ ID NO: 6045 - DNA, 2025 bp, Unknown
  gut microbiota DNA sequence
gatttatacggattccattttgtcaacactcgtctaagtatttacggttacgaggaagagatcacggcatgggttatgttggataccttgaccacagaacaacctgcattgagttatgaagattatcggcggttgtacatggctgtggaggaagattatatggatgtagcttccaagcagaagcgattcaaaaagattcaagagaacgaatactataatgctctgcaaattaaatttgcctatgctgttacgtgtcataaagcccagggaggacaatgggatgcggtatttattgatccgggctggcagggagaagattcacatgatgatgaatattggcgttggctatacacggcatttactcgggcacgtaaaaaactatatctgattaatttcaaggatgaaatgatcgagatggagggataaaagaactaccccttctaattttagattccagctgcacggggagatgatgctttaactaccccctctaactcccccttacacagggggaggatactactgcactgttatattgtagcgccttcttgcgtttggctctccccctgtgtaagggggagtcggtgggggtagtttgttcctttattgaagtttcaaatccttgataatagcgtcaatccgagcattggcttcttgttgtgcccgttcgtaatcatttatgtctttcatctgagttcgagcttcaaagtagaatttaatcttcggttcagtaccggaaggacgaaccgaaatcttactgccgtcagctaggaagaattgtaatacatcgcttttcgtttcgaaatcaaggtgcgttttttctcctgtttgcaggttggttgcttccagggaaaggtagtcttttttcagtacaaccgggctgtgattgatttctttcggcgtgttgtgacggaactcttccatcatggctttgatctcctgcgccccgcttaaacctttacgtacgatgtaaatcattctttcttgcgagaatccgtatttggcataaatttccttgaggaaggagtacagtgttttattttgcatctttacccaagcggcgatttcggccattaatgatgtggcagaaaccccgtctttgtcccgggtaaatgctcccggcatgtagccaaaggattcttccccgccgccgatgaatttctcaccgccttctttgcgaataatatcggcaatccacttgaatccggtgtacacgtcataacagatgatatgatttttttctgcgatgtctttaatcaactcggtcgtgactatggttttaaccgtgtattcaccacctttaagttggttcagttctttttttctgcggatgatgtattccgtgaaaataatattggtttggtttccattcaataatgtccattctcccgcgtcattttttacggcgatgccgatacggtccccatccgggtcacaagccatggccagatcagcatcgattttgcgagctagatccaaggccattttgaatgctgccggttcttccgggttagcggatgccacggtcgggaaatctccattcggaatgctttgttccggtaccgtgtgaatattcgtgaatccccagttacgcaaagaggcaggaacaagctcgtaggtagttccgtgtagtggggtaaagacgattctcaagtcgtgttctttttgtatggcttccggtgaaagacttaatgttttcactttatccaggtattttttgtcaaaatcttttcctaaaatggtaatcatttccggtactccttcgaatttaatatccgaaacttgcaccttctttacttcattgatcacgtttttatcatgtgggggaacgagttgtgagccatcgtcccagtaggccttgtaaccgttgtactctttcggattgtgagaggcggtaagaatgacacctcctttacagcctaattctcggatggcaaatgacatttcaggcgtggggcgtaagtcctcaaacaggtaaacgtgtatgccgttggctgaaaaaatattggcagctgtttctgaaaa

SEQ ID NO: 6046 - DNA, 466 bp, Unknown
  gut microbiota DNA sequence
caatctttattcagccaatatgtcagaatttataaattcaatagttcgttaaaaaatagccacgcctaagcggctctggcagtaaataaaatgagttctttgaaaagtttgtcaataacttgcatgtctgggttaatcccgaacacgcaaataaatcgttcaagcatataagcattgtgtataaaagacttgcaggaggatatggaataggttattccgagcctcttacatgccgctttggccaagttgacagcagcaagcgatgcattgaagtgaaaatccaactttctgaagtcggttgactgacagttggtgattcctgcatgttgcttaccatctctcaaaattccaattggaacctggttctgtaataatccagaacctcccgtccatccatcgaatcgtctgtagagaagtaaagctgccacttgtctgtcctcccgtccatcggataccagatggctaa

SEQ ID NO: 6047 - DNA, 2018 bp, Unknown
  gut microbiota DNA sequence
ttgtattacttttattttgtaccgggcatcaaaggtaacaagaatttacgagatttaagtggatttgaggtgaataaagtattacaaacgcatatatgcgaatatacggttgaatagggaaatcttcttatgaataaagataatcgtatctgtatctattccttgattctcgtcgtgaatcctataaaccacggcgtggtctttacagatcatggcgtggtttacaaagaccacgccgtggtttgtagaatagaagtagatccgatatagaatatataagtattcagctgattattcttgcggaacagatagggtattcgatactattggaccgggatcttgataaccaccttccggatattcccttggccgatacccggggcgtgcccgtcttccgggaaataaatggcgaattgtccgggatagattttcgtataggcggtaggtttgtcgatataaaaggcgatatcttgctcctcgttgtatggaacggactcctctagtaattgatctcccggtttccatccgattttctctacgcccaataaggggaattggatatcgataaatttcttgtgggtctcgatggccgcttccgacttctcctttccgaagaggctggcgatgctaaccgtgaaaccagcgtccgctatatcgtatttaccatcttccatttttgaaaaatcagtagacttaacatagtcaaaagcctgcttaaacagcggatggatacattcgatccgcttagagttctcaagtgagtctagaatcatattgttattaagttttagtaattggtttgaaaattcttacaaatgtcgggtatttccctgttaaataatagtcatatttctcaaataaatctattaagttcctgggtttcttaacgtacgtaaatactgtttcgtaaagtttgcaatctggttgcaatcatatttatcgtatctttgttattcatttatatataactaaacaggtgatacgatctatgaaagatttggagacaattatattaccggttctcgagatgagttgcgctgtatgtgccaataacgtagagaatacggtgaagggacttcccggcgtggaagaggcatcggtgaatttcgcggcgaatacgctttccgtcaaataccatccatccttgattactcctcagaaaatgagagaggccgtgcaggaggccggatacgatttggtcgtggaggtagaggatccgacggcggtacaggaagagatggcacgagagcattaccggaagctacgccggaatacgatcggggcgtgggtactttccattccgctggccctgctgggaatggtgtttatgcatacgcccggcggtaactggatcatgatggcactggccttggtgattatgatcgtgttcgggcggtcgttctacgtgaacggcgtgcgccatgcgttgcacggtagcgccaatatggatacattggtggcgttgagtacctcgatcgctttcctgttcagtttcttcaataccgtatatccgcggttctggtatgagaaaggattggagccgcatgtttattatgaggcatccggcgtgatcatagcgttcgttctgttgggtaaacttctggaggagcgggcgaagaacagcacttcttccgctatcaagagcttgatgggattgcagcctaaaaccgcccgtcgtgtgcgagatggtcaggaggaagaggtctctatctcgttcttgcgggtgggagatcttgtcagtgtccgtcccggtgagaagatcccggtggacggcacggtgtctcaaggttcctcttccgtggatgagagcatgttgagtggcgagccgattcctgtcgtgaaatcacaaggcgaccgggtcttggccgggacgatcaaccaaaagggcgctttcttgatggaggcgaccggagtggggagcgctaccgtattatcacaaatcgtacagatggtacaagccgctcaaggaagtaaggcgcccgtgcagcgtatcgttgataaaataagtggtatatttg

SEQ ID NO: 6048 - DNA, 13040 bp, Unknown
  gut microbiota DNA sequence
ttttttctcgcaattttcctacacaaaaattagaaatagttgcgatgaatacttgcataaaaccagaccgcagtaaaatagctttagtcggttggaacaacaattacatttgtattttcaattctgatttttcggaattaagacctttcacgatatacggtaaaggtatttctataaacaaagccgcaacaatggaaccttctgcccgcatattatattactcgtgtgaaaatagtacagaccgatatttatatgctctttatgtaaaccaaccggaagaaaaacgacaataccatactggtaatgaagaaattcacatttataattgggacgcaaatcccattgctaacatcattatttcagagaacatcatgtgttttgcagtagatgaaaaatacaaatgcctgtatggtctgactagtgacgaaaaattatacaaatatgatttatccaaatattttgataaattatgattaaatatgtcattacaacattcatctgtatcgtaattatgtcatgcaatttctttgataagaacacacaaaaatatcgaaaaattgcattggaatggcataatcgtcaaattattttacctaccagactacctgataaaggtatttgttgtgacacactgtatccggttttgacgacaaaaaaatataaaatattcacttacattgatacattaggctgtacggcttgcaatttcggagcattggcttggaaacagttaatccatgaagcggatagtctgaattacgatgtcgcttttctattctatgctcatttaaagaattatgaagagttcgagacctatctggaaataaacaagttcagttatcctattttttatgattataagggagaatgtaataagcagaataaattaccacaacatgtattctatcagacttttttattggacgaaaacaataaagtgttgctaatcggcaaacctacacccggtagtaatttatggaatttgtacaaaaaaatcattagtcagtaacatcatcataaaaagtccttaaactatatgtcaacatgtggttgccattattctatctctattgataacgcaactatttcaaaaaaggggcattgtacgcttaaatcaaggttaaaatgaacaagtcgtgtgttgatttacacttactttttattccattgtaatatcagaaatatcaggccggggacaaaaataataagggcggtgatctgaagggcgaaggccagggaaatcgagtcattcaaccaaccgataaaaggagccatcgtggcgaaaatcaggcggatgatgaaattccggatcgacaggacggtggcacgcatctccgagaaggtctggcgattgatatatcctttaagaataggagtggcgaatccgcgtacgatataaaagaggaagaataaaaataaactgaaataattcaggcagaaagagacggccagataacctccggcgatgagtatcagaataagggtatatgtccggttttctcccagcttgcggttgagtttgtccgaatataaggcagctatgcctacagtgaggttcaatactgtccacacgataccgaaaagcgcggtcggaagttctattttcatcaataccggttgtacgaaccaggccatagtcagggttgccgctccgataatgccggagaacataatgtcgtagcaaaggcttttattcgtaaatagcgaatatcgaatgattttccagatattggctaaaggattgacaattttggttttgacattgaattcctgtaaagtcaaagctgccggaataccgataaaggcaatcaaaatctgacagtagaaaggcagacggagcgaaaatgtggctaacagtccgccgaaaatacccgcgaaggcttccgaaaaattcccgatcatcgttactttaccttcatatttcaggtattcgttttcccggtcgtaatgaagcatcgtgtcgtataaaagagccgaatcggcgccggaaaccaaactttggcctattcccagcaggatctcggcaataaaaaatgcatagaaagtagaggatagcgaataacagatgtagcctccgaaagcgacgatacaacccgtaatcaaacaatttttccgtccccaggcatcggccagataacccgtcgggatgtcgagactaaccagaacaatcgagtagacactttttaaaaggaagatatcctttaagcccaatccattttcttcgtaaaataatacgataataggcataatcaaggtaaaccacttggataccttaatcaaataaagggctgtaatattttgttttagcaaggccacctgcagactggtaaatgcaatgacaaagataataaagattcaggattagcagctggagaaaaaagtttttttaagagaaaacaggtttggtatgaaaattgcacacattataataaaatgtgcagtaatcttttggttttaaattttaatatgtatttttgtttcagattacaactaaataacagtttgaactatgaaaattgaaaagatcagcgatatttatgaggtattgaaaggatatacccgtaaaaagcgtttagtggttgcttttgctaatgatagtcattctatagaagctgtttatatggcagtaaaggccggattggtggaaggaatattggtaggggatacggagactatcaaaggagtgtgtaaagaaaacggttatgatgaatcgtgttttaaaattgtccatgaaccgaatgatgtccggggagctgaaacggctgtcgaaatgatccgaaacggtgaagccgatgttatcatgaaaggattggtgagtaccgataaatatatgcgggcgatcttaaataaggaacggggattggtagcgcccaatgcaattctgtcgcatgtaacggtgatggaatgctcgtcttatcataaattattgactgttagtgatgtggctgtgattccttgtcctgatttgaatcagaagatttctatgatcaaatatgtgacgattacagcgaaagctttgggagttgaaaaaccgaaagtagcgatgatcgctccgacggaacaggtcttgcctaaagtgcagtctacggtcgatgctgccatcctgtcgaaaatgggagagcggggacagatcccagggtgcataatcgaggggccgatggctttggatgtagctgtcgataaagaagctgccgaaataaagaaaatgcagtcggtagttgccggagatgcggattgtttgatttttcccaatctggaatccgggaatgtattttataaaaccaatacgaaattagggcattctaaacagggagcagtactggtcggagcaaaagttccgagtgtattgtcttcgcgtggagatagtgttgaaacgaaattgaattcgattgctttggctgctattttgtcggaataattttttttgacacgttctctggctttgcaagccacaggtgcgagttcttcgggaattttaattataaacctccggttttgattcatacttattgatcgaagccggaggtttgtcgatttatattggactaatcacccaaagtcaaatttttgactttggggatcacttctttttattaaaaattcaaaagaattagttgagttgtccggattcagctttcttgatcatgtcggcattcgccgtgatatatatttctactctccggttctgtgcccgtccttcggcagtgctgttatcggccacaggctgatcgaatgcaaggccttcggtcgtcaaacgggaacggctgattccctggcctaccagaaagttagcgacggcatctgcacgttctttagaaatgcgttcgtttactgcacgggtaccggtattgtcggtatgaccgtagatggtcacgtccgtatccggagaatttttcagggaagtggcgaatttcgtcaaggcttctctggaagccggactaagttcgctcttattggtggcgaaaaggataccattgtcgaaggttacctttatggcttgcaggttattgacatcctgtacagactcgactttagcgccttcgatcgcttccagttcttttttttgtttgtccatccggcgaccgattaaagctccggttcctgaaccgacggcagcgcctactgcagcaccgatggcagctcctttaccctttccggcaagagctccgattcctgcacctaaggcagcaccacttccggcaccgatcgcggcacctttacctgtattactccagctggcacaccctgtaaaaacactgcctgagaagatcagacttccaccaagcaataacataacaaaaagatttctgattttcatgtgttctcaatttagaatcttggttattatacgtgcgaaattagaaacaatctgttaaaaataaaattgatttcagcttgaattttatatttttgtccgaatgaattgaaacagacctataagggggagtttgtggtaagataaaattataagttgaaacatggctgtatattttattagcgggatcgatacagatgccggaaaatcgatcgttacgggagtaatagcccggacgttgttacaaaaaggagtgcatgtgatcactcagaagtttattcagaccggatgtgtcggtatttcggaagatatactgaaacaccgggaaattatggggattcctcctcaggaagtagatagagacggtacgacctgtccttatgtcatgacttacccgtcttcgcctcatttggcagccgagatcgaccgggtagaaatcgatgtagagcggattcatcggtctacagaaaaattagctgccgcttacgatgtcgtattgctcgagggggccggtgggttgtatgtgcctgtcagccggcagtatctgacgatcgattatatccaggaatataaacatccgttgatattggtgtcgtcgtcaaaattgggcagtatcaaccacaccctgatgagtcttgaattgtgtcgtctacgcggtatcgaggtagcttacgtcgtttataacgactttcccaacgacagtgagtggatcaagaatgactcgattaccattatccggcaatatctggatgaacatttcccggattgtcgtctgttggaattacctgtggttgagggggataagtggcctgaactggaattgaaataaatcgcatcgcttctacagggaaggaatgagccgttctagtcgaaagaggaacatatgcaaaaagtagaattattatctccggccagggatcttgttgtcggtaaggccgctatcgataatggggccgatgcggtatatatcggggcacctgctttcggggcccgtaaagctgcagccaacagtcttgaagatatcgggactttggtgaggtatgcccatcgtttttattgccgggtattcgttaccctgaatacaatattgtatgattcggagttggccgaagcggaaaaaatgatccggcaattgtacgcgatcggggtcgatgctttgatcattcaggatccgggcatattgaatatggatctgcccccgatttgtttgcatgccagcacacagatgcacaattatgaactcgaacgaattaagtttttagatcagctgggatttcaacggattgtattggcccgggagctttcgttggagcaaatccgggagatccggaaagaggtgaaagccgaactggaagtgtttatacacggggctttgtgtgtcagtctgagcggacaatgttatctctctcaatatatgttcggccgctcggctaaccggggcgaatgtgcgcagccttgccggatgaaatggactgtcgaagataacagtgggaaaaagttgattagagataaatatgtattgtctctcaaagatttgaatctttcttcttatatcgatgatttaatagaagccggagtcgattcgtttaaaatagaagggcgcctgaaggatgagaattatgtggcgaatgttacgaattattattcttcgctgatcgggaaccaccccggcattgtgcggagtggttccggacatatcctgtcggcattcgaagcagatcctgagcggagtttcagccggggaagttccgattattttatcaggggacggcacaggggattagttaatatggatacgccgaaatcgatgggaaaaaagatagggatagttaaagaaataaagggaaatactattattttggatgctatcggggagttggcgaacggagacggattatgctatttggagcagggcggattgaaagggataaaggtcaatgaagctgtgggaaaccggattgtttgtaatgaaacggtaaagctccggccggggaccgaattgttccggaattacgatcatcgctttaatatccgtttggacaaagtgaaatccgtacggaagatccggataaaaataaaagcatggacagcggatcgctgtttatggctggaagtgaccgacgaagatggcgtacaagtgattttacgctcggaagaaacttttgaaaaggcacagaatcctcagcaggcagaacgcctcaaacaacaactcctgaaatgcggagattccgattttgagtgtgagagtgtagatttgaacggcgaagaggtcttatttattccggcagcagcggccaatgcattacgtcggaaattattggaagaattgatagaggccagagaagcccggcgggagaaaatgttaccgggacataggaagcccctgacttctgttcccgttgaagccgattggcactataatattgctaatcagggagcgaaaaatttctatgaagcttgtggggtacctgttgtcggagcatgttttgagaaatcgggatttcagtcgggggaaaaagatttaatgcatacccgttattgcctgttgtatgaattaggacgttgccgaaaaatgcagaaaaacaaagatttggaatttccgctttttctggtcaacgacaaacatcggttccgattggaattcgattgtcagcgctgctttatgaaagtaataaaacatgtataaagtttaaaatgttgtaaaaaaatgttactacccaacctactttgctatcgatattatatttttgtttccgaatttatggaaaatagaaataagcctaaggggctaaaataaaaatttatgtgtggaatagtaggttatataggaactaaagaagcttatcctattctgatcaaaggtttgcatcgtcttgaatatcgtggatacgacagcgcaggtattgccttgatttcggataatcaagaattgaatgtttataagacgaagggcaaggtggctgatctggagcgttttgccgagtcgaaagatatatcgggttgtatcggtatagcccatactcgttgggctactcacggggaacctaatgatgtaaatgcacatccccattattcccaatcgaaaaatctggccctgatccataacggtatcatcgagaactatacggtgttacgggccgaattggaaaataaaggatatatttttcgcagtaatacggataccgaagtcatcgtgtatttagtagagtatattatgcgtaccaaccaggtggatctatgtacaggtgtacagttggctttgcatcaggtgatcggtgcttatgcgattgcattgatggacaaaagcaatcccaacgagatcatagctgcccgtaaaagtagccccttggttgtcggaatcggtatggatgagttttttttagcttcggatgctacgcctattgtggaatatacggataaggtcgtttacctcaatgatgaagagattgcggtgattcgtaggggagagcctttgaaagtagtggatttgaataatgtggaaatcactcctgagataaaaaagctggctatgaacttaagccagttggaaaaaggaggttatccccactttatgttgaaagagatttatgaacaacctcgtactttacaggattgtatccggggcagaatcaatgtaggaggaaatagtgtggtactttccggcgtaatcgataatcgggataaattcctgaatgccaaccggattgtaattgttgcctgtggtacttcctggcatgctgctttgatcggcgaacatttgatcgaagatttgtgccgtatccctgttgaagtggaatatgcgtcggaatttcgttaccggaatccggtgatccatccgggagatatcgtgatcgccatatcccagtcgggagaaacggccgataccctggctgcgatagagctggcgaaatcgaaaggggcatttatctacggcatctgtaatgtagtcggttcttcgattgcccgggctacggattcgggttcttatattcatgtcggacctgagatcggcgtggcttccaccaaggcttttaccggccaggtaaccgtactttcgatgttggccttgactattgctcagcagaaagggactattacccaagctcgtttcgaagaaatggtaaaagagttgcagggtatacctgaaaagatttctatggttttgaaaaatgccgagccggtaaaggaattatctaagatatttacttatgcccgtaatttcatttatctgggacgtggctataactatccggccgctttggaaggagcattgaaattgaaagagatttcttatatccatgccgagggatatcctgctgccgaaatgaaacatggacctatagcacttatcgatgcagaaatgccggtagtagctattgcaactaccgatagtatatacgaaaagaccattagtaatatacaggaaatcaaagcccggaaaggaaaagtaatcgctattgtcagtgaaggcgaccagttggtacacgatattgccgattattgcatcgaagtacctcatgtgttggaaccttttgctcctttagtagcttccatccctttgcaattgctggcttattacattgccgttaataaaggacgcaacgtggatcaacccagaaacctggcgaaatcagttacggttgaataaaacggatagcggcttttagccggtagataaaacggtgccgacagttaaaacaggagtaacggtttaaaactggattgcatcgttttattcgttgttgctgttttatctgtccggctccctttttaccggtaaggctattctacgattacagaagtctgttttttgccatccatatagaccgttacgggtttggcaaaccggacgtggcggacgaattctttttcttcgatcaattgctgatttcgaataatgtcgtaattgatgaaggagctgtccgattcgtaaggtacggcaaagtatccgacattcatggaagtcacattgtgaaagaaatgggaccccagcgaagcgtccagggggaaatcccttaatccttgttcgacgataatcctggctttagaaatatccgaccacaatacaggaatgccggtcaatttgtcccgtgttccccaacgtcccggtccgatcaggatatagggggtgtcggtggcttttaatttttcattgaaaaatttcacttcttcggccatctgttcggtgcgcaagcggtcgaaatgtcggggatcgacataaatcagatcctgaatgtcggtgattttcccgttgcccattcctttgtcggcccgtaagatcgctttactcatatcgatattttctttgtcgatatccatatgatattcatttttgatcaggggtttgatctgcaggacataaaatttccattctttgttttcccgattgactgcaaattccatttcgacgggagctcccatcgcctgggagaaaatatccagcagtatatccagggtcgaaaccagaggaatatagtcgtattgcagtatgtccggaaagttgacaatccgggggccacgtacactgaaatcgaaacctatgcggtcgttcataaaatcgtagaccgaagcacaatgctgtaaattaccgtcttcttctatcgctttcaagtcataagatcggatagcggcatcttcaccgtctttcaccagattgtagtccggatggatcatgtctatggcataaaaatatttttgcgaatcccgggccatatcctggatagaggccagttgcaatttgggataacggggacaaaaacgataggtcttttctccccccaccacatatgctccaaggcccagtgctatgactgcaaatccatcttccggtttaatgtaagaaaaaggatagaagttataggattgggcgactccactgatgttgggataatattttccgttgtattcgtttcctactacctcctggaggattaccgccattttttcttcttcgatcatacagtcgatcgcgtgaaagtaagctctcgaactatcggtgaatatcgatgaatacaccagttttacggcagtttcgagatcgtcgatccggcgttcgatatcggggtggttattgggaatcaaatacgtagaataaacacctgcaaaaggctgactgagcgaatcttcgaacaaaccggacgagcgtacggccaagggtttacgcatcacttccaggtaggagcggagcttgtccctgagtttttgagataagggagccgctatgaaggccgctttcacttcttcgtaactttcatcactataaataatccgactcaacccattgttatctatgaagttatcaaattcatccacaccgatgatcgccgttttcggaatttctatctttagtttcgggatcagcttcttaaaatcgacgttttcgataaaattggacaggaaagccattccccggcctttacctccgaaggaacctttacctaaacgggtgatgtaacggttcgaatcgactaatttggggttgtaattgatgatccgccctttgatttttttcagttctgccgcttcgaatacccgtaggatgaattgccgcatttcggccggagtagggaaatcttcaaaccggtatcttttcagatgtttcgctaaagtaatttcccggtgggccattaaccaggtggaaataccgttgcgaatggagtggtatatcaaagattcatccgggatgctcagcagtttttgtttaaattcttctatcgaagtggctctgtcgatcggttctccgtttttgttccggaaaataaaatctccgaatcccagatatcctttgataaaatcctggatatcatgagccagagtcggggaatttttattaataaaagcagcatgcaactcttctgcttttactgtattttctatctcctggctttgaagcatacagggaatatacgctccggttcgcttgacatagcggatcaattcgattccggcttcttcatcttcctctccattccgtttatagcgcacatccgatatgactccgatcagattttcccggtaatgatcgataacgtatactgcctcttcatagttggttgctaatattactttcggtcttacccttattttcatcacaatactcatatcgttgtcctgaggttctgagaaaatgagttcctgagtttgtgtcatgacctcagtataaagtaaaggcaaataacgggaataataccggatcgagttttcgaccaataggattacccggatatctcccaaatgggtgtcccggtcgaggttcattttatcctcgatgtatttggccatgaccaggaatatcttggtggaaccgttccagacgaacaacctttcgatagattcgtacaaccgatcttctatagtatgaaaataggccaggtccgaattgttgtttaccagcatcagctgacagatattcggatacaaatctttcagatgacggctgatgaccaaaggagtttgtttgtccagaccggccatcaggatgatcaggtcgatatgcctttcggacaaaatcttcagggcttctgcttcgctggcgacagaagtaaaacggggggcggtatacaggttgacctgtaaatattcccccacgattttatcggtgaattgcccttcccgttcgatggtataagcatcataataattggcgatcaaaagaatttctttgattttgaagggcattaattcctggaaaatgtcccggtcgctctttttacgtttgtagattttgtgtagttcgattgacataaacagatcattcaatggtaatagactagctatcctgttgtacagaatgatgtaaaattacaaaagtttggcgacttgacaatggttaaatatacatattgatcattgcttcgtatagttcttgtttaccgctggtttgtttgggttctccgtgagcgatcgcatattcccgcagatcttccagcgaaagtttaccttcttcgaatggccggcgagagtggcatggttgacttcgatatttactttaaaatctttatcgaggccgtgtgctttaagaaaaccgattaccgtttctgtatctgcgtcgtattggtgtttcatcggttccatcggtttgggttcgatcaggaatgttcccttaaaaccttggctacgggcataatcccgcgctttggccaataggagggcgaggtggttcttttcacgcttctgatcggtattcagtagggacatataaccttcacggcctccccagaaaacatagttttcacctccgagggcgatagtggcatccaatgcgttttttatttggacagcagcccgtgccacgacatcgaaatcgggattggtagctgctccgttcatataacgggcatgtccgaagacattcgctgttccccacaatagtttgctccctgtttcagcctgtttcttgcgggcataggcaactatttcttcgtaggcttcgatagaagcgagcagtttcccctggtagtcggaaatgatccgggaagagagttttatgaaaggaaaattcttttttcccaggtacctctgcatggaacgcaggctggaggcgtatacccgggctgtttcctaatgaccgctttcacgaagctctcggattttccgtgaaaaatagaaataaaaaccggcttcgtgggttaacacgccgtaagtcctgaacacgtcctctatttcgtattcccgggatttcttttctatcattgaaatacactttaacagtactcttgagatactt

SEQ ID NO: 6049 - DNA, 776 bp, Unknown
  gut microbiota DNA sequence
cgtttttattggtggaaaaactgctgattaccctgttttagatttattttgtccagcccaacaatttattttcgccgggtataaagtattcggcttcttgtttgggcaaaatgattgtatagcaaatttgtcgttttactattttaccggccttctgaatcaaattttcaaaataatcgacatctatatttttaccggcaattactaaatcgatcagatcggaatccttcccgacagcaaaatcaccacgtacccatactttcgaaatatctccgacccgttcaaccacctcttctataacctgagtgattccgctatgctttaataccaaccgatgaatatcattgaaaaggggatgagcggaattagcatgatatacctttctgtttcctttgttctcggctttcagtaaaccggcattttccaagtggttcagttcaagacgaagggcattcgtcgattctccgaattcgtcggccagaccacgcaaataagcatgagtagacgtattcagaaagaatttcagcaataacttgatacgggttttcgatgtaatcagactatccagcatggattcgtaaaataaaactgctatttacagcttcgcctggtaagtcccattttccatataggacagaaagaaatttgaatgagaatgcaaaatagttttgtttttgcgcaacaaaattactcatttctttggataatatcaaaagaaaaactcatttttatccaatcatagattttttatatgcaatatatcattaaataagtaa

SEQ ID NO: 6050 - DNA, 1349 bp, Unknown
  gut microbiota DNA sequence
gaactttttattcagaaaatatttatttatataaggtatggatagccggatggacggaagtcaatgcttcgattaattcgcttcggctgactccttcgcgcataacgataaaaatagtatcgtctcctgcaatagttcccagaatttcaaagtaattttcactgtctatgaggacggttactgcattggcatatccgggcaaagttttgataacagccatattgcccgaaaaatcgatacttagtatggtgtcggtgataatagccgaaactttttcttcccgttgttcattttgaatactttcaggaattacataaatataccctttttctttatgcgggattttggcaactttcataaatttcaagtcccgggataaagtgctttgggtagcttcgacgttcatttctttcaaacggaacaataattcttcttgtgaagaaatgagttccgattcgatcagtttgcgtatagttaaaagtcttttggttttatttctcataaatgatatcgttaaataatggtcataaggcaaagatagagattaaattcagaatttgaaatgatatcgattttgaatatatggatataaatgcatgaaaaatgcataaatattcttgtggtgatatgaaagtttttttacctttgcgccaatttggacgtttgataaattagttcatttaaatagatatgcaaaatttaaagaaagcgcgtttagttctgcaggacggaactgtttatgaaggaacttcattcggatatgagaagtcggtttccggtgaagtggtgttctacacggcgatgaccggttatccggaaagtttgacggatccctcctacaaaggtcagattttggttcctacctatcctatgatcggtaattacggagttccggtggatgatgaggaaaacggggtttcaaaatttttcgaatcggataagattcattgtacagcgattatcatttccgattattcatttgcatatagtcattggaattcgcaaaaaagtctcggacagtggttgaaagaacaacaggtaccgggactttttggtatagatacgcgggcattgacaaagaaattgcgtgaacatggagccatgttgggaagaatagaattcgataatatttcgattcccttttatgatcccaatgaacataacattgtagccgaagtttctacaaaggaagttgtggagtacggacacggaaaatataaagtgatcttagtggattgtggggtgaagtataacattattcgttgtcttttgaaacgggatgtgaccattaaacgggttccctgggattatgattttactcaggaagagtgtgacggatattttttgtc

SEQ ID NO: 6051 - DNA, 2080 bp, Unknown
  gut microbiota DNA sequence
gtgaccctgctaaatgtgatataaccatcaagcatattaaaaaaattttgaccggtgatagaccgattatggggatttgtttaggcaatcagttgatggcaagagctgccggtgctgtgacttataaattaaaatacggtcaccgcagtcataatcaaccggtgatgcagcccggaagcaaccgttgttatattacttcacaaaatcatggatttgctatcgatgataaaacattaccgatagattgggaacctctttttgtgaatgtcaatgacggtactaacgaggggatacgccacaaaaccaaaccttttttctcggcccagttccatcccgaagcttccagcgggcctgtagatacagaatatctgttcgataagtttatcgagaacatggaaaaaggtaataagtaaaacatttcaggtaaaaccagctaagattaaaatcgacatgaaggaaataaataaaatattattgttgggttcgggagcattgaaaatcggtcaagccggtgaattcgactattctggatcccaggctttgaaagccatccgtgaagagggaaaatacagtgtgctgattaatccgaatattgctactgtgcagacttcggaaggggtggccgataaaatttattatttaccggttactcctgaatatgtagaagaagtcatcaaaaaagaacggcctgatggtattttgctttctttcggggggcagactgcattgaattgtggtgtcgaattgtatcagaaaggcatccttgaaaaatatgatgtgcaggtattgggtactcctgtgcaggcgattatcgatacggaggaccgggagatttttgccaataaattacgcgaaatagatgtaaaaacccctcgtagtattgctgccaatagcatggaagaagccatcgctgcttcgaaagaactcggtttcccgattattgtacgtgctgcctacactttaggaggtttgggttcaggcttttgttccgatgaagaagaacttcgtaaattggctgccagtgctttctcttattcgcctcaggtgttgatcgaagaatctttgaaaggttggaaagaagtagaatatgaagttgtccgtgatcagtacgataactgtatcaccgtatgcaatatggaaaatttcgatccactgggaattcataccggtgaaagtatcgtagtggctccttctcagactttgagtaacagtgaatatcataaacttcgggctatcgctatcaagattattcgtcacatcggaattgtcggagaatgtaatgttcagtataccctggatccgaactctgaagattaccgggtgatcgaggtgaatgcccgtttgtcccgttccagtgctttggcttcgaaagcgacgggttatcccctggctttcgtagctgccaaattaggattgggatacggtttacatgagattaaaaattctgttacaaaagtgactaccgcttgtttcgaaccggctttggattatgtcgtttgtaaaattccgcgctgggatttgaataagttcgaaggagtgtccaagctgatcggatcctctatgaagagcgtcggagaaattatggctatcggacgtacttttgaagaagcgatacaaaaaggactccggatggtgggacaaggtatgcacggatttgccggaaataagattgaaatcccggatatcgatgaagaattggtgaatcccacggataaacgggtttttgctatcgccgaagctttcgacagaggatacgatgtggataaaatacatgagatgacacgtatcgataaatggtttttggagaggttacaaaatatccattatctgaaaaatgagctgaataaatattcgaccattacaggagtgagttctgttctgcttcggaaagcaaaacaaatgggattttcagattttcagatcggacgtctgacaatcaaagacgatcggctgactgctcatcaaaaaatgctggaagtgcgtgaatatcggaaaggattgggaattttaccttgtgttaaacagatagatacgttggccggagaatatccggcaatgaccaattacctgtatgtgacct

SEQ ID NO: 6052 - DNA, 2499 bp, Unknown
  gut microbiota DNA sequence
agccataagaggaaccagaagcctcgccttcgaaaccgttgctggctaccatgtacttaaagtccttttcgtcgctgtaggaagcgttggcggagatgatccggtcgtccttgcccatgatttcctcacagacgctcatggccaacgctaccttgtcgtccggttgcacggagtcgaaattcgggtcgaccaatcgcaagtccgccgccccacctttataatacaaggaagcgtccggcagcgtgcgagccttgtcctcggcgaggaaacgagtggcggagataccatccttgatgaacttctccagctctttcttatccaagcgattggtagagtaggagccgtaacggccgtccacgaacaaatgaaccaccatgctgttctcggacgcctgttgcagacggtctattttcatatcccgtatctcaaacgaactgctggaaccattgtaaagcgtgacacgtgaagactgacaaccattcttcaaggcatattccatggcccattgagccaatttcttattttcgtttgttatcatattagttttctcctcctactgtaagtttgctgactaaggccgacggcataccgcaggttaccgggcaagactgtccatccttaccgcaggtccatgtgccgttatccattttataattattacccaccatcgtgatatccgccaacgctttcgggccgttaccgatgatattgatatccttgataggttgggtgagcttgccgttctcgatcaagtaaccatccttcacgaagaaggtaaaatcgcctgcgccaatctgtacctgcccgttcgtgaagttggcggcatagatacctttctttacggtagagatgatctcctcttccgtcacgttgcccgcttccatataagtggcacgcatacgggggataggcgtctgacggaaagactcccggcggccattgcccgtagaggggatgccgtaatgttttgcgctgatacgatcgtgcagataactggtcaagactccctcccgtacgatataggttttttgtccgtccacaccctcgtcatcgatattgaccgagccccggttgaaaggaatcgtgccgtcgtccaccacgttgatatgctcgttgcaaactttcttgttcagctgatcggagaaaatagaggtgttcttacggttgaaatccgcctcgaaagcatggccgatcgcctcgtgcaataagatgccagagccaccggcacccatgacaacaggcatttccccgccttttggcttgatcgcctgaaataagatagaggtcttatccactgcctcttgggcaagctcgttgatcaggtcgtccgtcaggaattccgctcccatacgaaaagcccgtgcggcgtacgagttctcgatcttcccgttatcctccatgatgcagacggcgctcaaggcgctcatcgggcgataatcgtaataaatctgcccttccgagttacagaataagatatgagaggtcgtgtctcccaaagaggccatcaccttggtgacccgcttgtcctttgcgaatatctgatcgttcagtttctgcaagaaaggcatcttgtcattaatggctatctcgtcccaaggtgtttgtacgttatagaaattgttcgtacacgctttttccgtcaggtttattgcggtggtgttcgccgatccggtggcgatccgtgcggccgtgcgagccgccttcagcatctcgtctaaggtaacgttctctacgtaggcgtatcccgtttggtcaccagccaagactcgtacgcccatcccaaaatcgatgttggatgaggcacggtttacggcaccatcctgcaaccccacgttgttcctgtatgaatgctcgaaaaacaaatcggcataatccccgcctttctccaaggctgccgccaataccttcctcaaatccccctcactcaccttgaaataattcatagcgaatgaaataccggctgctttatccccctcactaccggtgcaacttcctagtaaggaaggagccgctaatgttccaagcataaccatacctcctgttttaatgaaatcacgtctgttaatattcatgttgttgttgtttagcccaatccatcacgtttgcgggtggacgttgattcaataattcttttttcataaagtccatgtaaggagctacatgcttgaagaatttcttgtatcccttacatagataatttagtcccggctctccattcggcgtatggagaaaccggtttttcgggcactctccatggcaagcgaaaagatattcgcattccttgcattgcgtagggagcttatcttctttatccgttccaaacttttgttgtaccggactgtacatcatctccgttaatgtctttgtttggatattcccgagtttgtattccgggaatacgaaatggtcgcaagcatatacgtcgccattgaactccattaccccggcgtgaccgcaatggcgagccaaggagcagaccccgggttgttcgcctaccca

SEQ ID NO: 6053 - DNA, 19424 bp, Unknown
  gut microbiota DNA sequence
ctaatgagaaattatttgtttttacggcgttacggacggttgtgcgactcgctctgtgccgtgaatccggatgtggtgtttgtcgcttcggctctgaacgatcacttacgggccgagcagaattggtatgcatcttccgatttgtcgtttgtggaatatggagccttgcagttactggacgaacgattcggaggttgccgggagttgtcggggttcaatgtggccctgttccgggcattggggatcccttgcggaatcgaccgggtggtgcagaatccccaccggatcggttcgcatatgtggacatttatggtggataccgacggacgaaagcttccctacctgtggaattactgatcatgaagtgaaatccatccgtggtgggaacgaaagagtacaaaagatgcatctggtgaaaaaatataccgggacggctatggatcgcttgctgctggatttgatggtacagggggtattcgaaggagcgaatacgccggatttccgggatgccgtggtgctccaccggattactaaagtgccgcttcccgattcgaactgggtacgggtgaactgtccgtcggaatttcgctatctgcgttaccggggaccgaaaggttccaatagttgtattgcagaggcgatgtttttcgatgcggacggtaaactgatccggggggcctgtatcggtacaccttcggcggagaacggaaagacctgggattgtacaaaagtttatgatgggagcaaacatacctattttgccgctcaggatgccgatacctcctgggccggtttgcagttggcgatacctgtccgcgtcagccggatctgttacattccccggaacgacgataattttgtcaaaccgggcgacctatacgaactgttggtgtgggaccggggacaatggtacacgatgggacggcaggtgcccgacacctatggactcgattatgagggagttcctgccggacacctctactggctgagggatctcactgagggagtggaagaacggatatttacgtacgaacagggaaaacaggtgtggtggtaggaagtttgtacgatttttgcatctaaaaaaatttttgttgcattctttttctttcgttcatactatttttaacctcacttaacggagcggaaatgggaggatagaaagaaaagtaacggtggagagtaaatttttataaaaattgaatatggtaaaaaaaatcgttggaacaggagtattacttgtcctggctttggcgttgcaagccggagtgaaaatgtatactttaaagtcgccggacggtaaagtgaaactcgaagtgactgccggacaggggatagcttattcacttttctatgatggccggcttttattaaaaccttcccggatagcccttcataccgacctgccggaagccgatcattgggaaaatatccgtataacgggaacaaaacagaggcatgtgtcggagacggtacaggctccgttctatcgggtgaaggagttcggaatcgattgtaatgaactcgaactccggttgaataatggtttttcactgctgatgcgggcctataacgatggtatggcctatcggttcgtggccggccggaaaggagagatgacagtggtggaggagagggccgaatttaattttgctgatgatttcgaagcctatataccgtattctaccaatccgaaagatccctggaatatggcttttcaaaatttttacaccaaagctcctcttacacaatataatacagagttacctgcttttttacccttgactgtggatgccggtgcggtgaaactgaccttactggaatccgatttggaagcttatccgggcatgttcgtctgtggagatggaaaaacgccggctttgaaaggggtgtttgcagcctatcctcaggaaacgtttaagaataagtggcgttgtcaggagacggtgaaaacccgcaggccttatattgcgcgggtagccggtaaacgtacctttccctggagaattatggcagtgactgcagaagatactcagatgccggtgaatcatctggtgtatgcgctggccgctcccaaccggatcggtgattacaactggataaaacccgggaaagtggcctgggaatggtggaacgactgggggatcagcggagtggattttaaagtaggaatcaatacgccgacttataaacattatatcgactttgctgcggaacaaggaatcgaatatgtggtgctcgacgaaggttggtcggatcccaaacagggagatatcatgaccactgttccggagatcgatttaccggaattggccgaatatgcccgcaacaaaggggtcggactgattctgtgggcggtgatgaacgtgctggacgagcagctcgaaaaggcttgccggtattatgccggtatggggattaagggcttcaaagtcgacttcctcgaccgggatgatcagaaagcggtagagatggtttaccggatcgcggaaactactgcaaaatataagctgttcgtggattttcacggtatgtataaaccgaccggaatcaaccgtactttcccgaatgcgatcaatttcgaaggagtattcggcatggaggaactgaaatggagtaatcccgatatgcctttgtacgacgtaactatgccttttattcgtatgatggccgggaatgtggattatacccagggagctatgcggaatgcagtgaaaaaggacttcagggatatttacagtagcccgatgagtcaggggacccgttgtcatcaattggctacttatatcgtgttcgacagtccgttggtgatgctgtgtgatgcaccgaccgcctatcgcaaagaacccgaatgtacccgctttatcgccggtttacccgttgtggccgatgaaacccggatattgcaggggaaaatgggagaatatatcgtcacagcccggcgggtgggggaagactggattgtcggaggactgaccgattgggaagcacgtacggtggatttggatttgagtttcttgccggaagggatgttccgggctgaaattttctgcgacggtataaatgcggataaaaagggagaagattaccggcatgaatatcgtgatgtaaaaagagaggatcggttgaagatgcaacttgctccgggaggaggatttgctatcaggttgaagaaaaatcataactgataaaattataaacttatgaaaattattcctgttattttattattggtgttcagttgtgccgtttgtgcacaggagctgaaagaaaaatatgccgaagcagatgggttcaggcaaaagtatgaggccggatattttggagggaatatcactccccgctggatcggaaatacacatttttgctggtatgcggtcaagactcctgcaggtactgattttatactggtgaatgccggtaaacgacagaaacaaccggctttcgatcagaaagctatggctaaagcattgacggctgaactgggacgaaaagtggaacccgggaaaatgcctttccgggagattgtgttttcggacgatctgaaacaactgacttttgtgaccgaaggcatgaaatatacttacgaccggaataaaaataaggtgatcggtaaggtgaaagaagaaccccgccgccgggaaggccactggggaggtgtgaatgaagagaattggcagggagctactccttcgcccgatggaaaaaaagaagcctttgtcagtgaaggaaatctgtttgtccgtgatataagtagcggcaaggtgaaccggctgagctacgacggagcccccggagaatactattcttcttttatcagctggtcgccggattcccggaaattggtgagttgtaaataccgccccgcctggatccggaaattgaagaccgtcgtgtcttcgcctgccggacaactgcaacccaaaatggaagagatcgattatgtgaaaccgggagatgccctgcctgtcaaacgaccggtattgtttctggtggaggaaggacgacaggtaaatatcgagtttgccgaaccggaaaaacagtttagcctgaacaatatccgttgggccgatgacagtcgttcttttactttcgattataacaaacggggacatcaggaatatatagtttataaagtcaccggggacaacccgaaggctcaagtgctgatcggggagaagatgcctacttttgtttattataatttgctgtatcgctacgatctgaaagaccggaacgagatcctctggatttcggagcgtgacggatggcgccatctttatctctatgatgcggataacggtcaggtgaaacgacaactgaccaaaggggaatgggtagtgaaacgggtgttgcatgtggacgatgccgccagggtggtttatttggtaggatgcggaaaagatgccggtgaagatccctatctcgagaaagtataccggctgaatatagagaatggagaattgctctgcctgacacctgaaaatggaaaccatcaagtggaattttccagggattatacctattttacagatagctggtcccggatcgattgtccgccggtagctgctttgcgtagtgcgaaagacggatcggtcttgttgtctttggaaaaggccgatatcagcaagatgctggcagaagggtggagaatgcctgaagtgttttgtgctaaaggaagagacggagaaaccgatatttggggagttatcgtccgtccggtagatttcgacccgtccaaaaaatatcccgtaatcgagtatatctatgccggaccacatgattcttttgtcccgaaatctttcaccgtatctccggtagatgccgctttggcgcaattgggctttatcgtggtacagatcgacggaatggggacggctaaccgttcgaaaaaattccatgatgtatgttggaaaaacctgaaagacggaggctttcccgaccggatcgcctggatgaaggctgcggcggctaaatatcctgagatggatatcgaccgggttgggatttatggctgctcggcaggcggacaaaatgcgatgggagctgtattgttccaccctgatttttataaagtgagtgtcgctgcttgcggttgccatgataaccggatggataagatctggtggaatgaacagtggatggggtatcccgtcggaaaagaatatgaagaatgctccaatacggtgaatgcttatcgtctgcaagggaaattgatgctgatcctgggggaattggacgataatgtcgatccttcgacaactttccaggtggtgaatgctttgatcggtgccggtaaagagtttgaatttgtagtattgcccaaccagcggcatacgatgggcggagcttacggtgaacggaaaagacgggatttctttatccggcatttacaaggcctgcaaactccggattggaataaagaggaaaagaaataaaatcgaatcataaataaaaagcttatgaaaaaaagagtgatgacttttgttgccgcatgtctggcactgagtgtgtgtgctcagaagaatggacataccggttatcccattaccccggttccttttacagctgtaaaagtgaacgatgccttttggggacaacgactgaaagccagccgtgaagtgacgattccgctggcattcagtaaatgcgaagaaacaggacgctacaagaatttcgaaatggccgctaatcccggtcctcataataaagtaaccggattttcttttgacgataccgatgtgtataaaacgatcgaaggggccagctatctgttgcagacgtatccggatgaaaaattgaaaaaatatatcgacagtgtgctggtgatcgttgccagggcacaggaaccggacggatatctgtatacttcccggacgatgaatccggaacacccccatgaatgggccggatcgaaacgctgggaaaaagtggaagacctgagccacgagttttataacctggggcatatggttgaaggggctgtcgctcactatcaggctaccggacagaaaaactttctgaatattgcgatccgctatgccgactgtgtttgccgtgagatcggtgataaacccggacagcaggtgaaagtgcccggacatcagatcgccgagatggctttggcgaagttgtatgtggtgaccggggataaaaaatacctggatgaagcgaaatttttcctggataagcggggatatacggaacggaaagacgaatatagccaggctcataagccgattctggaacagaacgaggccgtcggacatgctgtcagggctgcttatatgtattccggtatcgccgatgtcgctgccctgaccggtgatcaggagtatatcgatgcgatcgaccggatctgggagaatgtcgttactaaaaagttgtatattacaggcggaatcggagctaccggcagtggtgaagctttcggtaaaaattacgaattacccaacatgtcggcctattgtgagacttgtgccgctatcggtaatgtgtattggaattatcgcttgtttctgctggaaggagatgccaaatattacgatgtactcgaacgtaccctttataatggcgtattgtcggggatttctctggacggtggggctttcttttatcccaatcctttggaatctatcggccagcatcaacgttcgccctggttcggatgtgcctgttgcccgtcgaatgcctgccgttttattccttctgttccgggatatatttatgctgtgaaagataaggaagtttatgtcaatttgtttgtggccaacgaatcgaccctcgaagtcgccgggaagaaagtaggattgaaacagtccacctcttatccctggaacggggatatacaggtggccgtgactccccgcggaatttccgattttgcgatgaaaatccggattccgggttgggtgcagggaaaggtcgtaccgagcgatttgtaccgttatgccgatggcaaaaaactgggctatacagtgaaagtgaacggtaagccggcagagagtacgctggaaaaaggttattttaccattcaacgcaaatggaaaaaaggggatatcgtagatattcatttcgatatggaaccgcggattgtaaaagcgaattataaagtggaagccgatcgtggacgggtatccgtcgagcgaggaccggtggtgtattgtgccgaatggccggataatgatttcagtgtccggggaatcctgatgaatcaaacacccgaatttaccgtagaaaaccgcagtgatctgttgtacggcatagagctgttgaaaacacaggctcagacgctggagttcgataaagagggacgtctggaggcaaaagaagtcactttatccctgattccttattatgcatgggcacatcggggagccggagagatgaccgtttggctaccgatcgacctgaatgctacccgtccggcaatgccgccgacgattgcttccgaaagtgaggtttctgcctctcaccggagtagtgctatctcggcggtaaacgaccgtttgcaaccacagaatcccgaggatcgctcgatgccttattaccattggtggccgaaaaagaatacaaccgaatggattgtatacgacttcaaaggcgaacagactgtctcttcttctaccgtttactggttcgacgacggcccgtggggtggttgccggataccggaagcatggaaggtatattataaaaatgaagccggagcatgggtcccggtgaaaaatacggctgattatccgattcagaaagatgctccctgtacggtggaattcgaaccggtgaaaaccgctgcggtgaaactcgaagttcaattgccggaggataatgcggcaggaatttttgagtgggaagtgaaataacttttggcttacctcgtcattattgttatttttgtaaagaaaatcaaactaacaaaacatgaacttattgaaaatcatttttttatttttctgtacctggatgacaggagagttgacggcccagacaccctttgaacggtattttctggacaagacactacggttcgactactaccattgcggagatagccggaaccaggagtattttttcgacgaattgaaggaagaaccctattgggcaggttcgaaagtgtctctgctggatgataccggttatggggtgcaattgtttaaaatcttcgataaagccagtggtaaagagatttattcccgaagctattgtaccttgttcaatgagtggcaaaccactcccgaagcgcagactgtgcgtaaagccatgcctgagtcggtggttttcccttacccgaaaaatgaggtacggatcgagatctatgcccgtaaccggaaaggagtttttgaaaagaaattcgaacaggacatcgatcccaattcttattttgtgaaaaagtttactccccgctacgagaccttcgaggtggcctataacggtaatccctcgacgcgggtagatatcgtactcgttcccgaagggtatacccagaatgagaaggagaaatttgcagctgcctgccgggtgtttgctgaagagtttttcagttactctcctttcaaggagaatgctgcccgttttaatatccgggcggtgtgggccccttcgatggaatcgggtgtgactattcccggcgaacatgtatggcggaatacggcggctcaagcccgctactataccttcgactcggaacgttatcaaatgatcgaggactttcagggactccgggatatcgctgcccatgcgccgtatgatcatatttatgtgttgtccaatacgcagaaatatggtggtggcggaatctataatttttatggtatcagtgcagctcaccatcctaaccgtaccggtaaaatctatgtacacgaattcggacatgtgttgctgggattaggggatgaatatattggcaacgtgtcgtacaacgatatgtatccgaccgatgtagagccatgggaagccaatctgaccaccctgaccgatttcggccggaaggaatggaaaaagatgctggacacgaaaacgccggttcctactcctgtcaatgaaaaaacacctcagaaattaggggtttatgaaggaggtggttatgtgaataaaggagtgtatcgtccatggcccaactgtctgatgaataacctgcataccatcgatatcttttgccccgtatgtagtcaggcgatccggaagcaaatcgattttctgtgtcgttgatcgtacggagtaatttttaatatgcaggccgatggtccggagtgttcccggaacattccggagtagacatgcctcgctgaaagattccgatcttatctggagaatgaacgcaatacttggaacggacgggcgatagccatgagcaggagtaaacgaaaaaacggacagattacggtaaaagtcggcccggaaggtatgccgcaagcggttcttaaacttagggcagaataaaaaaagggatatgtcgtcgagacatatccccggctattcattagcccgaaatcccaagtcaatagttgaaagaaagcagccggttgaatgtataatagttgtacacacggcttgggaggcctgttggagtatccggtctgctttcaaacagtagcctgataattgtatatatgttgagtggattgagaaaaacgcggagctgcctttaaaacaacaaagcgtggaacttaactcaatctggcaagaaccactgacaatggttaggaacagaaagagcaagctcacgcttaggtatcattgatatacgaacctcctacgtgagcgttgctacaatcgttctgatttcctatttaaaaattgtcagttttcttgctttcagaacgcgtaatagtaacgcatcaacattttgttgacagatacctcttgtatctgttttacaaaggaaaagaaaaaattgaagataaacaagtgaataatgattttttattaaaattaaaaaatgtaagtttattcgtcgttactaattcgtcttcggtgaccggtttgccgggactcactttgttcctgttgagagaacctgaagttcggggtacaacttttaaaacctaaatagaattagtgcgtaaggtacttaaaattacttcttgcttgtttaaggtttataaaccttttttattatctttgttgaaaaagagaaccttatgtctatgctaaaattagaatcttttttcttcttttctttcttcctgtttcttgccgggtgcggaaatcagagtaaaccggtttcggttgaacaggaaataataactcccttgagtgcaggaaatgcggtggacgacctgttgccgtatatcgattcggttgaagttgttcctttggagactaccgggaaagcgttgatcggactggtgggaaaaatactgcttttgcctaacggaaatgtcctgattaaaagtactgccagcatgttcatgttcagtcctgaaggaaagtttttatttcaaatcggaaagaatggccgtggctccgaagaataccttactatcgatgatgtatgcctcagccaggatgcccgggaattatggattttgggaggatgtgagatcgtgaaatatagtacggagaccggacggtttatccggaaaacgacactggagcttccagagatatgtaatggcttcgatgcgatagcgagtggacccggtcattcggcttttttgtattattgcccgcaaatggacgagaataatttttcggaagatttctattgtttgtatcgttatgacgaacaggggcgaatcctgcaaaaatttctgcctcgtaaagactatggcctgaatatagctctgataacccaggctagcgataatcgatatattctccggcctcaggatagtgataatatctgttattatctttcggatagtttgccggtaccccgggtgaaaatcgattttgggaaaaagacgataaaaaaccggtattcatcggatctgcaaacttatctccgttctgattattataaaatgccggtctatatttacgatacccgggattacttctatttctcgtattgcggacctgaggcaaccgattgttattgtatccactcttttaaaaatagcaaaacgattacctgggagagaaaaggagatgatgccgacgggatgttcatgattgggggggccgataaagactttttttatggtatctataacgattaccgggactgggatgaaatcttactgaatcggcaggatcttttaaaaagagctattattcagaaaacccatctccggatcccggaagatagcaaccctctgttggtaaaagtaaagtttaagttttaagagactttaccttactttccattccaatattccggctgatttgccttcctgtaactgggcggttaatctcagagctttggttctgacgggctggaagtggactgtacaatatttatctttagcgatttcgtaaggatcggtattttttaccggcagccatttctcgccggctttgtattcgagacgccaggagaccgggagttggaaatcgatatcgtaatgtcctaattccaaccaatatacggatgcttcggtgagagtcatcggttggtcccattcgtattgagcccattcttctgtgccaaggcattgccaccaattgtgaaactgcatcgatttatccgccgaattgcggggttcgaaccggtcgttcaaaccgtatcctccgtaagggatcgaaacagaagcctgtgcttgtgaagccagggtttctgtgcggcgtggaatgctggcctcgcgggtataagggatccatacattcatttcgttggctccgcggttgtcccaggcataataaggaatggccgtcacggaggttggcagagtcgtatggccgtcggaaagtaaatgatatccctggccttttagggtcatgacaccgtgaagcagatcgggcttaaactccggactgaacggagtatcttcctctgtaaacagatccaaagcgtaaccgtcatgatcgttggcttcgatacaatatactatcggaccgtatattagagcatatttgttacgatcgtcgataacttgtgggtcggcgatcacttttctgacttgcatcggtaaattcaggacgatttgatcgttacccttccagtcgcctcggagaagggcataaccgttccggacttccggttttaccgtttttccgttcaggctgatggtataacttgttgtatctttgtcgagataggtatatagggtgccgggaagaggttgctgttgtacccaaccgggaatacgcaaagccagagtaaacgaagaagcaggagagtgatccaaagtcagcttgatcctgccttcccagggataacgggtttcctgtttgatgcggaccggttggccctccagagttatttgaccttcgttgcccatgtacagattgacgaaaagagtattccctcggacggcatacacataacccggaatggacggcataaagcgggtgatattggaaggacaacaggaacaaccgaaccattcgctccggtcatgactaccgtccgacatcaaaggattgtcgtaaaaataacgtttcccatcgagagagactcccgaaatgactccattgtataaggcacgttcgagcacatcgtaatatttcgattccccggttagtaaaaacagacggtagttccagtagacattggagatagaggcacaagtttcacaataggaagtcatgttcggaagttcgtaattttccccgaatccttctccccaggctctggctccgatacctcctgtgatatataatttccggtcggtgatattgttccatagccgttttgaagcttcgatgaatccttgatcctggcacaaggcggcgacatctgcgacacccgaatacaggtaaccgaaccgcacggcgtgtcctacagcctcgtcttgttccttgatcggtttgtggtcctggctatacggactggcagggcgcccatcggagagacgtcccgcttcctcacaaaaatacttcgctttttccaggtatttgggattaccggtcacccggtacattttaacaagccccatctcgacaatgggatgccccgagggctgatggatctgtcctgaatctgttccgaaaacctgacataccaggtcggcattctttatcgcgacgtcaagtaaatgacgtttaccggtagcataataatgagccgtggcggcttcgtataaatgtccgcagttgtaaagttcgtggctattgactttctcccagcgacggctgcccatccagcgctgaaggcggtcacaacgattggtacggcaagtgtaaagataaccgtccggttcctgagctgctgctatcaggtggatgacactgtcgagataatggtcgagctgtgggtcgtattgcactgccagcacgtaggaagctccttcgactactttgtaaatgtcggtgtcgtcaaagggaaaatctccctggtgttctccggttttcagacctgcggcaagagcgaaattgtccagacggccgttgatttcacattggtgaaaagccgtcgggatggatacttcgcgatttatactcagtttaggactccaaaaagaatccgctaaatggacttgggtgaaatttacgggttggatcggataatcggtcacttttttttgacaagccacgaaattcagcattccgcagagtatagatatgaatattatttccctcataattgttcggtttacctctgcaaaaatagaataggggtaggaaaacaaatatcagaaatgtacgttttcatatcaatattgtccggtcaggagaatttttttgacaaaggcagaaaaaaatcggcgcgacttgcggttgctgaccggcactttgctgagcgggtgtgcttacctcctgtcgtaccaggagtcccgcttcgttagtttcaggtctttcaacagactggaacggacgttgatctggaaattgtaggactggtgcgtgccgaagggaatgcaggaaaaggtcatttcccagcaatgcaggtcgcgggtgaggttgaaactggtagccgtcacttctttctgctggaagtcataaccggtgctgtagcctatcttccatttcggggtcagggaaaagtcgccgttgatacgcaccatctgcgaaatggtattgctgctcaaaggttttttggctccgggagcggtattgcgcgaataattcttcgaataactgaacgtataatccagactgatactccagggaacatcgaaatccatatattcatcataatgaccgttcagtctatcgttcttttcttctttgtttttcccgttgtccgaagagaattgtatgcccgaagaagccgatacgcgggtcagacgtccgatacctccattgtacctgttgattctgacggcattggcattgatggcataagggtctaacgttccggtcaggtttatgttgactttttcattgaatactttggtccgggccgataactgaattaccgaccagcgcatagaatcggcaaagaaattataactggattgtaaacgaaagctctccaatagttttattttcttatactcttccttgccggtggtatctttgtcgttccggactttcatttccaggttgttgtcgaggctcaggctcaggctccccgattcttcggcaccggaaggggttccgtataacttgttgtcgaatatagaatattcctgatcgttaccttgtgaatctgtgtaagttttccagtatttacttttaggtacaccgattttaggggtatacgatacgctggcactggggcggatgacatgccggatggcaaaaattttgctagtcggtaagaattgatacataccgtaaatcgtcgggttgtaagaaagagacagacttgcgttgtaattgtgggcgtaatgcaggccatataccgtatcgacagggatataaccccctcccggcatcgtagaatcggctacccagtcgcctttacggatcgaacttaaataggctacaccgttataagtgaacgagggagaaagggataggtcttttacaatattgatgctggtactcaatggaatagaatgtttaaaaccattttgccagtcccgggccatattctggaaagattttcccagttcggattccttggtctgaatactgttacgtaactctgcattgtaggtgaaaccgatattctcataccattttaattcacctacacgttctttacgccgaaaaggatatacctgggatacccggaagttcaggttcggaaaagaaagtgagatcgaggagtcacggctgttctggttgtgggtaaaactggctgtgatattgaacggacggtcgggccactttttgctccaggaaatactggattgtttacgttggttggctatatcattgatattggtggcgttataatagttgtttgtcgcagaagacatatctaccgaagcagaaaatgtcgtataaggattggctttgggatcttgggaatgttgccagcggatggaccagtctttggactgggtatagtccggagtccctttttcactggtatggttccggctcatcgagaaatcgaaattaccgctgaatttatacctttttctgtaattcgaacctacgttgaggccccacgacccattggtatagatcgtaccggtaaccgtgaggtctacataatcgttgataaaccagtagtaacctccgtcccgcaagttgaatccccgcatacgttcttcaccgtaagtaggcataataattcccgaggttccttttttggtgatcgggaagaatccgaacgggatagccagagggagaggtacatcttcgatgtaaagattggcaaatcccgaaacgacctttttgtcccggatcattttggccttgctcaaccgtacgtagaagtgcggatgatcgtgtttgtcacaagtggtataccagccgtctttgatacaatataccgaatccgacattttcttggtcagctttccctggacataaccttcgccttgttgggtgatgatctctttgacaaatcctttttctgtcttgaaattatatttgagatccagactttcgaattcctggctaccgtccttgaatttgggtttgccgacaatcgtaccgctactgtcaggaagaccggaagcataagccaggctgttttccatatctaattcgatgtagtcggcttttaattccgtcgtcagatatttgacaaaggcatttttatataaaaaagtttttttattgggaacatccagaatgatcgaatcggctgcgttgtattctactacatctttaaaaagaggtttctctgttttcgtactatccgtttggagtgtatcggattgtacctgtagagaatccgacacagtcggacggggagccattaaagccgaatcggcagcagataaactgtctctgaccgatgccggacgtttgaccgggtgatggacttctttaatcaccggcccgggagttttatcttgaaccgtcgaatctggttgtactgattcttgctgctttcccgctgctgtcttttcttgcatttcgctggcggcaatatctttccgggcatgtgaagaccgtgatgctacggaacatgctgccatcataaaaatgatgcaaatcgtaagaaattgaagtatatttgctcttagttgcaatttattatactatttttgtgatgaataaacgcattccggtccttggattcggtttgcaaatgtaagaaatattgattgttaatagctagcattctttttaaaaagttttaaatatcatgataattcgatacggacttaccggaatattgttttggttactggtaatattttccgcatatgaatctatggctcagaaagaatcgggaaaaatcaaatgtatttgtattgatgccggtcatggtggatttgctaataaagaaggcgatcccggggcaatcggtgcccttactcaggaaaaacacctcactttgggaattgctttaaaacttggaaagatgatctcggaacgctatccggatattcgggtggtgtatacccgtacgaaagacgtgcctgtagagctgaataaacggggcaagatcgccaacgactgtaaagccgatctttttatttctattcatatcaattcctgtaaaaccccttctgtgcggggactggagacttatgtgctgggatctacccgaaacaaggaaaatctggaagtggcgatgaaagaaaacgctgtaatcaggcatgaaaaggattatgaaaagaattatgccggattcgatccgacaagtcccgagtcttatattatttttagtttgatgcagaatatccatcaggaaaaaagcctggaactggccggtgccgtacaagcagagatggtcaaagcgaccaatcataaagaccggggggtcagacaagccggttatctggtactgaaagatgcaacaatgcctgccatccttgtcgaatcgggttttatctctaaccgggaagatgagaaatttttaatgtcgcaggccggacaaacgaagatcgctactgctatttttaaaggaattgaaacttataaacgacaagtagagaaaaaaagtagcgtgaaccgttccggacaacccgggccggtagtggcatcggatggaaatcagtccgtaaaggctgcagaagtacaaaaaacgcaagttgccgaatccggaaaaaacgaattgttttatgctattcaggtggcttctgttccttcgaaagtcaaaactcctgcaaagctttgtacaggcgagaaggtggaggaaataaattccggaggacgctatcgttattatgtggctaaggataaggaattagatgtagtgaagaaaaaactttcttccgtaaagcgtaaggtgaaagattgtttcatcattgcgatatataataataaagtaattactgtggcagaagccagaaaattggagtcggaaaaataaaaagtagtaagatattaagatgttatgggaatgaaggttaaaagagaagtgaaactggcattaacagcaattgctgctgttgttatattgatctggggaattaattttttgaaagcgaaagcattgttcgaccggaataatgtgttttatggtatttatgaccgggtggatggattgaaagtttccagtagtgtaatctatcggggatatagtgtcggacaggtcagtgccatacagtttaccggtgaacggtacgataaggtattggtacagtttaccgtgggaaaaaaattgcagatatcttccaataccattgctgctatccgtagcgccgacttgatgggctcgaaagccatcaacctcatccccggagatgcaacgacttatgcccagagcggggataccttgagaacggaattggaattgggtatcatggaacaactgaacaaacaattggaacccttgaagaagaaagccgagacggtaatggtctctttggatacggtattggtggctttgcaggagatttttagtgaagatgccaatggaaatatccggggatccttgaaaagtgtcagccgcacactggataacgtagagcatgcttccggtactttgaacgatttgctggccaacgagtcctcccggatttctaaaattctcgagaatatcaatagcataaccggaaacctggaaaacagtaatgcgaatataacccgtagcctggataatattaccgggatcagcgattcgcttaaagcggttaatctggctaataccgttcgttatttgaatagtgttttggcacagaccgattccattgtcatgaagatcaaccgggggaaaggtacactagggggagtggtgaatgaccgtgatttgtattataatctgacggcagtgagtgaaaatctcaataaattactgaccgaattccggcaaaatccaaaacgctttgtgaatctatctttgttcgacttttcttccggtaaatcgacccaggatacttatgggatcgtgattgcggaatcggaggaacccttggccttggattccgaattataccggaaatatcccgatttaagggaaatacgtaaaaacgggaaatatctttatttgatccaaacttataagaatttgaaacaagcggagaaagatctgaaagatgttaataaaatctttaaacaatcatttattgttaaaattcaataaaatcttaatttgaatcattctaaataggagcgttgctgttgtggtgattattaacataatgatgtgtataatatgtttgttatgttaatatgttgcgagaaacttttcctttaagctgaaacgattaggttggggtactctcctttttttaacctttgaatgtgataaatggggtataggtattttaataaaaataaatgattttgatggagtgtaatatatttgttatcagatggttatatttaatgtcttggttcttagttgataagcttttttt

SEQ ID NO: 6054 - DNA, 28546 bp, Unknown
  gut microbiota DNA sequence
gaaaagaggcgggttgtgaaaagtaagaaacacctgactaacaatagactatggaaaaggaaggtaagaatatttggttgaaatgtttgtctttgattcaaaagcaagtattgcctgaaaagtttaagacgctttttgagccgatacgtgctgttcgttttaaagatgatgtactgacaattcaggttgccagtgcttatgtatatgaagttttggaaggggagtacatcgatattctgaagagtgctttgaaagcggtaatcggccccaatgcaaaattggcttattcggttgtggtggagagaagtaaaccttctgagccactgacaacgactttagcttctaatccggtaaggaagcttgcaagcagcacggtttatctggatcagaccggtcacagtacgctgaagaacccgtttgaacgggcttccaatcagattcagatagattcccagttgaatccttcctataccatggaaagttatatcgaaggcaactgtaaccgtttggcaaggtctgccggtatggctatcgctcagaaacccggaggaacggctttcaatcctttgttgatctatggtggttcagggctcggaaaaacacatttggcacaagcgatcggtctggaagtgaaacagaattttccgaataaggtcgtcttgtacgtgtcgaccaatatctttcagactcagtttacagaggcggtgcgtcggaatgaagtgaacgatttccttcatttctatcagttgatcgatgtattgattttggatgatatacaagaactggccggaaagaccggtactcaaaatacttttttccatattttcaaccatttgcatcagtccgggaaacagttgatcctgacttgtgataaggctccggccgaattggaaggaatggaagatcgtttgctgtcccgtttccgttggggattatcggccgagatcaaggcgccggatttcgatacacgtaaagaaatcgtgttgaacaaagcccggaaagacggtatcgatttttcagaagaagtgatcgaatatatctgtaaatatgtcgatcataatgtccgggaattggaaggagcgatgatttctttgctggctcagtcgacttttaataagagggacctgacggtggatctcgttagagatatccttggaaaaatggtgaagaaacctacggaagaattgacggtcgataaaatccaggaagtggtttgtgaacattttaatattccgtcggagcttttacagacgaaaacccgaaaacgtgaggtggtacaagcccgtcaactggctatgtatttctgtaaaaactatacgaagtattctttgtcgtatatcggtagccaaatcggtaaaaaagatcatgctacggtcttatacgcctgcaaagcggtcaccgacctgatcgaaactgaccggaattttaagatccaggtggaggaaattcaacggaaattgtattgccggaattaaagcgtcattgttactgaagccgcattgttccaaccggaatagaagaagattcggtaaactgaacgtttaactgctgaggtgcccgattggaacagaacgtttttaattacttctctctggaggcaataattgagtccttttttgtaattggaatggaagatctgtaccgaaccgtcgaagtagtagccgaaggcttatataaagaaaaaggaagtaagtttctggcctttgtttaccctgtggctaccgaagaacaaattcgggaaattattaccgggataaaagaaaagtattacgatgcccggcatcattgttatgcctggcgcttaggagctgctaaaaaccatttccggatgaatgatgacggagagccttcctctacagccggcaagccgatattcggacagattcaatctttcgacctgactaatgtactgattgttgtcgtgcgctatttcgggggaaccaagctgggggtatcggggttgatcaatgcctatcgtgaagctgctgccgatgccatccggaatgccgtcatcgtcgaaaaaaccgtagatgaaattttgcggattcggttcagttacctagtcctgaacgatgtcatgaaggtgatcaaggaggaaaatcccgaagtcttggaacgcaactttgaattatcctgcgaaatgttattggcgatccgccgaaaagaactcccgaaactaatagaacgtttggaaaaaatcgattctttaagtattatcgaagagtaatatttttttagaaaaaaagccataaaaaatttgcaaactccgatttcctccctatctttgcacccgcgttctgaaagaaacgacgattcagtagctcagccggtagagcacaacacttttaatgttggggtcctgggttcgaatcccagctggatcaccaaaagaaaagccaaaaggcgtcaataaaaagacaagtcctacaaaatcaatgttttgtgggacttttttattgtctttcggctacctcgaccgccacgaaaaggttacggttcaatcgaaaaatcggggttggattgatagtgggcactataaaataaatttttgtttacacaatttattttatagtgccgaaaaagtcgcttaccaggcgtatttcctccacggactgtttacatgtgtcagcaattcatcggcagtacttttcattacagaattgtatgcgcccttgccgccccataaggaacgtccgataatatagctcatggccatgtcttcccacgaagagaactcggcatgtaccatattatatgcgatgtctatatatttccaggcatccgtttcggaaatatagcccatttcacaacaagcacgggcaaggaagcagatgcgtcccgcatcccaaccggtaacaccgtaacgttttaaatcttccttttgtgcaatcactttgtaggaaagcagttcctcataggtttcctgcaagttctgaaactgcctgacaattttgtcgtaatcttcttgagaagtcatatgctgctgaaagatttcatcttgctcttccggtttgtctaacaaaaatgcctgataaacaaaggggaaataataccggtacccttttccgcaaaggtagtccaattctttacgggccgcttccgtagtttcaataccccaccattctccgagtatcttgggtagtatatcggaaataccggtttctaccgagttttgataagctccttgttgagaggcatacatggctccgacagcaatcctcttgcattgctcgtcgctcaattttgatttgggattcaggcacacccctttgaaagatctgcgtatttttctgataaatgaatatgcgcttttcccttttttgaaaagccaaaaaccacccacgacagcagctatcgtaacggatatccaaaaatcgttgttcatattgttatcatgctttttaaggttcctattgctatgcttcccaacttgactgcttccaaggcgactcaccgttctccagcaagagttttatgatctcgtatgccgtttcgctgtctgccggatcaccatgccatacaccgcgtcccaggatgaaactccatccgtattcttcccatgaagaaaagtgttcgagtgcggtatctgccgctacctgcatggtctgccacatttcgttctcactgatgtaaccgcaaagatatgcccagcgccccaagttcaccacacgtaccaaatcccaggcgatggcgctttgaggcattttcccggcaggacaccaattgtttctctgcatttcctccgcaatcaaacagacgtcttccatcttgccgcccttactacaacgctcttttgccggtatattttccaacccgcgttcacgaatttctgccagtatccgatccgcttcggcatgatgtccctcttcaagcaaccatctcacgatatccagtgtacttttccggtccgttacattccaccattcccgaagtgtacatttgatgctgtcgatatcgctttcacaatcgattgtatccacattttcgtcattgtatactaacatgggtacaccgaaggccagcagacgaagttgtcctgcatccagttttccctcaccggatctgtggatactccagccttcatccggatcgcctaaatcataaaagttctgcatcatctgttgggcaaatgtcatgttttgccggcctgcttccgctaccgtttccatgtctattccggctgctttcaacattgcctcctgctgtgcttgcatttcagccatattgggaataccggccgtcatttgtgccattacctgttcctgtataccctccggcatctggaatcccggaatgtttccgaacatggattgtgcctgttccattgctgcctttactgcggcctcttgtgccgcctttgccatttcctcaggactttgagatgtcgttttttcttttgtcatatcgtttaattcttaatgatgttaataaattatccttcggctcctgccgctaatagaatttctgtaatctcgttgtagccacgctcgccggcataatataatgccgtccgttgagaattgtctgcctgattcacgttcgcctggtgttccacgagaagtgcgacaaattcattgttaccctctctggctgcgagaataagcggggtttctccattctcgttttgtctgttgacttgtgcatcggttgctatcaggtctaaacctataaacttgtttcctgcccatgcagcaaaatgcaaaggtgtgtttccgtttggcagggccttgtttacgtctgcaccggcatcaatcaacagttttgctactgtaagattccctttcatgcaggcaatgatcaacggtgtttccccttcatcgttcggtgtgttcagcatgttgtccgaagtggtaagcaaggttcggactgtttctgactgcccgttgaaaactgcctgatggaggggcgtattaccacgagtatcgcttgtcccttctgcagataggcatgtcaccacctcccgtagtccgtgagctgtagcatagtctatcgccttgtgtcccgaattgtcggcaacttctgtatctgctccttgctctatcagaaacaaggctgcatcggtgcgcttgttatcgaggaggcagattaaaggggtacgcccttccttgtctgtggcatccagctccgccccatattgtaccagttttcctattatttccttgtttccactcctggcaaccgcatgcaagggtgtttcggaacagttatttgcgatggaaacatccgcatcgctgtcaagcagaagacttacaatatcccggaatcctttcaggcacgcataatacaacggagtattaccctccgcatcccgtttgtttacatcaattcctccttttttcaggaatatctgtacaatgcttttctgaccgttacggcacgcatttaaaaaagtcatgttattatccatactcaatcatatttcaataaaaactttacaagggactcgtcgttcttttccgttgcgatatccaaggctgtctttccttcattgttcacggcattcacatccggtttgccgaaatccatgaccaaaccgacggcttcttttgctcctctttgggaactgcctgcgatgtagtgcaacaaggtattgccccatttgtcttttgcatttatatccgcaccggcttcaagcaggacctcaagtatatcggcatcttcctccgtgcagcaacgtcctccgtaaggatatgatctcggcaggacggcaaagcatggaatgttcccgtcccaaaagcgtcctccatagaggttcattgccggagtctgtccttgcagattaactgcattgacatcagctccgttctctacgagatagcgcactgcccaatttcctaactcataccctgcttcccgacaggcaagagacaaggaggtgttgccttctttatcggcaggattttccggatgccatccgcattgcatcaggcatcggagaagatgcaggcattcttctttcttttcgctaccctgctttcttttctttaaccacacggcaaaagccgtccgttcttccgagtctctgaagtccggatcagccccgctccttaacagaatctctgcagcttcggcattatcccatgacaaggcacaggccaaaggagacttccctttgaaatcatgtaacttttcatcctcgcatatggtctgtaattctacccccgaacgcaagatggcatccaaggctgccatatccttgtaccataatgcctgaaagacattcaatcctccggcaagtgcagaaagttcatctgtttctggatcttgaccggacaatagtgcgccgatccgtcgtgccccttcttccatggcgatgtcgaaagcggtctttccgatgttattcttgtcttccggatctatttgtccgttttccaaaatacgttttgcggtggaaaaacatagcttgtctgcttcccgcaggttttccagcttttcgccagtttcccgtttatccctttccggataccaccgttcggaaaaatccgctatccgttcctctgtgcgcttgatatcgtatgcaatgtctccggcagattggcaaatggcgtgtagcacgttgtcgccgtttgaatcggcagaatcgatgcggttgcctgacatcaaaagggcatctgccatcaggaaatgccggttacgtactgcttcgatcagggcggtcgtgtttttccccgaacgtagtattcttgctcctttggaaagcagtagtccggcaatctcggcaaatgccgcttcttgccggcaataattgtgttttgccaacacacatagcggcgtgtctccgtcgtcattctttacatttacatccgcaccacgctccaacagtatgcgtaccgcctcctcatcggcaaatgtacaagccatatgcaggggtgtggcatttttccgcattccgttcctactgtcaagcgggatatccctatatgctgcgtggatagcagattccggagttttgcttgtatgcaggccgtatatttcttcacaggttatcattatcgttttctttatgtatcaatttctcgatatgtttgtatttgcctcccaaacgggcggaaatggtcttgacttcactatgtaaatgtaatctgaaagccgtttccgcttttaaccgcaacagttgcctgtatgccaaagataccggaataccttgcggcatgggataataaggatgcccttcgtcataatcataacggaggaaggcttcgggtaactctgccatgcggattgtatccccaccggacataagctgttccgcctcacaaagcagcctgtaacattcgtcatgccactttaccatgaagcaacatagcgctttgttgtacaacagcctgaaatccttgttcggaatatggttgaaacacaaataagccgcagggtaagctttgcaggacagaagtgatattccggcagagaacaactcttccgcttcgctgccggttatttggggtgtattggtaaacagtgtcatgggcaggcaggattattgttctatctcaacttcaccggcttcgttagttttaaacggcacggtgtagtagttcgtccaaatgtgttttcctctggcctccttgggttcgtcttttttaataaaattgagctcgaacatctggcgcaattgccgatactcctgtttgtagtcatcactccatttcttccagcggtcttcgtaatctttggggacaggacgcatatacagcatatatttttccaccgatttgaactcatattgtttgccttcttcctgaaggattaccaattcaccaccactggcaatgttgtgccgtattttctcggcattcattccgtcaatctcaatggctgtcgtatattcataagagtttaatacggattttccttttctcggttcttcgggtacaaattcaccatccgtataattgatggtcagattatagtcattgtcctccttgtcgatgtaatccacgctgatttgactcaatacgttttccaatttgcgttctttccagtcttctttccattctatgcggtaaattttacattcgtttatatccacatgggcttttataagttcctttattttagcaacaccttcatcggaagccattgcacaatcatttgcagacgaacaggaagagatagagatggctgcaactaatgccacaaacaggttcttcaataattttacattcataatttttcaaattgttttttttatataaatggggaattgattagttgaataaagagcgaaattcttcgaagtcttcctgcgatgcaaaatacttggttccgaatacgatgtatttatcaggaagacttaccttaaactggttttcttcgtcatcgtcttttatatagctgatgtcggaaataaggaaagagttgtattcgattttgcttttatttacctcaggatatgtcacccgtcctttatccacggtaatggttcctccttgtgctgccagcacccgcgccttacgaatgtcaaagtatgtcatgataagcagtagtacaccgccaataatcaaaatcgtggaaaagactgctggagagaggatgaccgcccgcctgatacgtaacccaaaagggtaaatcaaaggtacgacgatcatacctatcccgaatgccaggcttgaccattggtttgtccatgcacttgggggagtgtaactgaaagtttgatgcacactcttgaatttttcggttgtttttgttgtttccatactgttttatatttttaaagttgatgtaatcagcgcatctgttatcaggatattctctgaaatacaagaaatattttttaatgcagctttcgcttccgttatgttttcgcttttcacttgtgaggagatccatttcttaatttccggaaagacagtatattccgtgacttcccaatcaggaacgcagccatggatcagtgtgtcgaacacgaaatcgcgaatgccctttttggccattgtttcgcctaaccgtttcatgtttgctttttcatagccgagaagtacacaacctgaatatacgaagagtatatcggaagcccggacggtgctgtatgcaatacatttgattgtcgcttctatcagacataaaagcagattcgcttttagatagcgttcgcttcgtctcatggaatatccggcataaagtgcctgaatcacatggctgagaaaagattcactcgtttctgccaacaagcgggtgttatccggagctgtgaacttacctatatgaccgtttctttccaactgcctgatgcggtctctttttacaagggcaacttgaaggttttcaaccataactttccgccagttctgccaggtggatttccggtcacgggtattggcgaatgtgatttccatgtaaccgtccgacacggacgtcgcgatttccattgttccgctgcgggctgtcatatcggaagttttgtcccactttgttccgtctaccctaatttctccaccgaatagtccggcaggaatcggcaggacagggacagatactttattttctgttatccacaagtatatggcagaaatattataaacattctcttcgtttcgggcggcagtcactccggcatcctcccagacaagaaagctgcgtctgtcatattgtatggtcttgccgttgtcatcttgcatggtctgatgggtaaatacgactttctctttgccgaaaatatctgtcatggccgtatatgacaatggtaggccgacatttttcccgtttatctttaatatgccttccgcaatctccacaccatctgtctccggcagatcgggacttcctccttgctttttattctcctttgccgacaaccgtggttgggtaatcggcagctttccgcacggaggtgcaaacatcagagttatatcttctgaaataggaggtaataaaaggtctatgtccggataaggctttgggtaattgagccagtatcccaatttattcggacggcttgccgtacgaaggaaatgccaaaagtcttccggcagactcagtatgtcatcggtatgctgatgcgtatttactacgatagtgccgtcaggtaacgcatgaatctttttgaatgattcgctaccgaacacaccggggcggatgcgcaatacttcatctgtcctccggttccagagacgggcatagtcggagcggttgccattgtcgctgttgccctctaccaaaatccagtcctcctgaaataggtgcaatctgaataaaccatccccaatgtgatgcaacggagcgatacggcatcttcgtgtcgccatatcgagatcaagcaatccaggttccaaccatattccgctattgtttcttgcattgtattcgtgcagcgaaatcatgcgtgcggtgtccggtacgggtatgcaaccttcacggaacgtttcatacccgtacatggagaaggggagggtggtatatttcccgttatcgtcatatcggatgatgcccgatttgtaataactccccattgttatatacagcgttcctttcccgtctatcccgaaaccgggaggatacatcaagccatccggcaatataatacggcttacatattttactccctgttccgtcattgtatgaatgatgacacttttagcatctcccaggcagagataaggtccgtaccatcgaaactcatacttatcatagacactcaaatcacacaggcgcgaccatttgtccgcctccaacgggttctttcccccaataggcatttctcccaaagaggtagaataaagtgcggcataaaagtccagctccttcgagtatctgaaactgtggattttcctcgttttgaattttacaggctgaagaggtacaatacgcaaatcgactatgaatgttcccaaccattgctcttcatctttcggcttccattctccataggcgcaatatccggcaaaacctcttacgatgtaacagatgccgtcatccggccattccattttttcacggggcatttgctttcgtggattgatatgccgggctgtaatcccaaaatcacggtgtggttgtttgagaagttggcaatattgaccatacttcctgcattttttctcaaaggtctgcatttccgtttgtggaagcaactccaataggtaaatctcatcaccgtccaagtcatagagagcgtatccgcaggcggtaagttcctgccccaaggcggctatacccgcttcatgcgaaagacagaaatattgggttatgatttcatcaaaacgcttgtctttcaatatgggaacatcttttccccatctttttctcatttctgccagcgtatcttctacatctccatcatctttgcgtaggtcaagggctttattgcggacttcttccatccgatcattctcatacagctccatttcgctcttaatccattccaccacagcctttccggatattccttttgtcgtatatataccggcaggtattttggaaaaccggataccgttagttgagagtttgtgcatcagaagtacaagttggtcgggagtataaagttcattcttcattaaccattctccattacatacaagaaaaccgtcttcttcgttccagtctccatgaatgctgttgtcaccgttgcacacgtgaatttgataacttgtgaaacgggtatagtcatgaaaaagagatttcggtccgaataatcggactgtcagaataaaccacgtttgttcgtctctcttgccgtccgatacgggaaacatttccccgtcggaagtaaaatggaaagatatactccattcaaaatcatcagggtaaggaatattggcctttgccaaccattttgtgctcacaagagtggggattatcttctcgtaataatcggtaagttcccggttcagttcatgcagatgcttctgttccggcaatagcagtacaatgcgatacaatatatggagatctcccggcccttgttccataagggtatgggcaagttttgacagataagcgatggcacaagaatctggagacaaggccagtaaagctgtacaataccagaaccttataatgtcgtaatcgaaaagtccggtcatgcaataattttccagttcttgtgctgtggaaggtaggcagggatagccttgtagaaaatctgccactatgcggataagttctccgtctgccacatacggttgcatgcgcaataattcttttctgtcggtaggggcatgaatataagaatcgagcgcagagttaagccggttaattttatcagacagcgtcacattgcaatttgccggtgtcggtatgcggattttgttaccggcatggtatccggcatgtttctcgttttcataaacgtacggtatacagtcggtgagataccatttccaaaattccctgttcgattcgggattgatttccgataagtctgccgcacctccattgcaggaaagacttgctaaaaacgctgcatcccattcgtcggaggcaagttcttcatcattttccgcaacttcttcataatcgttaccgtctgttactgtatatgcagcctgtacagctgccatgcctgccataagtggggcaaaatcggttccatagtcgcgtccttctacaagactggaagtgtagtccgctattctcgttatttcatccggatttgttttttcctctaagtaatgctccgcttttcggagcaatgcaataattttatggctttctccggaatatcttctccaaatcggtaagactttaagcgcacacaatataccgattcttcctgctatacggggagaccggaatgcccgtaaaattttatatcttgacgggcgggacaggtgaccttggggcgagctggaaatttctcccaacccttcttttatcaattcctccggaaaaacgggtacttcagttgccttttccggcaagacaaaagcgataatttcccgttcgggatttttatatatggaaagaatcatatccagataccagtgccaatactcttttcgttttcctttatcaccgtttctttccttgacaaaaggatttccacctgaatagacaattgatcctatgaaatcagcattccagctttcaggatcgaaagatccgtcatcttctccgcaataatcctctatgttcaatatagacgctgcatcataacatactgtatatccaagcatcacgatagcccaacctacggttgcatccgtttccttatgattatcttccacatgaatcctcaatttctctgtttctgataatatagcttcggcagagttttcagctttatacagatagttgtttatgcaggagagtacttgtgcatgaacgttgctttgctttccgacagaaaaataaatcttcttgcagcactcgcattgtattttctgtatgacacgtatattaccgatccgtttcatcaaatcaatccttaacggtaaaggcaaatgtcccagactgctttgatcgacccactcttttaatctttctattctatctgttattgtgtcttcatcaggatggagtttcgggaaggtgtattcccgtttggatttggggagtcctgcgtatagccggctataatcaatgtaggtgtgaggagaataacggtcgtgaaaaatcggcagccggaagtccgatgcttttatataggcgttcccgtttccgtccaggcttatcccaggttcttgagatagcatcggggcaatgaccggattatcagcatatgctatccgtatatattgctcaccatcctttttttcttcgtacaggacgatacttccatgctgtctatgtaccttgtccatatctctggcagttaaattatgcgccaaagataaacaacatattaaaatttgaacgattgttcagaaaaaaaatatcttttaaatattactaaaaggaatcaggctttcagtagcgaatataaactatcaaatttgtccttcaattcttctacgtccagaccgttcaggaacgattgctcataggacatgcccaagaacacctgacggaacagtgaggcggtttttttcacgtccgtatcttgctttatttcaccgttattcttggctttttgtattacctttctccataactcatgctccttttggaaggtattctccattttttcacggactccgggatagtacatcctcacttgagaaagaaaatggaagtagtagaagttgggacagcaatcattgttatccacactgcattccaccagtttgacaatacggttcatggctgttcttactcctgccacatactggtcgataaattccgcaagtgtttctgccggttctgcgaacttattggacggcgtctgcatttgtatggcatacttgtctgccaccgccatgaacaggtcgagtttgtggggaaaataatacaccacccctgtctttaccactccgcaggctttcgccagcgtgctgatactcgccttttcgtaattcatcttcagaaacaccttaaatgctttatctatcacttcttctcggttggtaatcatatcgggttgtatttttttatgtttttttgcgaagatacgctttttattttgaagtttttgtatcgggatgctattctttcttgccggtaagccacttcacgccatcttctagccactcgttccctattctttcctttccctttgcgccatagccttttacctctatttccgtgccacaattaacctgattatatcacaattccccacacggctgaaagaggaagatcttacaggagagttgcaggtagcactggcacagggtaaggcgacctgcatcaagggcatgaccgacaacgaggggaacttgttcagtgctttcgtccgtgccgactacgagcgggcgaagtttgattttttcaaatgggatccggacaagaacaaaaagcaggatcagtcgcagcaggcgcccgtctgtcaggaaggcacaaggcaggcaaacaccgtcagccggaatcacccggtacagaaagccgataaaaaaggagtatccatttgaccattcacatgaataatatgatttcggcgaactctttcggttccttacagctaagcccatacattggtattgaaagaataaaaattaagctttatttagtttttcgtattaattttctacatttacaggttcataaggggaaagatatagagaattgaacggagagtctgctctcctattgtcgttttgaaaagccgatgaataaactcgtcagaaaactattaaataaatattcatgaaacaacaattggtagataaaagttctcgtatcgaagttgtagacgctttgcgtggttttgcggtaatggctattctcttggtacataacctggaacattttatttttccggtttatcctgaaaattctccaggttggttaaatgtattggatcagggggttttgaacagtatttttgctctttttgccggaaaggcctatgccatctttgcattgttgttcggatttaccttttacatgcaaagtaacaatcaaaaaaagcaagggaaggatttcggctatcgttttctgtggcgtctggcgttattgggtgtatttgcaacatggaatgccgccttttttcctgccggagatgtattgttgttgtttgttgttgtcggggttgttttatttcttacccggagctggagcgacagggctattggggtcgccgcagttgtcttactcctgcagcctgtcgagtggtatcattacatagccaacctgatcaatccggcgcatcgcttaccggatttgaaagttgctgagatgtacggggaagtggcagattacaccaaagcgggaaattggagggatttcctcctgggtaacgttactttgggacaaaaagcaagttttttatgggcggtaaatgccggacgtttcgtacagactgccggattatttctgttaggtttttttatcggcagaaaacaacttttcatgacgaatgaaaagaatatagcttttgggacaaaagtactcatcatttctgctatttcttttgctcctttatacaccttaaaggaactggtcatggaaaatgacccaatcgtgcagcaaactgtgggaacagcattcgatatgtggcagaagctggcttttactttggttttagtggcttcgtttattctgctttatcaacataaaaatttcagcaaagcagtcgccggtttgcgtttttatggtaaaatgagcctgaccaattacatctctcaatccataataggtgttttcatttatttccctataggtctgaatcttaccccttattgcggatatacccttagtttatcggtcggctttttgatatttctgttacaactgagattttgtaaatggtggctggccaggcataaacaaggtccgttggaatatatctggcataaatgtacctggataggaacgggtaaatagccgaagactataaacaatcctccggcatgattttctgccggaggattgttgtttgggggtactttaatcgaactgtaagatgacgtctgtcttttcgctgcagaatgaaagcctgtttttaagaaataatccgttttctctgggcctgaactgtgaggaggatatgacgaaacaggatccagtccgcattgtttcagggaaatgaagcagctgcgggttcctttagctgtgatgcgatagttccgtctgaatcaaaagcgactgactttaccatgtacttattttttgttgatctcacggattacccggcaaggattacctactgccagactatcggccggaatatttttggttacgacacttccggctccgattacacaccctttgccgatagtcactccgggtaatatgatcacaccgccaccgatccaacaaccgtcttcgatagtcacaggaagtgcataagtacggcagaaataggcagctttatccggagtccaaccgggagtgagccgttcggacaactcgataggatgggttgctgtatagatttgtacattggaagcgattaaaacatggctgcctatggtgattttattacaatcgataaaagaacagttcatattgacagatacattgtcgccgatatgaatattacaaccataatcacataggaacggagtaccgacagatacgttgttaccgatactgccgaacatttctttcaagacttcctgttttgtttttttctcttcgtaagacagtgcattatagcgtgccaacaattggcgggttttccctttttgtgtgataaaaataggatcatgacagtcgtaccactcaccggccatacatttgtctaattctgttttcatgtgaatcgatgatttatttcagattataatagacaaatgtatgggaaatatcttgcttcatttttgatatagatcaaaaagatagatggccggcagaaacggccgggtctccaatcccgaatactgaagacggacaaatacagaaataatgctgctttttcggcgataaaagttccgataacttaaagatttttatttacagacgtcgatccattggatagccagggcgtatcggaataattcgtcacaatgcaattcgatggctgaattgctactgccgcaggccggaaaaacggtgtcgaatctttgcagggaaatatccaggtaagttcgtacgccttcaggattagcgaaggggcagacgcctccgatggcatggcctgtcgattctgccactttctcaggacttaacattctggctttcattttgaagaaatgtctgaatttactgttatcgatttttgcgtctccggcagtgacgatcaggatacaatgattttcgtcttcgccttggaaagagagggttttagctatacgtgccggttcgacggacaatgcctgtgcggctaattcgacggttgcactggacactggaaattccatgacttctttttcacgacccagggtggcaaaataagctttgactttttctattgacatgattttattttttttcgatcgttatacgtgctgatcggttgttttcggaaagcaaaattaaagaaatagaagatggaatgaaacgaagagattgttttttacttaccatattgctgctgacaacagtgaatctgaaaatttctactttatgcaatataggtcaattttgttatctttgtgatttcgatcgtagggcgttattatgaagagatatggtgccgatagagataaagagatccagagactactgcaagaaatgccggaggaagggtttcgtctgctgttcgatgtgtatcatatgcaattgtgtgtgtatgtcgtacagttgaccgattctttccaattggccgaggatattgttcaggatttctttgtcgctttctgggaaagaaaatattatcgcgccattaccggcaattttcgtagttatctgtatacttccgtacataatgcagcattggctgttttgaagaagaagaagctggtgccgatggaattactgacaggagtcccggtggagattccacaggaggctgtcctggaaagggaagaactggaacggcaggaaaaagaattgatgctgaaattggagaaattaccgaagcaagaaatagctgccatcaaagcggttatcctggaaaataaaaaatgtgtggaagctgctttggaactcggtatgtcggtaaataccttaaagacacatttagcccgggcgttgaaaaaattgagaaaagattatcatctctcctttttattttattcgttttaataaatattaacattttacttgtcattcattcaactactttttcactctacaatataaaaagagtgaataatgactaatgaaaaacaacaaaatagaaaaactttcatcgattgttaccggatcggacgttcgttggaatatatggatcgttatgaccaggaacaggcgtggaaaaaattgaattccgccatacaaagaaaacgcctgcatcgccggatctcttatatgtcctctgtcgcggctatggttgccattgcttttacttcattttatttgtggcgtggtgaagatcaggctccggcagagaagttggccgatgctcaggagaccgttggacagagtgggcgtcccggtgttatcctgtcgctgtctgatggccgccggatcgatctttctgcccgggaaggtaagatcggggcaggagaagaggtggtgaatcatccggaaaacaaacaattgttctatgctgcggatcagggcggggagaagatcagccggatgaaccggctggatgttcctcagggagctgaatatcatttggtgctgtccgacgggacacgggtgtggatgaatgcccgctcgcgtttggtttatccggtggctttcggcgatacccgggaggtagaactggaaggggaggcctatttcgaagtgacccgggatgaaaaccgtccttttattgtacatgccggtcaggttgctgtcaaagtgttgggaacagagtttaatgtaaatacctgccggaagcaaaaggtacagacagtgttggtaaaaggaagcgtacaggtggagaacggcggaaaacgggaggtggtgttacgaccgggcgagctggcggaaaccgtggggacacagatccgggtcactcaggtgaatgtacgcaaatatacggcctggcgtgagggagtattttatttcgaagaggctgagttggaggagattatggcggaattggccgattggtattgtgtgcaggttgtttttaccgatcagacggtccggacgcgtaaattcagcggagtactggagcggagcgagaccatagaaaacgtgttgaaaaagatagaacgtaccaccagtgtacattttactatccaacaaggtattattcaagtgaaataaaaaaagaaaccggaaaagggctgccaccctcttccggcggagatcaaactatcatagcaaataatagtattaaccaattcacaaatttatgaaaaaaaaagaaattgtacgatttcccaggtccgggaaattaaggcaaatcggaaggatgatgaaattaatggttttattcctgattttggggtgtgtgagtgtatcggccaggtcggttgcacaaaaccaacgggtgtccctgaacttgcggaattgtacggtgatgcagttgtttgaagaaattcagcaacagacccgtttgtttttcttttacgatcagaagcattttcaggaacaaaaagttttgacggttcgggccgacgatgaagaggtcggtggattgctgaaacgtttgtttgccgataagaatgtagaatttgtttttgaagaccagaccgttatcgtgcgtccggcagttagccggaagcaagtgaatggaaaagtggtaaagggggtcgtcagagatgctgccggccatgtacttcccggagtaacggtagtattgaaagggacgacgctgggaacttctacggacatcgacggtaaatataccctgacgttacccgaaggtgaacacgttctggttttctcgatgatcggtatgaaaatgcaggaattccctttgggcacacgtaccgaactggacgttaccctgcaggaagaggtggcagagatggaggaagtagtggtgaccggtattttcaagaaagcgaaagagagttataccggagctgtttcatcgatcgataaggagcaattgaaaatctataaaggccagaatctgcttcagacactgaaaaatatagatgtgtccattaatctggctgtggataatattaacggtagcaatcccaaccggatgccgcaagtgaatatccggggtaattcttctctgcctatgagtgtacaggagtataacgaaagcctgagcaatgaggtgaataccccgttgatcatcctggatggctttgaaatagcattggagcgtttgatggactataacgacgaggaaatcgaatcgatcaatatcctgaaagatgctgctgctacggcgatatacggttcgcggggttctaacggagtgattgtggtgacgacaaagcaaccggaagccggtaaattgcgcgttaatgcagaaatagggatcgatatcgaagctcctgacctgacctcttacgatttgttgaatgcggctgaaaaattgcagttggagtgggatctcggattgtataagaatgaaagcctgccgagtaatgatgtatggtataaagaggcttatgccaaacggaaaagggcaattgcctccggcacagataccgattggttgagtaaaccgttgcacacaggggtcggttcgcattataatttacgtatggagggtggaagcgacgaattccgctggagtgccagtgtgggctataaaaatacacagggagccatgcgggattccgagcgtaaaagtctgaacacctctctgaccttaatgtataaagtgaaaaatttcacctttaaaaatcaggcttcttacgggacaaccaaaagtaaagagagtaaatacggtacgttcagtgattatgtaaaacaacaaccctataatgctccgtatgatgagaatggaaaactggtgcggatgttcgacggttttcatgctcattaccaaggatatcaaaatccgttgtacgatgccaccctgaacagtttcgataagagtagttaccgtacgctgacggataatttcgccatagaatggaatccgttcgaaggcttgaccttacgcggacaagtcgggattacggctacggacaatacgtctgatcggtttttgcccgcagaacattccactttcaccgacgattcgcaatatgaaaccgacgagggattcctgcgccggggaacttatgattataccaccggacgtacgaatgaatataccgggaatataacgctttcgtataccaggacttttgccgataaacatcaggtgtatgtcggtttggattattcgctgaatgaatccgaggggtataattatgccatcgctgccgaaggttttacgaatgaggatatccattttctggccagtgcccggcaatatgccaaagacgaaggtcccggcggatccaaatccaaaagccgtcggttgggattgacagccaatgtcaattatatctatgataaccgttatttcgtggatttttcgtatcgggtggatgggaaatccgatttcggttcgaaaaagagatatgctcctttctggagtaccggtatcggctggaacctgcacaatgaaaaattcctgaagggtagttttgcaaatattctgcggttgaaagcttcttacggacagaccggtacacagcagggatccgacggtgccaatacgttgtataaatatattacggacaaccggtatatgtattggaccggagcggaattgcagggattgggtaatccttatctgacctggcagaaaaccgacgaattcaacttcggggtggaattcggattatggaaaggacgtatgaagggggaattcaacgtttataccaagaaaacctctaatttgctttccaatatggacctgccgcattccaacggttttgcttcctacgtcgacaatgtcggagaagtgaaaaacaacggttgggaagcctctgccagtgtttatgttatccggaatgctgagcgggatatcaactggattatcggtggtcagctgacttacaataagaattatgtttcgaagttgtcggaagccattaaagcccagaatgaggcttatctgaaagaggatgtagatgtcgccaatctgttttatgaaggacgtccgcaaaacggtatttatgtcgttcgttctctgggaatcgatccggccaacggacaggagatttttttggataaagacggtaaccggacggatatctggaaggcttccgataaggtttatgtcggtcaggcagatcccaggtaccggggtattgccaatacgatgtttatgtggaaaggattgacggtaaatgtatcggcttccttctattggggtgggaagaggtacaattcgacgattatcgaccgggtagaagtcgggcgtaccaccttgatggcacagaatgtggatgcccgggctctgtacgaccgctggcagaaaccgggggatatcgttccattcaggaaatacgacgatagttcgacccgtgccacttcccgctttgtcatggacgataaggtgttcgagattcagtctgtcgggcttcagtataaatgggattctgcgtgggtaaagaaatacatgcgggcgacatcggtgaccttcggtgtgaatatgtccgatttgtggcatttctcgacaatcaagatggaacggggtaccagttatccttttgcccggaatattcagggaagtataaaatttttattttaacgacaggataaataacgatagatatgaaaatatataaatttataggatttatagccctgttggggtggtcggccgtttcttgcaacgactggctggatgtgcgtcccgatacggaacagaaagaagaagatcagttttcgacctacaaaggttttcgggatgctctcaccggatgctatatggctttggctaacgaagatgtgtatggttgccgtttgacgatgagttgtacggaagctttggccggattgtggtatatgccggatgaaccctcgtctaccagtgatcggtatcaggattatcacctgatgttgcacgaatacgacaatgacggagcacgacaggccgcccaggctatttattccaagctttataatatcattgttcaggccaatctggttatcaaacatgcagaagataatgcagccgctttccccgacgaagcaacccgttcggtaatcctcggtgaagcctatgctatccgtgcctattgtcagttggatgttttacgtttgttcggtgaagtccccgggggacaaggaacaaaagtaagcttgccttattccgaagtgacggccttcgacgagagagccacccgctatgatttcaccggatatagcgaaaaattgatcgccgaccttgataaagctgaaaagctgctcaaagacaatgatccgattttcggatatacttttgaagaattgaatgcaccttcgtcggtggagattgaagatacctatatgtgttaccggcagtcccgtctgaactattgggctgtaaaggctttgcagtcccggatgtatctttatctggggaaagccgatccgaaatatctggcaatggcttacgatgcagcgaaggcggtcatcgatgccaaagaccgggatggaaatccggtgatgacactgagcggtagcagtgatcgtgaaaccaacggttataaggcctgcccgaacgagtgtcttttttatctgagtaaatataatgtgaaagatgttgcttcgattctgatcggcggggctgatgtacaaaccggagtaaactatctctatattacgcccgaacgtctgacccggctttttgagggagttccgacggattcggacaaccgttatgcattcatgtggaacaaaaatgccaaatcttcaacttcgaagaagaatgcaactattctgaaatattattttgccgatgatgtggagaataaagcgttgtattatcagattatacccatgctccggatgtccgagatgtatttgattgcggtggagacaacaccttcgctcagtgaggccaatgctttgtataaagattatatgttggaatgcggtgtcgctttggataaagatgtatttgacggtttaaacgatcgttccggtgagctgatggctgaataccggcgggagttttttgccgaaggacagttgttttatacctacaagcgaaatcaggtcaaggatatactgtggttggagactcaggaaatgacggaggatgattatatcttgtggaattgtgtaaatacggaatttaatccttaatttttttaaacgaatagcgatgaaacgattgaatatatggttatgcagcatgttgttgttgtgtattactgcctgtgaaaaagatttaccggtgtttgaagatccggattgtttgttgaattttaattatggtagccagctcagtacggaagaggtcactgagatgatgcgaaacgggagccattctttcaaactgaaaacaccggaaggacaattgagcgatacggtatggttagatgtggatattatgggaaaactttcagcggaagaccgtccgctggccttgcagcaagtgatggtggaaggaacgaagaatgccgttgcaggtacgcattatatagcatttgacgatccggtactggcggagttctatgttgttcctgcccattcggcaaccgctcatattccggtgatcctgaaacgtgatccttctttggcagaagggaatgtcgttttgcgaatcacttttagagaaaatgcaaatttcaaaacaggctatccggaattttctacttatacgctgacggtttccgaccgtctgtctaaaccgaatgcctgggatttggcgtctttggattattatttcggagaatatggggagaaaaagcatgaattgatgatgaaatggacggaagaaagttgggatgacgaatatatcaacagtcttttcgcagatatatacggattcggaactttatcaccgaaagatcccaactacattgagtggctggccgggtggtttgccgaacagttggagcaggagaatgtagaacgcctgcagaataagctcgacgtctggaaggaaagtgataccgggaagccggtcgattttacaccgaaagaatggggaaggtaatatgaatgatttaaacagtaagaagatgaaaaaaatatatattggcctgttttgggcttgcatacttgggattaccggttgttatgaagacgacagtacgatggcaaccccggaaagtatggtgaatgaaataaccatagaggagtttgccgatacgtcagccgtcgcttattcgacagtattggaattgacaccgaaagtgacagggtattccgatacggaactggaataccggtggtatatatacggcggggagttcagcgaccgtacggaagacggttatcgtaccgtgcaaatcggtgcggaaaaaaagctttcctatcctgtggagttgaaaatcggaacttatacggttgtttgtgaagtgacgaataaagaaaccggttatttcaacctgacagaattttctttgaaagtgacttcggccttttcggaaggattttatattttaaaagaaacgacggacggaaacacggatatggatttttacaatgaccgtcaaaagacggtcataccggacgtgattgcttcagtacagggagaagcacaaagcgggaaaccttgcaatatgtgcccggtatataacaaaatttatatcgatcccgcaacggcaaaatcgacctatgctacgggtgtttttgtcactagcggacagaatgagttttcgatttattctacgatagatatgtcgacacttttcgaccggtcttcgttgcttttttctgagatggacggggaagaagtgccttatgctatggtttctgcaatgagagggaatatgctgttctcgaataagggagtaagactggatgatcttggcggtggaatgttcgctagtgaatacagcaccggaaaattaggttatcctgccggaaaagggaccagttcattcattcaggcttacgacgggcagaatctttctttttggagcggagaaacccggcggttgatgtatacctccggttcggatatggaagaaattaagtacaaggatggttatgagggagttaaagtggattgggaacaggcggctcctgtggcatcgggctggaatcaccgggccggtaaaaatacgatctggtatttgttcgacgttgccggggaaggacgttatgtggttgtgttacaaccgggaggaggtatcgatcaggtcatccggttagatgcttcccttcatttagccaaggcagatgtaattgccggaaatgcactgacttctacctctatttatggagtagacgacaaccgtttgtatcgttatagccttacggaaggtaccgaaacttctgccataccggtggaagggttaccggcgggaacgattacttatatggccgatttgttttacggttcatcttttgattatatcgttatcggtatacaaaatggcgatgaatatacgttgtcgatgtataagattgccggtggacaaccttcgggcaaaccggtgcatacggtaaccggaaccggaatcctgaagaaggtatgctatgcctgtcctttacaggactatgcgagcccgaattattatgcctttactaagtatgcggaattatatggaatgggacctgatttcccgtattgatgagataatggttttattcctgatacagtgccggactgatagtcgggtatgtcggtccggcgtattaaacgattaaatttgcaatagaatgaaaaagatagtattagctgtatttatggctgcaatggctttatctctttcggcacagatcaacttccgcgagggcggctttgccgaagctttggaggctgccaagtccgaaaacaaattggtgtttatggattgttacaccagttggtgcggtccttgcaaattgatggcgtctaaagaatttgtccaggagaaagcgggtgagtatttcaatccccgtttcgtgtcggtaaaaatagacatggagaaaggcgagggcgtggaattgcggaagagatatgatgtcaatgcttatcccaccctgttggtgttgaatgtgaagggcgagttactatgccgtcatgccggctatctgagtgtagacgaattgatagactttgcggagaatggtgtgaagggaggcggattagcgggtatgcacaaacgctatgccgctggtgaacgttcatcggaatttatcggagaatacctggctttactcgacgatgccgccatgtcggggactattcgttccgtagctgatgatttcctgaaagacaagacggacgctgtgtttacggatacaaatgtatatcggatattctgtggttatgttactccggattatgctgtcttccggtcggtatatgcccgcaaggcagaattggtgaagcgttacggtgaaaaggccggtctgcatctggagagggtgtgggaagccggtgcaaggaaatacctcaggcgggaggcgaagaaaatcgttgggtatgatgttgccggactggaagcctattatgccctcatgaaagaataccgggtgccggaagcggagggtattcgtgctgccgctttggtggatggaactatcggcacggcggagtgggcagccctgttggaagcgatgaccgagtataatcgttttagccgcatggtggaagatcagatgttttatgcctgtaacgcgttgttttacggacagggtgcggaaggatggaaaaatgccggagaacgcaagaagttcgccgctctgctggaagagcgtgtcaaagcattgaaaggcaaagaagacacttccggccggaccatgacggtagggggaaaaagaatgcctgtcatggagtattactgccagtcgtatgaggagatgttggagaaagtgaagtaagtagacattcatatttatagtggtatgggattccgggacggaatcccatacggtattgctaaataaatataattattctaactttgag

SEQ ID NO: 6055 - DNA, 556 bp, Unknown
  gut microbiota DNA sequence
cgtagctttttcaatgcttttcaggaccaatgacatgaaaagcgatagtaaaaattcgtatccggctttgccgatatagcggactggatgttttagagtcatttccgcccgattttgtttattggttgttgggctatcaaggatatttcgaattatgaagtcaagccggcttttataaattttaagggctttgtttgtagagacagtaacacataaataactacacatgaaaaaacaatttttgatggctttagcggcgctatcgctgcttggcggaagaacgacggctcaggagccggcttgtaaacctcctttaatgggatggagttcgtggaatgcctaccgcgtaaatatcagcgaagatattatcaagcatcaggccgatttgatggtggagaagggcttaaaagatgcaggataccggtttataaatatcgatgacggatttttcggttatcgggatgaaaccggaaagatgcatgaacatgcacagcggtttccgaacggtatgaaagtcgtcgtggatcatatccacgatctggggttgaaggccggt

SEQ ID NO: 6056 - DNA, 13584 bp, Unknown
  gut microbiota DNA sequence
cggtcagtgaaagaaaaaggtagacgaccgacagaagcgaccgggtctccaaacacgaacaccgaagaggaataagtaacaaaataaacttaggttttgattctattttcaaagaaatcattatttatcggtcatttacttatgcttttactttaattcttcgtattttataatggatgatcgtgatgaaaatattcatcagcggggaaattaaattaaagaaacaataagggaggtattcgatcgtaggtacgccgagtacccgtgattgggtagctccacaagtattccaggggaccaatacggaagtgactgtcgcagaatcttccagagcccgactgaggacttcgggtttcaagcctctttgttcgtaaattttttgcatcattttaccgggtacgactatagaaagatattgatcgcaggctgtgatattgaagaagatacaagtcagtatggtcgtgctgaccagcgaagtgtcgttataaataaaatgcataaaagcttcacccactctttttaaggatccgctggcttccatcactcctccgaaagtaagagctgcaataattagccaaactgtatcgagcataccttccattcctcctgttgtcaacaattcgtcgacttcggatacccctgtgctcagtgtcattctacttccgacagcttggatgatcaactgataggtgttgtggaacttttcttgagcgatcagctgatcgaggagatcaggttgaaaaatgagggcgaaaataactccgagaacaactccacccagcatggcaggtatggggggaactttttttataataataataatgagtaaaacagggaccgataataaccagggagtaatgtggaaactactttccaggcccttttttataaagccggtatctatggcagtatctgtatttaattgatataggccgatgattccgaatatgatcaacgtgagaattaaagttgggaaagtggtgtataccatgtagcggatatgagtgaaaagatccgttcctgcaattgtaggagccaggtttgtcgtgtctgagagcggggacattttatcgccgaaataggctcctgagatgacggcacctgctacaagcccctgatgaagtccgaaagcattaccgactcccacgatagctacacctacagtggcgatcgtcgaccaggaactgcctgttgccagagatacaatagcacaaaggacgacagaggccaccaggaagtaggacgggtgcatgatatctactccatagtaaatcatagctggaatgactccgctcagcatccaggaaccacttagcgaaccgatcaataacagaataagtatcgccgtcatagccgaatcaatggtctgcaatatttttcgttggatttcatgccagctgacatgattgaaaagggccaggatgctacagatacttgctgcgatgattaaggctatttgattagagccccccaaaggatcgtcgaaataactgacattaaacgagagtagggcgatcagaacaatcaatggaagaattgcttgtatcagtgaagggactttggtctgagttttcattttgcgggaaataagtcggttttgtagttatacttttggggtatagatttgtttgtgccaaaaataaaaatccgggataaattttgcgatttatttattttacctttgtatttcaaatggatgaggttatgaccagaaaagattttgaagtgatggcgcctgtaggttcttatgaatctttatatgctgctttgcagggaggtgcggattcggtttatttcggtgtggaaggattgaatatgcgggcacgttcgtcagcaaatttcacgctggaggatttgaaaaatatcgtatcggtttgttcggagaaaggggtgaaaacctatctgactgtcaataccgtaatttataatcaagagttagagaaaatgcggcaagtgatcgattgtgccggtgaagccggagtcactgctatcattgcatccgatttggccgctattttgtatgcacgttctgtaggagtcgaagtgcatatcagtactcagtgtaatgtcactaatttcgaagtagttcgtttcttcgcccaatatgccgatgtgatcgttttggcccgcgaagtggtattggagcaagtcatggaaatccatcgtcgcatcgtcggggaggatttacggggaccgaatggagggctgatcaaaattgaaatgtttgctcatggggctctttgtatggctgtttcagggaaatgttatttgagtttgcacgagaaaaacgcttctgctaaccggggagcctgtaatcagatttgccggagagcctatacggtcaaagatcgcgaaaatgaagtcgaactcgatattgaaaatgaatacatcatgtcgcccaaagacctttgcacaattggttttatcaataaaatgatcgacgccggtgtgcgggttttcaagatcgaggggcgtgcccgttccgccgaatatgtacgtacggtttgtgagtgttataacgaagcgataaatgcttatctcgacgatacctattcagcggataagatccggatttggaaaaaacgcttggcgacagtcttcaaccgtggattctggaatggatattatttggggcaacgcttaggggaatggagcgaggtatatggctcgaaagcgacgaaaaagaaaattctgcttggcaaagtgaccaattattttaccaatttgcaggtcgcagagtttaaactggaatctttcgacttgaaagttggggacgaaatattgatacaaggtcctacaaccggaacgattcaaatgaaagtacctgagataagggtcgatttacagccagtggaaaaggtggaaaaaggaatattgttttcggttcaggtgcctggaaaaatccggcgtggtgataaattatataaatgggtagatacgactccggaattgatgcaatgacgaccattttggataaaaaagaatagcttgttataggccgggatactcgataaattgtaccggctgtatggactttgactaatttattctacctttgtagcctgatttattgaaattaaagcaagagaagtatgaaaaaatgttttttgtatctgttgatggtcggaggattgggagcttgtattcaaagcgagcctttaaatgcagaagcagatattacggcatgtaagattttaaatgcaaagggatcaccggaaacaaatattaaaggaaatattatcatcaacaatgctcaggtgctggcccaggctaatccgagtatcgacctgacaaaactggctttagaggtgaccttgacggaaggggcaaacatttcgcccgatccggcccgagtgatggactattcgcatccccagaaatttaccgtaacctccgaggacggaaattggcataaagaatattcggtgattatcgatacattcgatttgccgcttcgatatgattttgaacactatgaactgaatgaaacggggaaatatcaggtgtttttcgaggaaacacaaggtacagccctgtttaaacaatatatttgggcttccggaaattcaggttttgccttgacaggtgtcggccggaatccgcaggaataccctacggtttctatcgaaaatggaatagatggaagcagagccatcaagttggagacgaagagcacaggacagttcggagagacggttaaaatgcccattgcggcaggaaacttattcctgggcagtttcgatgtaaataatgccgtacaaaaaccgttgaaagccactcgtttcggattgcctttcgggaaaaaaccgctgcaactcaagggatattacaagtacactcccggtacccaacctttcaaggcgaaagataaaaatggaaatactgtcacgattcccgggcaggaagatgagggagatatttatgctgttttatatgaagcggcagaactcgatggacaagcattggacggaaacaatgtgctgaccagtgagaatatcgttgctttggcccgggtagaggtagaaaagaaagatgagtttactgcatttcatgtcgattttcactacgaatcgcgcataccgatcgattggccgaaattcatccaggaccagcgggatccgtcggatgatggaacggctccttatctgtctttcagcgaaaaaaaaatgaaaagttacgagtataatttggcagtagttttcacttccagcaaatatggggcatattttgccggttctgtagggagtaccttgtgtatcgataaagtagagatcgtttgtgaaaaataagaattgagacaatgaaaacgataaagagtatatacctgattgtttttttactggtagcaggaactgtttttgctgaaaataagaaaccgggtgctttggttcgctctaccttgaaaggattggagtatcggattaaagcaggtgtcaatatcggaggaacttctccattacccttgccggcagaaatccgggaaatcaatagttaccggccgggtgctcagcttgctatcgaaggaaatatcattaaatggttcgaccggaaccggaaatggggagggctgttcggaatccgcctcgagaacaaagggatgaaaaccgatgccagggtgaaaaattattacatggtgatggattcgtatgatggggaagtgctggggcatgtcgaaggcaattggacaggaaatgtaaagacgaatgtaaaaaattcatatatcactctgccttttcaggttatttataaagtgtcaccccgttgggatttgaaattcggcccgtatatttctattctgactaacggagatttttccggagtagcctatgacggatatatccgtgaaggagatccgaccggtaccaaagcgaatgtcacggaagcaacttatgatttttcgggcgacttgcgtaaatttcagtggggattggatgccggagctgaatggcgggcatataaacatttgagtgtttatgcagatctgacctggggattgaattctatttttcccggtgattttgaaagtatcagctttaagatgtataatgtttatctgaacttcgggttcggatatgtcttctagtaccggattcctttctttaccagatattgttttaaccaggtccgtaaagaaaggaacccgatcttcactaattgcggataacttttttccaattcctggctgaccatcagaggccatttccagttattgtagctgatttgtaccaaaccggtcaaagcaacgacaccgcagattccccaatcggtataatagagagaagtcagggaaaacagggcgataaaaaagccggaaatcaaggcagctttcaggtaaggaacttcattacgggtagtaattaaagtggctgccataccatggttggattctaaaaattgtacaaacaacatcagtaaaagaggacctggaggtaaaagttgggttttactgtgaaatagttccaaagcccagggacctaataggaccaggcataaggctccgaggatatatagaaggtagaatacaaaaataccttctccgaatattctgcggatatccgggaggttattgtcgatcctatccttgtagatttcaggaatatgagtgcctaaataaagtggggatacccctgacagaatatttataagattaacggttagaccataactggcaactgtttccagaggtaaaaacatagatatgaaaagcaaattgcctttttggacaaaatatccacccaaactgcttaatccattttttttggcatttacccataaaataggtaataatttttcttttgttgcttgggtattccggaggattttgcggagaccgtttcggtagaaaaaatgaatcgccaccaaccgattgataataatagatagaaagttggctgtggctactgcaattaagccatagcctgcaatcagacccaaggcggctaaaacgagataggtggaacgggtgataatgatgagttggttgttttcttttacaaggcctctacccactagtaatgcattataataggaataataaagatttaaaacggtggaagtggtgtatataaaccatgaaatcatgatttcttcattagctgcgatgtggtttgttcgatcatcgatataccaactacctgcagtcaggaggagaaaaatgaccaaaagcgaaatacctccgtaaaaacgtttcatcacggaaatcatgtttttgagaagcgggtagttgggatgatccagatgagtttggcctttatccagacctttggcctgaagttttacagcaccactgaatacataggcgacatttcgggtaaaagtcggctgaaaaccgaagtcgatcatttgtaccagactcgaaatagtcaggaaaatgtaccagactcccaatatatctgccgggagaagttttaatatcaccgggagtaaaagtattcctgctccgatgttaaagaattgggcaatgtatccccacaaaacatcttttttggtgatatgaatttccattactttttttacggtaaatggtgaaaatactttgttaggcctgatccgaggaacacttccgattttttctgatatacccgataatacttcccagaagagctaaaattaataaaatggaactgatttgtgagatcagagctccctgataagcagatcttggattatacactaaagtaatagtatgttcccctgccggaacagacaggcctcgtaaaatataatcggtacggaatagttcaccgggttggtcgtcgatgtaagcttgccagccttcgggataatatacttcactgaatacagccagttgttcctgggaggcttttgttttataagtcagtttattaggagcgtaggaagtcagttgaatcgttgcggttgaatcgaaccggatgttcttacctgctacagcctgggcaaaatcgcggccgataatagctgtcttttcaggatcgatagctttcaggcttaaaatttcttcatcaggagtgtcgacgagttgataattttcgacaaaccaggcatttcctgatctggcggtgttttcgatcggtgtgctgttggctgatagaatgatatatttggtatttagcatgttgatgacagatagcttttgtaagctcgaatctatatctgcccgtgtttgtcctctttgcaaatcattggctaaagactgaatttcaggaaccagatgataatcgattatatcctgataacgctgtagtttagcagcactatatcctccgattgttttatgataaaaactggaatgtgagtcgttaaaagtatttacggccaaatccaaaacccggtaatggatatcggtatctttcaatatctctttatcgacaggccgtaaattaaaattgttagtaaattcacgtggtgtaacgaaatggtcgttatttagataccgtttgtctacactccacatatctaagataataagtagtccgagaagggttatggacgaggataattttatttttttcatataaccggcccaaatggtagctgcacctgccagaataaaaagtaatgaacggaaggcatcacttcgtagcatactttggcgatcttcgggtagggcttgttgtaaccaatccgggaattggctgtctgccggggaagtaaaactaccggcaagacttggaagaagagcgaataacaaacaaaaaccacctgtaatccccaaggctagtttcagtcctttaatgactcttttcttctcgattttatccgagaaaatctgatgaagactataaaatcccaacagaggaatagttaactgcaggatggttagaatcatagaaggtacccggaatttgttatatagaggtacgtaatcgaaaaacaagctggagagccacataaaatgttttccccatcccaatagtaaggctaacagtgatatcccggcgatccaccatttggttgtgccttggagaacaactaaacccaatacgaacaaaaacaccgaaatcgctcccatatacatcgggccggcagtaaaggcttgaggtccccaataggtcggcatttgtttgatgacttgttcagcattcggaacccctccttgttttaagatttcatatgttttggattttttactgagttcactggctgaagctcctccgttaaaattaggaataagcagattcggcgtttcttctataccgtaactccaggctgttgcatattctttattcaatccaccctgggtctgattcccttgggcatgagccatttgtaattcagaaccgccccgcatcgtgtatttactgtattcccagttgggccaaagtcggttgacgttcgtacctgctgccaatatcgtggccaacaacacaaaacaagatgttttgatgaaagcaggtaaagtcttgtttttaatagcagagaccaattgagcgataacataagccagaatgatcatacccagataaaaagtgatttggggatggttggctgcaatttcaaaagacagggcaaatccgaaaagaaccgcccctaaaaatgcttttttacgataagcatagaccactccggctaataccatcggcataagagcgatagctaccattttcgaattgtgccccacttgcaggatttgaaagttataggcacataaaccgaaggccaaagctccgacaatagagagccggacattgattcccatcgcaagcaacagcaaaaagaaactgacaaaagtcaagatcagataagaagcagggcgtggaccccaaaataaatgattgtagatagtttcaagatagtttcctttgtaatgagctccgatcatggttgtcggcatgccactgaacatcgaattggtccagaaagattcttctcctgtctgttttttataatcgtctctttcttttgcagctccctggtaagaggaaatatccgcttgattgatgattttcccttccaaaacaggtgaagcataaatataagcgatcaggataaatataataagcgcaatggcgtaaggcaaacaagatctgaaattgatttttgtcatgactgtacttttgaataatgaacaaacaaagataaagaattatttggtatatgaaattgccggaatgatttgattcttaaatagtcgttagagccgaagtaaaagccataaagcggttttttggattttcaattttcgggccatccggaccgaaaaggggacctcccggaccaattgccgtatggttggatttttgcgtatggtaactaattggataaaagcctgataacaggatttgtgatgtatttcatttttcagggtacgccataaaacatgtaaagttgaaaagaaatagtcccataggtgttcatctctgaggtgatgggtagtgaggaagtgatccaagtacattaaatggttgatcaccagtcgggttgaattgtagatataactgcttgcctggtttttttggtgaaaaacatgatgatagagtatcaggggaatacaagtgattcggttggctgcatgaaagacctgaatcaaaaaaagcaggtcttcgtatgtaatttctctgttatctgaaaaccatatgttgtggttttccaagatttctcttttgtagaggatgtgccacatatacccccaatgggtaaaaggtctccactcctgctcctttttccagtcaccgatgaggtgggagaagatttcttgtttcaattgttcttggttaggacagtcagggtaatatggatgaggaatgatccgatccggataaatgctgtcgaaattggagatggcaatatcggcctgatcttccctggccttttggtataatttttcgtacatatccaattccctccagtcatcgtggtccgaaaaaccgatgtattctccccgggcgattttaagtccttcattgcggcttaaaccgatattcagattttgttcgttgactatcagtcggatgcgtggatctttttcggcatactcccgggcgatccggtcgctaccgtcggtgggacagtctagaaccaaaatgatttcgatatcctttaatgtttgattaacaagtgtatccaggcatttttccaggaatttgccggcattataaatggggacgatgatacttactttgggtgtcatatacctgtttatatagattttgacaaaggtacggataatattgtgagtttaaatacaacaaaggcatttgcatttgagagaaagttcggttattttcgcctattttaaaattatatttatatgaaaataatttacaatattccaaatataattcgaatggccggtatggagcgtatactggcaattaaagcaaattatttggccggattgaccggaatggaagttgtgattataacctatgaacaaaaaaatctacccttggcttttgatttttcggataaaatccggttttatgatttggatatcgattatgcagcatgtaggggaaaaaatattttttggaataagatacgcagaataatttatacgaaacgccatcaaaggcggttagaggaaatattattgaaagaaaagcctgatattacgatttccatgatgaccggacgagagcgggaatggttgtatcgattgaaagatggaagtaaaaaaatactggaatgtcatttttcttattttagttatcaaaatgtcaaaggaataattaaccgatataagattaaaagatttttaaacaagataaaatactatgatcgtctggtggttttgacggaagaagaccgaaaagattggggaagaaaggataatatcgtggttataccgaatgcattgactttttatcctaaggaatctgccgatttgtctattcccagagttattgcagtgggacgtctgtcagcacaaaaaggatttgatcgtttaatcgctatttgggctgaaatagaaccttattttccggattggaaattaactattatcggctccggagaattacaagatactttggaacggcaaatcgggttattgaagttaaaatcggtagaaatatgtccaccacgggcagaaatcattcgggaatatttaggtagttcggtttatgtgttgacatcccggcatgaaggttttcctatggtattacatgaagcgatggcatgtggattacctgtagtggcttatacctgtaaatgcggtccccgggatattattcaggaccggcaggatggtttcttgatagaggaaggcgatgagaacgaatttgtaaagcgattgagccagttaatggcagattcttcactgaggcagaaagtgggaaatgaagcccgccggaatattattcgttttgctttgccatcggttatgaagaaatgggaaaatttatttataactttagcctctcaagatgagtgatatgatttcaattattatacctgcatataatgctgctgattatctggcgcagacaatcgaaagtgttttgaatcaaacctattctgattttgaattgatcttgatcgatgacggaagtacggatcgtacacgtgagattattaaagattaccaatgcaaagatgcgcgaataaagtatttttataaagagaatggaggagtatcttcggcccggaatctaggacttcaaaaggctaccggtgatttcgtgtcttttttggatagtgacgatctttgggatagacgttttctcgagtcgatgtatcataaattagtggctggaggggaattagcctgtttttgtggttatattgaaaaaagaggggataccatcacgaggtatcccggccattttggagcggtagacgtattgaaggagaagttgagggtcggttcgtttcgggtttctacagactgttggctcatcgatcgtaaatttctttccgctgagcatattacttttacagaaggatgtcactacatggaagatttagagttctttgtcaaattattatttagagctactaatcaacggattacttatgttccggaatatttgtcttattatgttttgagaaaaaactctttatcttatcaagacctgatggttttgcctttatctgttatgaatcagattctcgatgtattgaaacgaatatataattggatagagattcagcatgctgagtcggagtattacctggagtgtttgaaaatatcaataagagaacggtatattaaattcttatgggatttattgttgcttgggaatgctgaggatttcaaaacgttgttaagctggtattatagagataaggaaaagtatatctccatgaaattatccttaccttttaaatataaaatatggtcatgggctgtctttccggtctgttgccgttatgtagccctcttcgttctacgtccatatatacaatacaaaagaaaggttaagatgcaaaagttaaaagcctgaatagcctgttaatcattcaatatctgactgataaatcggggataattttttcccgcgttaaatttttcttcccataaccggcgaggatggaaacggtctttatgttcatatacccggacaatctggtcggccaattcctgagcggaaaagtgaggatcaagtaatactcctgattcggaagtcacgatttcgttcgttcctcctacattagtcgctataacagggatattgaatgaaatggcttccataatactgacgggaagaccttcactggcactgacattgacaaatatatctactggatggtgaagataatgtccgatcacttcccgatttgtaatagctcctgtcaggtgtacggtcagattggctggtagttgttggagctgttgttgtaaagcattgaatccttttcctcctccgatgtgtgtccattgaataggacggtcaggaatcaaaagtaaggattttaggatcaaagaaacccgttttaccgggacaacattagaacaactgaggatatgaataactccatcctcgttttttattttggaaatcccatggtctttagtacctaaataactgcaataggcactgaatttatattgtccaaaattctttttcgcatattccaaaccttgtttggagatgaaaacagccttattcaggctttcgaatacttcctttctgaaagggatatattgatgtggacgtaaatccgcatataaatcagttctgtgaaaacggactatttttttgtctttattgtggatgaaaggcaggatgtaggccataccgatgccccaataaaaatagacagtactttccgtggactgccggtttagccgtttgaagtttttatcggcaaggatacaccggcaggtaatggcggtagcgatatactttttgaatttatacagagaagtataggctttttccgatatcaattttttgaaaaaataaaagagtggactgaaacaaaataatcctttgaatacaagttcccccgaacttcggaatatcggagggaaaacgatacaatttgcaggtagagaacgttgctcctgggtggaactggttttgggcagaatgtaaatccggtcgaattcccgtgataaatattcgatttcattttctataaagctttctccttttccgtatggaaaactttcagtgaaaaaaatgagttgtttcattccgggcatagggattagaa

SEQ ID NO: 6057 - DNA, 4601 bp, Unknown
  gut microbiota DNA sequence
gccttaccgtctccgtaagggtttacggcttggctcatgcgggtgtattcctcaggattgtccaacagagaagaggctagccggataatctcttcggaacgggttcctgtgagtttggctgtacctgcttccaaggcttcagggcgttctgtcgtttcacgcataacgagtaccggttttcctaaaccgggagcttcttcctgtatacctccactatcggtcaataaaaaataagcgattcccatcaggaagacaaagggcagatattctaaagggggaatcaggtaaatattgggggtggaatgagaattacccagtatttcagtcaccggctggcgtacattcgggttcaaatgcacagggtagacgaaatctacttcaggatattggctggccagctgtttgatcgcttgacagatatgcatgaaaccctcaccgaagttttcacgtctgtgccctgtaatgagtactaatcttcttttttgttgtttccagttttctaatttttctgatggaatctccagcttgttgaattgttcccttaaactttcctgtgtggttttgtcctgttctatttttcggttaatccacaatagggcatcgataaccgtattgccggtgacaaagatgtgatcgggccgacagttttctgccaatagatttgcccgggctttctgtgtcggggcaaaatgccagtcggcaatccggccggtgatctgccggttcatttcttccggccagggattataaggctgatgtgtccgaaggcccgcttcgatgtggccgacaggaatctgttgataaaaagcagccagagcggcagccatagaggttgtcgtatctccgtgtactaataccagatccggcttggactgctgcaatatatcccgtaaatttataagaattctactcgtaatatcatataaatcctggcccggttgcatgatattcaaatcgtaatcaggacatatatcgaaaagttttaaaacctgatctaacatttcccggtgttgccctgttacacagatttcgattccgagcgaacggctttgcccggtttctttgattaatggcgccatctttatcgcttcaggacgcgttccgaaaatgaataagatttttttcatccaatttattttttgaatattccacagaaatcaaggataagcttactgttgtcataaggaagtgttttaaactctttatgagcaaccagaaaagcgataatatcggcctgtcggtaagcgtatccggtttccgacaattgaaattgtgggtgttgcgaaatattaggttcgacaatcagacaggcttcgggaaattcagacactattttttctgcgatatattttgccggactttcccgtaaatcatcgatatctgccttgaaagcaagtcccatcaaagctactttcggctttcttttattttcaagctggtaagtaagaatcgtatttttaattttttctgcacaccagaatgctttgtaattattaatttcccgggcttttccgatcaattgcgactctaaaggaaaatcggaggtgatgaaataaggatcgactgcaatacagtgaccacctactccggcgccgggttgaagaatattgacacgaggatgtttgttggccagttggatcaattcccatacattaatccctgctttgtcgcatataatagagagctcgtttgcaaaagcaatctgtacatcccgggaggaattttccactaacttacacatttctgctgtaggggaattagtggaatgtaaggagccgctgacaaaatgggaatagaacgccatagcctctcgggtcgattccggcgtataaccaccgatgacccggtcattgtgtttgagttcgtacagagcgttgccgggcagaatgcgttccggacaataggcgataaagatctgatcttctaactccggacgttcactgaaaatcagttgtgccattttttgagtggtaccgacgggagaggtcgattcgagaatatataggtctcctttctttaagtaagggataatctgacgtgttgcggcagtgacataggatatgtcaggctgatgatgttcattgaacggggtcggaactacgatcagaaacacatcactcggactgggagtgagagaagcttttaaacggccgttccggatatttttctctacaatttcctgtaaacctggctcctgattgctgatgtcacagttattgatattattgaccacattttcattgatatcgactccggtcacttgtaggcctgcatcggcgacgagtgctgctgtcgggagaccgatatatcctagacccataaacaatactgacttctgcataatttctatttttgttcgattactctattgatgaaaaatatgttcaggatggcttatttactaacgtattgaaaatatcacataattgtccggtttcattttttcgttcgaattgctcgatttgaaagctcaagccaggtaaaacacctgaggaaagacgtgacaataaagtgaaaatttcttcttcattgtggtgagcgatacaaaacccggaattcgtggttttgataatttcaccggcttctcctgtgggatcccctaagcaaagaatcggtttacgggttcctaaatattcaaaaattttaccggggacaatacctttgccattagcgacctgattgatcactaataacaaaagatcggattgttgcaattctgcaatagaagcaatatgaggcatataaggtttgagcatcactttgttgcccaggttcagccgctgtatttcctgtttcaattccgggcatgtattcccgataaattgtaattttatattggaatgttctaagcggctgagagcacgtaataaagcatggggtattctgtcctcggatagttcccccgtgtaagtgatcaggaaatcctctgtgttcctggactttggctttgggaaatcactcggatcataaccgttatagatgacttcgattttccggtcgacatgtgttttgatacatgtcgcgtagtcgttggccgcagcaacaagtcggtcggcagaacggaaaaccgatttttcaaaatgactgtcgatttttcttgtcaaccaggtacgtttgtaagattgataatgaaccaattcagaccagggatccctgaaatctgcaacccatttaatcttattctgtttagctattttttgtgctataagctgtaaactgtgtggaggagaagaagaataaatcaaatcgatgtgctcttgttcgatgattttttttgctgctttaactgcataggcataccatccgatccgggcatcgggaatgaataaattcaggcgtatccatttggctaaacgttcgacgaaagttttatccttttggccgaaaacattggcattattatgtgtatttccttttttaccggttaacatccggtaaagttggaagggttggaaagcttttgttttatatacctgtatgttatccggaatttcttggatcagtgaaggatcgatagccggatattccccgttttcaacagttaatataacaggttcccaaccgaaaaacctcatgtattttacgaatttcagagtcctctgtatagccggtcctccagctggtggccaataataagtaacaattaaaacttttttcaattcagacattgggtcgattctatattgacgtagcaaagttaaaataataataatacatatcatatttctttgtctttacaatcctgattttccaaatgaaaaaatattctttacctttggaaaaattaggaattggatttatgccttatttgtcattgatcgtacccgtatataatcgtccgcaagaggttcaggaattgttggaaagtctggcagctcaggataaccgtgattttgaaatcattattgtcgaagatggttcgacagtacgttgtgaccggatcgtggagcagtataagtctgctatcgatatcaagtatttttttaaagaaaatagcggacctggcctgagccggaattatggtgccgaaagagccgaagggaaatatgtggtctttctcgattcggattgtattattccccggcaatatactcaggtggtacggcaagcttgccaggaggccggtgtagatgctttcggaggacccgaccgggcacacgattcttttacgaatatacaaaaagccattaattattcgatgacctccttttttactacgggagggatacggggacaaaaacagtcgatggaaaaatttcatccccggagttttaacatgggtttttcccaggaggtgctgaaagctaccgggggattctccggtctgcgttttggggaggatatcgatatgagtatccgcatcatggctgccggatttaaaacctgtctgttgcccgaggcctatgtttttcataaacgccgcacctctttccgaaagtttttcaagcaggtgtataattcgggtatggcccggatcaatctgtaccttttacacccccattctttgaaattggtgcatttcctgccggcttgttttgttatcggttgtttgttgtgcttgttgggagggatatttttttcttggtattgcctgcttcctt

SEQ ID NO: 6058 - DNA, 4063 bp, Unknown
  gut microbiota DNA sequence
tagatttcgataaggccgatttttatgccttttcttcccggagaacagtggtgtattatgccgtaggttctactttgcatgcttacgattacaataaaggcaatgaacggcattacactttcgatatgggcgaccagattacaatgctgtattgtgatactgcgatcgaaccgaatgagaatccgctgtatgtggcgacttacaatgcgacaaccggaggaaaactgcaaaaatatatccagggagtgaatccggataaggtagaactcgaggcggacgaaaaatcatgttgggaagggcttatgaaaatcaaaaaaatgagctggagggctgttgaataatttaatatttatcctatgaaaatcataaaattacttatactgttactggtttcttgttctttatcggcaaaggccggagtagtgaagatatccggttcgctgaaacaattcggattggaccgggtatcgatgaatagtgatgggatcgcagcagaagtctatcatgataggacgatagaaattatactcgattccaacggccgtttcgatttaaaattgaaattaaaacaaccggcctattataaagtgggacataataccttgtatttgactccgggcgatgatctggagattattttcaaccggaatactacgaaaaccacttttaacggtaaaggaatagaagccaataactatttgcgcaacagtgcgaaactgagcggttgtgagatcgctaaaataggacgggagctaaatgaattcggccttcctaaagaaaaagtgagtttcgaggtttaccgctataaggtggacagtattgtagatgccagcctggacgccttagcccatttgaccgcagtgactccggaatttcgggaattggaacaaatccggctggaagcctgtcggctggcgacttatctggattatttctctgtggggcaattgagtaactacgatgatgctcctgaggtaaaactcgaaaagaaacaggccttttatcgggaagtagcgacactggccgaacctttgttaaagaagatcggtgcttccgatcgctatcttgaaatctccgatgtacggaatatattacgggaatgccatgagacccaggtgtttcagtttgctctttctccggcttttagggaatggatgacggttttaaaaaatgcagaattgttggatcagggcttgatgcttaaggattatcggatgtataccgatttttcccgtcagatccggaataaagagttacgtaattcttttcaggcaaaattgcaagaacgggcaaaattgatggaaggccggccggctccggatattccttttaaggatatcgacgggaaagaaatgcggctgagcgattttaagggaaaggtgttgtatgtcgacttttgggctacctggtgtctgccttgtttgttccaattacccgagttcgagaaactgagtgaaaagtatccggatatccggtttatcggtatttcgatcgaccagaatgaaaagctttgggtcaagagattgaaaaaagacggtatgccggctcatattcaggaagttttggccgatccttatgtggtaggcgatgcctgggacattacttccattccccgttttttgttgatcgatgaaaatttcaggatcatcaatgcttttgctccccgtccatcggatagggaaaaaatagaacctttactggcaagataaaccagagggacgggggtgtcggactatataggtttataatttctttacagactttataaacctatttaattcgccgttttaattgtatctttgtacccgatgccggagattgggcagaaaacaattaagattacatgaattatggcggatgataaaaaaattattttttcaatggtgggggtcagcaagacatttcctcctcaaaaacaagtgttgaagaatatatatttatcttttttctatggagcgaaaatcggtattatcggtttgaacggttcgggaaaatctactttgttgaaaattattgccggtatcgagaaagattatcagggtgaagtggttttttctccgggatattccgtagggtatctggagcaagatccgaagctggaatccggcaaaactgttaaggagattgtgcaggagggggtacaggatattgtggacgctttgaaggaatttgaggaggtcaatcaaaagttcggagatccggaagtgttggaaaatccggataaattgaatgctcttatcaatcgtcaggcagaattgcaggataagatagacgctacggatgcctggaatctggacagtcgtttggagcgggccatggatgcgctgaggtgtccccccgaggatcaggtggtggatacgctttccggtggagagcggcgccgggttgccttgtgccgcttgctgcttcaacaaccggacgtattgctgttggatgaaccgaccaaccatttggatgccgaatcgatcgattggttggaacaacatttgcaacagtatgccggaacggtaatctgtattactcacgaccgttatttcctggatcatgtggccggctggatactggaacttgaccggggagaaggaattccatggaagggtaactattcgtcctggttggaacaaaagacccaacgaatggcgctggaagaaaaacaggccagtaagcgccgcaagacactggaacatgaattggaatggatcaatatggccccaaaggcccgacaggctaaggggaaagcccggttgaaatcctatgagacattattgaatgaagatcagaaagaacgggaaaccaagttggaaatttttattccgaacggtccccgcttaggaaataaagtgataggagcacaacatgtggcgaaagctttcggctccaagttgctgttcgatgatctgaatttcacccttcctcccaatggtatcgttggagttatcggtcccaatggggctggaaaaacaactctctttaaaatgatactggggatggaaagtatcgataaaggaacatttgaagtggggcaaaccgtgcggataggatacgctgatcagacgcacaaggatatagacccgaaaaagacggtttatcaggtgatctcaggcggtcaggaatcgatacgggtcggaggaagagagattaatgcacgtgcttatctttcccggtttaatttttccggagccgatcaggaaaagcaatgcggagtgttgtccggaggggagagaaaccgccttcatctggcccttaccctgaaagccgatgccaatgtgttgttgctcgacgagccgactaacgatatagatgtgaataccctccgggctctcgaggaaggcttggaaaactttgccggttgtgctgttgtcgtctcacacgaccgttggtttctggatcgtatctgtacccatatcctttctttcgagggagattctaatgtggtcttttacgaaggatcgtattctgaatacgaggaacacaaacgtgcacagcttggcgatatccagcccaagcgggtgcgttaccgtaaattgatcgccgattgacagattgcgggaagccttttgtcataaaagtatctctttgatcgtaaagagatactttttatatttgtccccgatgaacgatttcggaaatatagatccagatttacaactttttggggcggtcagaaagggtgaccggagtgcttttgagcagttgtttcaaaagtattatacagacttgtgccattatgcctggacttatctggacgaaaagagtgaaaccgaggatgcggtacaggatgtatttatctatatctggaacaaccgggaaacgatccgtttgcaggaatccttccgggggtatcttttttctgccgtcaaacaccgggtattgaatattttgaaacatcaacttgtcgaacggactcattcccgtttactgtccgaatattgggacgatctgttgaaatccggttattccgaagaagaacagacccagttggaacaaattcagcatatccttcaatctttaccccagcaatgccgtattgtgtaaggggggtaaaacgaaatgcgataaattg

SEQ ID NO: 6059 - DNA, 137 bp, Unknown
  gut microbiota DNA sequence
gtacagaaaaccgttacctatcttgaagaggagaatgcggagaatgtggttgctgaaaagcccaaagctcataccatactggtggtggaggacaatgaggagcttttgcagttaatggtccggctgctgaaacgtga

SEQ ID NO: 6060 - DNA, 284 bp, Unknown
  gut microbiota DNA sequence
ctgagttccaacttgttcttcacacacctgcaaaactcgatgccgtccattacgggcatcatcacgtccgaaacaatcaggtcaatatcctcattgtcaagcacagtcacagcctcctgaccgttttcggccgtatggacattgtattcacgtttcagcagccggaccattaactgcaaaagctcctcattgtcctccaccaccagtatggtatgcgctttgggcttttcagcaaccacattctccgcattctcctcttcaagataggtaacggttttctgtac

SEQ ID NO: 6061 - DNA, 802 bp, Unknown
  gut microbiota DNA sequence
caaatataacccggtcgttgttccggatggccttgattgctttctcggctgtggttagtttttgtgtataaagttctttccagttcatcatctatctattttattgcggttgagaatctgacgagcaaagtctaatataccgggatctatttcgttcaccagaatgactttcccgatcttgtttcccatttgttccgagagaatgcgttgcacggtctgttcaatcgtgatttgtgcggcagggcaccccttgcagttgccgagtagagcaacccgcacgtctttcttgcggatttcccgaataacaatatcccccccgtggtcctggaggagagggcgaatgtgtgtttttatgatctcctccaggtgcttccacagagtcgtggggtcttgattatttccggttcttactttcatcgatccgggcaatttgttttgctagttctttcttgttttcgaggttcccctgccgggcaatcatgattcgttgtgcttgcggggagccggctccgtgcatggattccgtgcggtagcctaccgccgcggtcccgagcgtgatgttctcgatcaggcgaagaatacgcatccggttttcagtgtcagtccccgtggctccttgcaggtatttttttacatatccgccgatatacgggtctcttaaatcctgggctgaaggcatggttaccattaatcccccggcaatatcttccgcgagtctggcaatttcatacgggaaacgagtcacgttctgtttgcagacattggcaagtagcaaattgatctggtagttgcccgccaatgt

SEQ ID NO: 6062 - DNA, 11659 bp, Unknown
  gut microbiota DNA sequence
attttgcctttttggacaccctcgtgatattagtttgatacttttttacgctgaatttcgtctaacacgatttccccgtataggaataatacagcttctactgctctatccataccttcattgaaattaatctccagatgttctacgggtatggtagaaaaatacatgaaatcttcgacgttgtcacggagttcctgtaactgggcaacaaactgaagaattttatttttgtccattataagccaccttttctttgtgttctgcaatcatccggcctgtaagttcatgaatagctataatttcgtcgtacgagaatgtttcttcgcagcaatatcccttccatgtgaagaaataatactcttcccttagctgagaaccgtagataatggtttcatcccgctggatcttgattggttcgttagttttcataaactacctcctttctgacaacttcgatcagaatatgtccaaaccggataaaatctgaaaaaatatcctcgcaaagttcatgggcaatcagttcttcattcgtataatctgataaaggcagattggttgataacgtgggatacattgccagaatacaggcattgacttcttcaagtttgtgtacacaagtctctaagatttgtttttgctccgcgacagtgggagaggtgtttttcttttccataatactgagttttttgcatttttaagcacagaaaacggcgtgcctgtcccgttgcaaaaactctcagtagggtttcctttcgccattacagctaaggacgggggtacacgccgcatgcgtttatcatgtgttgagtgatagacataaaaaatccgcctatggatttaagggcggtctatctccaccctactgagtttgtttttgcattgcaatgataaggaaaatttttgaggtggcaaagcgtttacggagttttattgaattttcatccgcttgaaattaagaatagcctgatcagctttgtgttcagcaacaagatccgataagttttcgaatctggattgcaatggaccgttgaaccaatccagtttgcgcctggagataacgccgggaatggttctgaagtcggttgattttgttttgggatttctggaatgatttatccgttcgcctcgcataacgacaccgtttttggaaatataaccccgtccgactcctttttgcaggaaaacgccatgcaggctgaaagaaaaaccgatccggtcgatttctccgaatgtttttgaagtattcattcggaatgaacgggccagtggttcttcttttgcacctgaagcatgccggccctttgggatctttcccaggatggtctgtcgggtccggtgtccccaggagacgatatctttgttgaatgattcaatattttcaatgatttccgtcatctttcatgagttttgcctgacaggttatttttgtatgagtcagttcgaatgtgaattgtttggggatatagacttgattccggacccggatccggcggatctggtctcgtgtacttgcttcctgatatccgaaaatcggaatgatccgaaggatatcctcaatggaacatttgaaagaaaaagtatattcgtttgcgttttcaaggaaatcgtaccagggtttgagtagtttgttatatagaccgtatgaggtgcctatttttaatcccggacggtcggaatagacagttccattagattgtatttccgatgatgttcccaggttccgattcaatttatcggtaaaaaagaagattagtttatctgttttggaagcgtctggcgcgaaacgtggggaaacacctccttcttcgtaaaatggatagggggtatttgcgaaataatccattggcataggagatgcttcgatcgatacctcttctgtttttgagagatcgggattagttttcagagggaagaagctgttacccactcttttccattccaggatgtcgatcacgtcaccccccggggtgaaatcagagcccggaactgatttataatagctgtttacagcctgcacacttatcagtaaatcttcgcggcttggagtaccggcgtggctgagtgtcccgtaagcggttacagggccatcgaccttgtaatcgtcgtcactgaattttaaatgaaacgcggtcggttcgttgatcagaacctcatggccgtccaaaacaatatcggagagatcgaggattttcgaatccgcaatatctttgaaaaacagaaactgaaccatgttggtctggttatcgacaaaggtggtcagggtaaacatttgtttcaggccgaccaatacactatttacactaatggcaggcaaatgatttttgggatatatattattcttgtagtaatatatatttaaagatgatgttccgacgtattcttccggagatgtatcgagagtgtagttattgaagaataataatgaatcgaaaatcagggaattttttgctaaagctgaatcgctatatgctacgaaaaaatcttctgaagtaaatattatttcgaggattttaaatacgtagaatattggaattgcactttcgctgtaccggttctgttcggtagatggaaaacggttgacaattttacaccatgccggattggacgaaaacagttccggtgcgtatattttggggagtgtaaataatttatgtgtgattcccgggatttgggatgtattgttgattccagagcctgtaggaactaattgcaaggtaggaaatgtgaagctatcaatattcttatcggcaaaatcggcagggagctgtcgtaaagttacagcacatcggaagacttcagcaacagatgttacaatcagttttccggaaaacaggtttattccgtcaaagttcattcgccagggatattcatagaatttccccattacttcgatatggttgctgtaatttaaaattgattcatttccgagaaatggtaaatcaaaatgataaatgatacttgccggaatgacatcactttcgaaagtcgggaagttcagttcaatccggatatttaaatcatcaggcagagttaaagcctggtcgtttacgaacatttcaatcataatgtgtattaaaatgaaccgtcttttagacggttctggttatgcaggaatagggatgtctttgataaactggctcatatcatcgacgttgttggcagtaagtgcaaacatagtacttactttattttttaggcattcacccggaatttctccctgaaaattccattttgtaattggcgttttttcttggaatatttcaaacgaaaataattttccactaaaatatccgccacgagctgtcaaaatattcatcgcatcttcggtaggtgcgataatatcttctgttgattccattgctgactctaccagtatatcattcacaaatgcagtaaaaatcggagcattattttcaagtcctaattccatcctgacttttatgcgttcatttccattctttccagactgaaatataattgcatatccagttccgtttataaatagccaaagtacagcattactatcaatcaaactgaaattatataagaatgtatctttcattttaaattcgaaagtagaatccccaggaatcaaatccattacgcaaatcagctttttattatctgtcggcataaacaagttttttgtaatgccggcattaaaagacaggtaatcatctactccgtccggacaacatgcacgaatagtcgtgggaacaattacagttgggatattacctttataccggaatatcccaggtgttttgtatgtgaagatcattccggcaccaggacgctcttcggtcttttgtccggtggtcatcccgtccatactgtcaagaatagcaggacgtaattcatcccctaataggaaaaggccactattgcagtcgggaacgataaataccagattgtcattttttacaaggttaatgaaaccgagtagtttagattgtaatcccgggttgtaaactcttagttttacaataaaacttttcccgtccttttctccgacaccttcaaagtccagttttccttcatcgtcggtaatgtatagtttgtggaatgcttttccggctttcatttcgatattgccggagagttctcccatttgttcgatggtaatgtctgctcctgctttgggtcgtatgggccatttcgctacatccctatgaagggcatagtacacgatttgtccgatccctcccatattattcccggatggaaggtttttggtaatgtctgtaaagtcgattgccatgatatcaaattttaagtggttttattatatcgtctatatttgcaatgttatttgccatgaggtcatatgctgtgccattttcgattttattttttaatctttcggttgaagattctccgttaaaatcccacaatataaggttggttttcgtttcgctaattattttatctatactgaaactaattagtttactgtctccataaggaacattatttgtttttttgaataagtacatgaaattagttgtattggtaatttctgcctctgataacgtcagtgtttctggtaatgaattgatttttagcccaaattccagagtgttgttattgttggaaacagaaagctcaacttttacacgtttatcaatattaaccgaagatgattcctgataaaacatgtattttttgcttttacatagacatatgattccaaatatcaaaccgctgtaaaaaaattccagataaattccggccattagtcctaaggaaaacatggatccgtttccgggaatcatatccatcgaataaactattttctgcccagggtcgcatgggaatatattcatcatatttgtcagcgtcggggaagtaattgtaaaataatcatcgactccgtccggacagcaagccatgaccgattcgggcagtggttcaggagtaccggatgacagaagatgaaaattcaggtttgcaaatgaatatttgaatgtatagaaatgtaaatcgtcggcatccgcataaatgttgaatgtgcctttttctatatttatgggtaacaatacattattttctgaagtgtaaactgaatcagaaagaatgaattctttggacaggaatgccatatccctggtaatatatccggttgttacttcaaaaatttcagagtaatctgtgataataccctgtgcatatgaattgtcacgttggtatgtctctttatctgtcttgatagagttagaaatttctgagacaatgatgcagtcaataccaccgagtcggttaaggtataaaataggcttatgggcttttactatccggacaacatcataggtcatccttttttcgcacatagtttctccggataaccaaaatgaatattttttgaccccagataatttaagctgctgtaatccagttggaatggcgtacatttcatattgcgatgttgtagttatacgtccaaaagaagtggttctggtagttccgtctgtataggaaaaactggaattgatagtatagcttccgggattcagaattaatgctaccaaaaaatggactccgtcggctactgtttcgaaagcttgaaagtttgtcagaaaatcatttttccggataaattcagacggagaagccggaaattttccttttacagcagtcagtatatctgttgttgtggaattgatcggtatgtagttaccctcttcagtaaagacaactttatactgcaaagtgaagcccttcagtttgcagtattcgttagtctccaaaccggggaattccggcctgaggcggttatcgataattttgctgatatccatgtctacatccccgtcagcatttggatataaccgcatcaatggcaattctacgactttattggcggactcaatgagttgaatctgagctgtcattttatagttgatcgtattggtccggtcggtatgtaccaggaaatacatccggttgccggaagcggataattcctccggttgttgttttattgttattgccataccgtcagatcctccccgatcttcgttttaaatgtgaagctgatccggcaaaaggcataaccaagtatcgggtttataaaattaagcccttcggcagaattgatttcaaaactggtcattaatggaagtcgctgccgtttatcatcaaccattttggacaggatctgtcctgcaataatttcggtccgctcaagtgtctcacaccgctttgccggattgaaaatgtcgcatttatcgacaattgaaaaagcaccatgccggttcttcaggatgttgtccggagaagagcctgcaaagtcaaagtcgaagccttcgacaaccagacaggggaaagcctttatactggctgttttggaaagtagttcatcgagttcgtaccggcagaatgtttttatctgtttgtgcttatctgcaagttgctcaaaatagtcggctatgtcagtgtaattttgctgcatgttctctttgttttctggattccttaatctttcttgtgatgaacctgaacactgaatttatcggtatctcagcgtatttgtcctgatctttcagatcgtcaccgacgatatcgtcgaagatttcagcccaagaaccggacttttttccgaatgattgcttctgagccggaaaaataaggggatatctgtctgcgatccatttccgtaccaggccgtagtttaatgcgattgcttcaaaaatctgcagatcggcttttttcagtttcggtacagcctgatctgctgattttttatcgtatccggttcccggagtgtataaatgtgctatgaaatcacgtaagatgtccggatttgcggtttcagcatattgcatgtagaaactatctacataaatgaattgtaaaaatgtcatgtctgccagtttgggccggggagcataaagagtgcccaagcccgggaaacaaacagattctatattgaaactactggtcttggtgtctttttgaatgaagtcgaaaagtttggccagttcatagacctgatgtaaattcattttccggactattcttttcgggacattgagcataactgcaaggagggttgtatcgtcctgacgtttatgcaatgcggtaaattgccggcaattcatttcgctccatgtcgtggggaaggaggtgatgatctcccggttccggaaaaagcttttatatgtaatcttaatttcgtgcatatcttctgaataaaactattcccagcatgactgatatccagagccagacatttttatagaacggatctttttccggcactatgattctggactccatttccctgatggtccgttcaagtatcttgattttattgatataaatgagtgtgtcgatattgatcggattctgccggagatttagccagggcacactattggtaattccggcttgcgcataagcaaatttggtagacgtttcccagggcggaagactaaaacggccagactggagctgatcgaggcaaaccgtatcgtagacgatcgaatccgatgtgatccggacagtatctcccggaatttctatccggaaaggaatggaatccctgattgtgatggtgtccctgactatacgttcggtgtttgttgtaaaggacctgtatggccggcaactggcaaaaaggagtaaagacccgaaaataattacacttaccggacctttttttcgaagcatggaatctttactgaagagaacgaaaaaaccgccgcaaataaatacagaaacttccgtcagggtagatttttccataaacaccaggataaaacaagttattaaaattgccagtccaagaactgtcgttttccaattttttaaaatcctatcgatcatacttgcttggttttaaattcgtttttgactgagaaacaagggcaatccttatgtactccgggtaaatcgcggtgtccggtgatttctgcctgtggaaattgttgtttcagactggcaaccagatcgtacattgcttgtttttgttccggtgtccggttgtcttcaggctgattattgtctccttttcctccggcatagcaaataccgatactgtttgtgttgtatccggcggcgtgcgctcctggcttttctatcgggcggccctgctctatcgcgccatcgcggcggatgacatagtgatatccaatgtcgttgaatccgcgctgaagatgccactgtctgatttcgttcacaccgatgtccatccgcgcataggtgtccgaacaatggattacgataaggttaatttttctcatgtttcctgcgtttaagggtttgaattattttaatgcaccaccaaatcagagccaggatcggaaccaatgttccggcaagctcactgacattgcggagacttaaccagtcgtttaccttaatccaaacaaaaaagctgttcaggccgacccctatgctgttatagaggtaattccataggtatatgatgtgttctctcattgccaggtagtttttttgtttttattatcccggatcagcggattggtatttgtcgctccggacagatgtttctgaagctcgcgtaaatatctgtttgccatatttctgtattttgaaaccaatgtgttgaccaggattgtatccggtgggttcttttcccggataccgtcggctgcgactcttctttccatccagattccggcattgtctatgtttactcccatatcttccatggcgtaggcaacagccagacagacaataacagggcgaaccagttcgatggtgcgttgttgttgatctgaaatggtgcctgataacactgcctgccggagttcactcaaatcaacgatatcggatatatccagatcctcggcccgtctgataaaagtctgcaaatagcggaatacgatatggcctattggtttgtaatattgtgagaaaataaaccggtccgggatcagttctccccgtccggctttgtaatactcagactctttaaattcggggaacgaatctattttgtcaagaaaatgactgatgataaggtcgagctgatcgaaaccatttcgccggaagatttgtttcagatcttcctcctgataccgatagagtgaatcggtattttctccggcaacccgggcaaatcctccggaaagcaggagtgtattcaggagtgtgaaattctcatacacagtgatgtttgcaactgctttccggcacattccgatctcatcggggaatgttgtcagatcttttgcgatccgattgaacagcttagtcccaagcagagggattatatatgtgttttccgtagccagtaaaagattttgaatccggctacagtcgtaggatgatgcaatctgaatgtagtccttcagttcatcaattagctgatctgggttttctgagaataacattatgccaggtttttagtggtccctgatcctgaatcgagggttgttaatattgtattccggaagcgtagctgtatgtcttttactccgttgaactccagcattgcttcgatgggatcgagcaggttctgccgatcgagccaggccatggcgatgtttaccagaaaggcttcgcggatattgcttccgccctgatttccggcatatgtgccaccaggcattccggcacccaacacattcggattgaccatcaacgaaaacaggatttcgctgtttgcagctgctgaagtgaccagtttgtcgtcggctttgtatttgttatcgagaggttcgataatccactgctcttcaggccttccgttgtttccgatcgtgtaatgggtgaaaatggctttgtttgcgttctttgtatctgtcaggctttcttcgatagcgtccatttcttcctgaatcttttgccgccgttcttccggatttttgtagtctttttccggataccgtttgtcccagtacgcataaggtatctttatatgccaggtccaactgatttgattttcataggctttgtccaggaaagcagggattttattggctatacttatccatccggctaatttggcagcccaccaggcaggcataggataaatgtcgctgctgtcccactcgtcgcggagcggatagatgtaacttcttccggcaatttttccggcgtagcggatacgctcgaggtcggccaggggatcgtagttatcgaggactggataaacttcgatattttggggattagagatatccggccattctccggagacaatgcagttttcaattatgccgttacgcggctttgtcaaacggcaatgcagggcgttgatggcatttatcccaacgatctgattccctgctatatttgggatcagctgtggaaaggatatcccgaatttcaggatatcccggtaggcatttgcaagataacgccggactgtccgggactgaaggaaattaataacctgagaatcattaatgacttctaacagctcattgccttttgcgtcatatccggcaactttacaaggaaaaacgccttgccccatgacaacccggtgcaggaatttaagtccggtgctgagaactccggtttgcccgattattgttgctgctttttgtgggaaatcgttggaagtggtccaggcgcaacattcgtagttccctacttttaccgaatcttctactttttcggtttgtacggaggatttgaccgtttcgggtgcgccggtggtagaagcgaagaatttttcaccgtaggccattaatggggtaccatttccggaggtaagcagcttaacactcataacacaacctcctttccgttaaaacgaatgatccggtcaatccctaccggagtgggatggccggttgagttaccgtttttatcaacgggaagtactcccctgtaacggtttgctgtcatgtccatgttcagaccgcaacagaccgcacgcgggataaatacccgttcgccgtttagtttatcgaaagtaatactaaaaacttcctgttccccggttctcgggtttgttttaacgtccatttcctgaagaacagtttttcgccgaatcgttgccattgttcaaatcttttcggcgaaaataggagggaaggaaaggagaaaaaaggacaaaaaaaacggagctgtaagctccgcttttctaaacagtatcaaatactctttcggcttttttccaatcgtccggaggagtaaattcacagtcgtttattacttctttgccatttatatttccataccggcaatatattttcagacagttccggaggtcggacaatgttgtttttacttgtgccatttcattgcgtagctcaatatattcctccggtcggggaaatacaccgcgcaggtgaaacattttattggccagttctttttctttagcctggtattcatcaaaagttttaaccagggattttacagaaatcttgccattaactgaatgctttgtcagattaatcataaattactcctttcctgtttctaatttttttacagtgcttctttcctgggtagcaatgactttcaggtgtgcagcggcttcctgcatttgctttgcaatatcttccagtgcttcagccatccggacgatttgctcatttgtaaaacatgccggtttaccattcaccagatatccgtttatccgctgatggatccagaattttgattttccgaaatagtcttttgcaatagatgcaaatgaaacgatattgccgatccgctgtaattcgttcatgac

SEQ ID NO: 6063 - DNA, 3510 bp, Unknown
  gut microbiota DNA sequence
ttcgagggttggttgcattcctgcacgagcagcctcttgcagctcttttttacgggagtccggaaggctttcgagttccttcagccgggcatccagataagcttctttttcgtcggttgttaaaccttccattccgcggaggatattgtctaaatcctcattgctaaaaaatgttgtctttttcatacttcctccttttttataatctttaaaatgtgtcccccgaaggggacacgttcctggtttatttcagtttagagaactgatccagaatcgcattaatcagcgtttctttttctgtctccgtcagccccatttgtttccaacctttcgagtaaagaaggaaaaggttttccaacattgcccggtggaaggtggtgggctgatcgcaactttcaataatttccaagaactcttttaaagattccctcataaacttagtatttggggttaaacttcactacaaagataataaactttagtttattacaaaaacttttgtcaacttttttcaattttttatgcggacgggtacaaaagtgttgttgttgaagcgtaatgtactgttgaatttggtccagataattttgtcgatagcatcgccgaagtgagttgcttcttccggaagtactccgctgcgactgctttcgctttttttgtccttcccgaaacggccatcgtgttcggttacgcgggtattattcatactgataatggagaatttacaccggacgccgttaaaccggataccggggaaacgcggatctgcttccttgaaaatattttggatgagcaggaatttatcgtgttggggtggctccatcccctgatgaacgtgaggaataacgtaccaaccgtttgatttcagccgttcgatagcctgttcgttgtagctttgtgaactgtttgcctgtcggtgatctccatatcggtcgcggatgtaaatgatggtacgttcctgatgatgttcgtagtaacgacaaaatgagtcgatcagggcatttatcattgttgtgggtgcctgatcgggtttgacgaaaaattcgtttataaaattctgcaattctatctcagaaaaaaggccggtgacgaaatcaaagttccggggttggctgacggtcaggaggctgatccgggcaccccagtcaaatgaaagttccagaggcttgtgtgtgtcacaatccgaatcgtaacggcaatccttttcggaaagccggttccagtcgaaatttgaatcttctgctacgtcccggataaaagcgtcgttcgtagcattataatagatatggcggtcggagagtggatagtagcaatcttctactttatcgatcaccatgttcatgatctcaatcaggaaggtcagcagcgtttgttttttatattcccgtctgatataggaaaagcctacgttttggatattatcgaaagcattggccagcgtgaacagtgtgccgtctttgctgacaaaaggtgcaatactctttttcagacgaaccgtttcgttccagatacttttgaattcggattctgattcgcagtcgagcagctccaactgtaattttattatccggttccagatttcgaaaaaccggattccgcgttctttttcgtagtagttgccgatatcaagcagccatttttgttcggcggtgtacggcattgaactggaatagtggaaaccatggtgccaggggatcggttgcgggctacgtggcccgaaaataccttcgtttccccggttggtcggtgatgtttcttcgtcgtaacgctgtttatttattgtcagtgcttcatccagaatctcgtaatcgacggatgctccacgcgctgatccggcgcggtcctgagaaagaagcaataagccgttaccattcgaaaagctaataaaattgtcgaacttcattactttttcgtagggttgcaggaaatgatccggcggtcggcggttgatgacgtagttgccgggatctttggctgagacgtgcattttatagcccatactttcaagtagcttaaaagtggatgggagtgtacgtgtgagcagctgtccgaaagtctgtccggttacggcagttaaagcccggggcatggtccggttaatcaggttgatgtcccaggctattccggctgatttcccggtgcctcgcccccagatatcggctttgtttttggcctgaaggagtaggccgatttgttgtgccgggttgaattgtattttttgctctatcatgagttcatgatttcggtgatgtcatcgtcggtagccggattgatcagagcatctgcgatgcgtgtgcgctgatcgatcggtatgttcagaaatttgttcaggtcaagattgtaggtattgttgttgacctggatcgggataacgatctgatgtttttccaacagacgtgggtcgatgttattctccggagcttcgcccagagcttttatcagatttgcctgagctgctgcccaggctttcagattaccggtgtcctttgctttctggcagagttcgataatgtcgtttaatagccagttgcgccagagttcataatcgaaggtttgtttgctgttgaacatacggacggcgttccggcaatcttcataagcctgtgtccggctcaggccgggatactttgcctgaaggatggcaactgcattttttgttaccggatttttttccagaagtttggaggcagagacccagcggttgagcatttcacgttgccggagcggaagggtagattcatttccttccaggatgtaggatttgatggtttcgtagtcctgatcttcgagtgctttcatagcgatgtttttgcaaaggaaagcaggatccggacgatggaaaaggacaaagaaaagccccggcgtgaaccggggcgaagtttatttctgtttaagggtgagcagccagacgaaagtcggctgtccggataaaggtacgcatgtaaagccgtttgatttcaacgcctcgaaaatattttccagaggtatcggataaacggaattgaacatttcagcgatttcggacgatgtgaaatgttcgtcggcctgctcccaggactttgccggagcataacgctttatgaattcacacatcagatcgtcaagggcctgtatggcctgttctgtaagttcttttttacacatggctttcctccttttccaaaagaaatacagaagtattacgtacattcagtttttcaagactggtataggcagacatcaaacaggatgcacaaacgttcatttcatcagtgaattcctgaatactaccattgaattcttttgtgtaaggtctcagatcatcatccgttagtattgcagattgtatccggattctattagcaatactgaaaatctcccgggctgctctaagaagttcagatttaaatacattagcagatttcggtaacaagaattcttgtttttgctccgcgacagtgggagcggtgtttttcttttccataattcgagtatttttgaactttttaggcacaaaaacggcgtgccttt

SEQ ID NO: 6064 - DNA, 11795 bp, Unknown
  gut microbiota DNA sequence
atcttcagacatcgctccggccgcaatattaggagctttttgagcatcttcgagtgtcacagctgcaaagtcagttttctccgatgccacagctaccgtagcataagacgaatttaaaataaccctgaattcatccccgcaataaaatcccagattccagctttttcttttaatttgtatctgactgttattgctcagatcgacatataccatattggcatatttttcggccccgtcatttccttccaatgtcaattttcctccggtagaaacaatcggactaaaggacaagttcatttcctgaagtgtaccgattttatagccctcactcagcgacagggacagaatccgaaacttcacgttgccctccggagatttaccgtcggctttagctactgtaaacgagccgctagcctgccccgcagggatattcaccaccacctgaccgttagtcagagccggggtaacggtaatatccgactcggatacctccgtagaaatcatctgtacggtaacatccaaactctccttggttgcccggctaagctttatccccaggtctataccggtaccatccataccggcatccgatacggcaaactctacggagatatcctgcattttcaaaccatcgtcgtcatcactacaggaataacatcctaaaaatgcgacacaagctaaaagataaattacttttttcatgttttattttatttgatttatactgatactaattgaattttccgttcaataagaaactcaaccccaccgaccaacttcgtccgcagcctaaatagctgacagaaggcgtatcgttaggagattcggcaattgtctcgagtgaagtcagattaaaaaggtttttaactcctgcattcagatggagaaatgaagtcagtttttgagtaactgtaaggtcaccggtatgatagcttttcattcccctcaggtagatttcactttctttcttattatcggctgtcgtatattcatgataataatactcttttctttcgccagtgtatttatagaacaagctgatatccgtaccggtcttttcaatgtgataactgatgctggtactcacttcgggagaataccggaatcggggcatacttttatccccggtagcataccggttgtagcgcccgatcaacgacacattcagatttgcccgaagtcctccccagctcaacgaattctccaaagatccgcctaccgttttgtaacggtcgatattataataggtattataattcggaatatcgacattctgagccagactgatcttatccctgaaatcattataaaatccgctcaaagtggttgtcagatgtattttctcgctatgcaatacccggtaggcaacagaccccgtaatattgtgggaatattcggccttcaaatccggattcccgtctatatcatgattatcattgtggaaagagaaatagagttcctgcaaagtcggagaacggaatccataggcataggacaaccgtaaatccatatgtttggtcaacttgaatttggtcaataccgaggggatagctatcggagcatcgtaatcggcaacgataaaggtccgtactccgggccgtaaactcagccattcccagggtttatattcggccgagagaaaaaaagccaggtccgaaactttcggtgtaccgtcgatacgtccgccttcaccttgcgtccactgatattctactcccggctgtacactgaattcaggtgcaatattccacgcaaccgtagcccgggctatccaggctttgtactgggtaatgtcctgactcgcttcggcagaagaaagccatttctctccggtcgacaaatcactctccgtcgtccgggtacgccgtttataatcctgataagaaagagctgcatggacatccagacggttatccagcttccaatccgactgtaactgatgggtatacctcttggtcagaaaatctttatcggaaactttttccggctgaagctcactcccattattgggaccgaaaatcttctcatcgaggaaatccaaccgataccatacattcatattccggttctggaatccgaacatcccattcatcaaagcctgatctttcggatgccagcgtttctcccgaccggtcaaatctccctgccagcctccatgattattgcgggtatatcctccattgacaaaaagtccgcttttgtggttaaatcccagatctatactctcattatgaagtcccttatctttaaaaaaatcatactctttccccatagattcctcttgtacccgggctcccactctccaggtattctcctccgaatacccatccccctttttagtgatgatattgattacccctgccaaagcatcggtaccgtaaaccaccgacatcggtccctcgacaatctctacccgttcgatactattcacatctaactggctcagactttgtttcgtcgctccccggtcgatcaatggaataccatccagcaatattttgacattgtttccactcatccccatcaattcgaaatccgtttcacccaaagccatatcgttggataaccggattccgatctctgtattcagcaaagactgtacactggtcggcgctttctgacggatctgttcgctattgactgtccgtactttgtataaagaattacgcatcgattgaggagaaaactgtcccgtaaccactacctgttcgagctgattgatattctcccggatttcgatatccgcgaaatgattctcttttccctcttcgatcgtaacgggaaattcccggcgatgtgcagctatggattggactatcatcgtatattgtcctgccggagccataaattcaaaatatcctttcccatccgaagtacctccgtaaaacgtatttttcaattggatattgataaattcagcaggaacaccatcggtcgttataacatttcccgaaacttttacttttacacttttctgcccccaaacaccggatacagaacaaattaataggattgtaataaagatatttttcagcatcgctttttaatttattgcgattgcaaaattatgggaagtaagctgggaggacaatcaccaaatatgggtattcttcctgtccggaatacctaagaataaacaacgcatcacacacaaccagctaaagaccggtttccttcctcactccgaaaaatccaaaaaagaaaatagccgagttatgccggacgaaagacatcgatttattcccgggaagtacttctttcttcagcaaagaaaaaataaacccaggtagaatcaatacgctataatttcatttctacaagttcatatttccggttacccagcccgataatctccggcgtattcaagggtatgaatgccgtgacacgactccattcgttctatcaagtacactttaccgggatctccggacacatacacccaatcgacacatgcctgatccaggcccccggagcaagtgaagcccaaataccgatatctcccgtctgaggagcagccggatgtgcatcacaaccacaatccaccgacaggttattcgcaatgctgatatacaaaatacgatctccgcaatagtcggcaatagctttcgcagcctcggccatcgattccaggaaatcatcctgtaccggaagatttcctcacatctctgccggatcttttgtttttaccgactgtttcgattaaaaattaatattcattccggccatcaccgtagccttaggcataggaaatccgtcgttgatctcataccgttgtgccagtaagttctctccccgggcccagatatgaatccacgacgcagcccgaaactgtccctgcaaattccacatcacaaaatcttctttcatatctcttcccgtatttcctatttttacaccggtatataatccggccacatactgcacaccggtcccggcagaccagcggcctttggaaaaagtggctccggcataagccttgtgccggggagaagccagtacaggctgttccatatgcagataactgtaattggcatctaccgaccagacaggagaaaaacgataagcaaactgcacttcagctccggtattttcgatctttccggtattgatattcatctgcctgccatcgaccggcattctcataatcagattttccccatcgatataaaaaacatttaccccataaaaaaaccgcccattcatcgaacgctgcgaccaggccaactcataattccacagtcgctccggtctcaaatcgggattggccggccgaaacatataaagctcccggatcgtcggatagcggaaacctttcccggccatcagttttatctctgcattcgcaggcaagtggaacgacaatccagcctgaggtacccattcggtccccacatgcgaatgatggtcgatacgtactcccagatccaatgtcaaccaacggtaaagatgttggcgaaaatctacatatccggccatttcgtcctgcttcttatcgacttgcggttggcgttcaccaccattcacaggttgattccaggactccccgccgaaatgaaagaaatcgactcctgctgtgagacggtttcctttaaagagttgtacactctgataccacgacagtcccagcatatcgtcccgtgaattaaaacgatagtccagtggttcccctccaacggcatatccatcgttaatccaatgctttccccaattatagaagaaactcaaagcacccgaagttttttcataattgttttcaagtgcaaaagaagtcatacctctggtgatccgttgatcattatctatcaatggatcggtaaccttaccggggttcgaagcgttgaagtgggtcaggtttacatcagcccgtacgttccatgcctgcgaaatctcatatcctaatttcgcataacctcctgcctgttcgaattccatatccggccgatgtccgtcgctccggttatacgaagcgctcaccacactcgtaaaacgtccggttttcagtcggttcgttacttctgtctgcaaggtattgtaagagccataccccagattaaaatgggttttcatgccatcttcctgcattttacgggtaacgatattgatcacacctcccattgcattcgaaccgtacaataccgatgccggcccacgcaggacctcgacccgttcagctaaaaacgactgataagcatcggaaatcggatgggcgaaaagccccatatattgaggatgtccgtcgatcaacaccaacagcccggtcgtcggcacaccctcctgcggagcaccaccgactccacgcaaagacatctgcccggcagcacctcccgacaccccgtatcccatcatcccccgagaggtaataaaaagccccggcacctgttcggtcaacaagggaagcaaagaagattcattactctgctcgatctgctggcgccccaccaccgaaaccgtcatcggcaaatggcgaatgtcggtctcattacgcgtacctgtcactaccacctcatcgatcgtatacgacctgccctgtggcagactgtctcttatctcctgggcccggataaatccgcccggtagcagtaaaactactgcaaataaaatatcaactactttcattttcagatattggatcattttgaatatattccgtcaccacgaattacttcttattcggttacaaaaatagaaaataggtttcatccggtttgtatctattttacctgatttattaccaatattacatacctcttattacttacaacagcttataataattcctgaaatccttatcacctttgaagagagatcaccactccaaagattttctttgtttcattcgataataacaccaaccgaaaatatctgccaaaaaccatccgataggaatagaccaccagattccccatacacctatacccggaatagcagctaaggtataagccagggccacccggacacccagggatataacggtcaacacgacagacattccgggtttcctgacagcacgatagaaaccatataataaaaacaaccaaccaatgccacaataaaaagctccttcaatccgtaaatattcgacaccgatagaaataatttccgtttcatgtgccggaataaagataagcatcagtggcctggccaaaacaaaaacgagtacagaaataataaggcaaaaaataagggtaaccctaacggcgacccggattcctttgcggatacgttcgtgttttccagctccgaaattctgagcgataaaagtagagaaggcatttccgaaatcctgaacaggcatataagcaaacgaatcgattttaactgccgcagcaaagccagccataacagccgttccaaagctattgatcagtccctgcaccatcaatataccgaaattcatgacagattgctgggcacaagtcagcgaagaataggttgcaatttctttgaccgtagcccactttagttgcatattctggcgggaaaccctgaaatccggaaaccggtaaaggctatagaaacagagtccgatccccgataccgcctgagcgatgaccgtagccaatgccgctccgcggactccccaaccgaaatacagaataaaaaccaaatcgagcacaatgttaagaacaacagctacagccagaaagaccaagggcaggacagaattcccgacagcccggagtaaggaagcataatagttatagagaaaggtaaatccgattcccccaaaaataatccacaaataatcccgcataaggatatatacttcagccgggacctgcagtaaccgcaaaataggatcgatccagacaaaaaccgcaatattcagcaatagcgtaatcaccccgatcaataccagagagacaaaaatactacgtttcaaagcttcatgatccctggctccgtactgaagtgaaaaaacaaccccgcttcccatacataagcccaggaggaccgaagtcagaaaaatcatcaacgtataggccgaccccacagcagccaaagccttggctcccaaaaaccgaccgacgatcaatgtatcggcgatattatagaactgctgtaacaaatttcccaatatcatcggaacagcaaaccacaacatcccccatgtaatatttccggtcaccagactgtgtgttttatttctcccttccatctgtaccctctctatcgataaacgcccatcctgcataatacacgactaaattcagacctgcaaaagtaggagaaaaaaggcaactcctgcccttaactgatgtcgaaatttcaaaagatcgcggcccacaacaaaaaaagtaaagtatatcgaaatttattacaaaggtttaggggatgtgtttgttctgtttctcaaatatttgctaaatttgccgaacggtatagctgtttttagtcaggtgcatcgataatattgatctgatttgttttaagtggattacaaaatggaaacttccgaaaatataaaaagttactatcaggattacatcagcatatataaggatgagaccgatagactaaaacaattcaaaacctttatcgataaaacagaatcggatcaattgttcgaccgtaaaaattttgtcggccatattaccggcagtgcgattatttttgattacaaaaattccaaagtacttttaatcaaacacatcatacttcaacgttggttacaaccgggaggccatattgaaaaaacggacgcttccattctggacggtgtttacagggaaatcttcgaagaaacgaacatagccaaagacgatttgatgctgatttctcctatcttcggaaaaaaattccccatcgacatcgactcgcatcctatccccgagaatccggccaaacacgaaaaacaacactttcatcacgacctccgctatttttttatttacaaaggagaaaagatcacggaagaaagcgaaaacttaaagtggagcgatgtatccagtttatccagccaggtcaccttcctgaaattagtaaaaaaaatatgggacctgctcgatatcgatttgaatacgagattattttatgaaaatatcatctcaaaggcccggacaaccggcgaaaattatattgctgtcgtcgtttcccatatcatccccgatgccgttcattacttaagggccatcgatacgatcgtccccattcaaacgatcgtccccaagcccaactcgatcgacgaaaagacttacacgatcgttcggaaggattttaaaatttcgcatgtatgccgggaagacatggctcaggatacagaaaacgaagtgatcagaatcctggaaaacacgaatgaaaaaatcctgcttttcgacattggcggatatttcgcccatatccacgagacctggcctgtaactatcctcgaacggattgctttaatcatcgaagataccgaaaacggctatcaaaagtatgaacatgtgatcggagactcggagcgcaagaagcagaactacccgtttaaagtcgtatctgtagccagaagtcctttaaaagaaaacgaagactttctagtcggtcagtccgtctttttttcggcagatgccctgatgagagaagacgggaaattgatccaatacctgaaatgcggaattttaggttatggaaaaatcggtcggtcgatcgcctcccatctcttgcagagaggagtaaaacccgcagtttacgataccaatccactgaaaagagtatcggcattcaatgaacttaaccggattccggaccgggactccataataaaggaatcggacattctgttttctgccacaggcaacaaatccctcaaaatcgaagatttcagggaattgaaaaacggatgttatatcttttccgtcacgtcttcggatgacgaactggaattggaatttaccggagaatacgaaaagcaagaagtaagaaaacatatattcaaatattcgaatgagaatatgaactattttttcctggtgaacgacgggaatgccgttaattttatttataatgccgttatgggagattttatccatttggtcagggctgaaatgatattggcgatcaacggactgcccggttatgcgcccggaaaaatttcgacggtccctaccgacatcagagaaaatattgcggaaagctggttaaaagtattcgaaccttaaaataaacagagatatagtataaattaaatagaacatatgatcatatctggattagaaattaagaacatgctgaacaaggagatattcatcgagcctttcgacgactcgagattaaatccgaatagttataacctgagattacataacgaattgctggtatacgattcgcatgtattggacatgaaagttaaaaatgagaccaagaccatctcgattcctcccgagggcctggtgctcgagcccggaatcgtgtatctcggcagaaccgtcgaatataccaaaaccctgaatcatgtcccgatgctcgaaggcagatcgtcgatcggacgtctgggaatatatatacatgtcaccgccggtttcggagatgtgggtttttcgggttattggactctggaaatatcttgtattcaaccggtacggatatatccgaacgtcgaaatatgtcaaatattttatcatacgattttaggagattgctccaaaatgtataaaagtaaatatcaaaataacgaaggcattcaggcaagtaaaatgtatgaagaatttcaataaaccattcatacaaaatcatcgacggacgatccgacaataagaaaactttacagtagcgaatatgaaaaaaataatagccctggtgggcatgagcggtacaggaaaaagtgaagcgactaattttctgaaagatcaatttaatttcgatctcttttacttcggcggtattgttctcaacgaagtcaaaaagaggggtctggaaatcaacaatgaaaacgagaaaatggtaagagaagatttaaggcgccaacatggcaacggcgtattggccaaaatagcttcggaaaccatcgcaaaaaccgattcgaccattcttttggacggcctctatagctttacggaatataaaatattgaaagagttatatccggaaaactttatcgtagtagctatccattccgataaagcattgagatatgaaagactcgcccaaaggaaattcaggccattgaccaaaaccgaagtcgaccggcgcgattataccgagatcgagaatatcgaaaaaggcggtcctatcgctatagccgattaccatatcctgaataacggcgacgtttcgatactcagacaaaatctactggaattaatggacaaaatactcaccgatgataacagcaggtaaagtatctgaaacgctggttttagatggaatcaaatggggaatgggaattcttttagtactcttgtacggctctgttcattcccaattggaacagtataatccgatcattatctatatgtcgctgattctgtatatactgttgtttttagcagactttattccttcttaccggcataaagaaaaaaccgatatccagtttaaattattcttatatataggttctctgtgcctatttttcattctggttttcttgctcaaagctccccaatatacagccagtcatacacccttcatcatttcattctgtttttttatcacgggaagattactcctcgagtccaacctgaacagaatgatacaaagagaaaaaaaattaattaaatcgctgggttttgcagcgacaggcatcctgattgaaaaaccaggcggagacgcagtgaattttatcattagagtttatattgaataattgattaaagcgttctttgacttatctttgtggtctaaaaagttcaattgatgtattacgacaagattcgccaccgtaataaccaagtgcttgcagctacaggattaactactgttgagtttgatgccttactaacaactttcaagtaccattgggatgaatattacagccattttaccttggaaggtaaagtgcgtcaacgtatatcttacaacaggaagaccagtgtattgcctctgattcaggacaaactgttcttcatattggtatatttgaagactaatcctcttcaggaactccatgctattcagtttgagatgacccagccccaggccaatagatggattcaccttctttctgatattctccggcgtacattgaaaacgcttggtgaattaccggaccgtaattccaaacgtctgatacacattcttcaaggatgcgaagaagtattgttggacggaacagagcgacctattcaacgtcctttggatgaagacaggcagtcagcatgctatagtggtaaaaaaaactcatagcataaagaataacttgttatgtaccaaccaacttaggattgtatggctgagctccacatacgaaggtcatgtccatgacaaaaagatttgtgatgaagaacctcttctactccccaaaggtatcaggctctggcaagatacaggtttcatcggacacaggccggatggagttgaaatatgcatgcccaaaaagaaacctgaaggaaaagagcttactgctgttgaaaagcaagagaacaagcggatttccggaatcaggattaaagtggagcatgccataggtggtatgaaaaaatgccgtattgtcaaagaacgattcagatgccataaattcggtttcgaagatatggtgattcttattgcttgtggattacacaacttcagaatcagttacaaaatgagtcatataacaatttaatctatataatgtctattcaatattgataggtattcttttctcataatacctg

SEQ ID NO: 6065 - DNA, 1630 bp, Unknown
  gut microbiota DNA sequence
aaaaaagggaatccttttcaagaaaccgttttttatttcagagcttcgtttacctgtttcatcagatcttttacatcctgatttgccggatctaaagattgagcttgtaccagataatcctttgcttttttgaagtcgttcaccgctttagctttctcagcatcatattttgctttatcgctattcgctatcggagttgctgcctgcaaaatctttgctccattgttaaagtataaactagctaagctggccagtccctgggttttaaaactcttggttgtcaaattcaccactttagtataattttcagcagccttcgcttcatcacctgctttttggaatgtctgtccttccttcatataataagcagcatacatggtttccaacttcatatttcccggaaatgctttcattccatcctgcaaagtggtcaacatttctgcagttttattctggcttttttgtgcctgtgcttttcccagataagaagacgcacctttgtagttatttttgatagacatatcaaaatatttctcagcagctgcgtaattctttattttagtagcacagtaagccgtattatagacagttgcattatctttattgtttacaattttcagataagcttcatattgcttgaaagcctctggataatttttagctttaacagctgcattaccggcatttttttctgtagcccccggatcctgagcaaaaacacttaccgtcaataaaacacttaaaattaaaaatgcaattcttttcatagttcagaataatatttaatagttatcatttttataatagttacagcccctaaggtaaaaatgtctctctaaaattcaaaatcattttcagattttttacaaatgagctattattttcacatgcaggggttacttttctattcattcatagagcaaggataaaatttttttcaatccttcttcgtcttcctgatcgaaggcatcaagcttatcactatctatgtccagacaagcaaaaacctttccttcgggatcacgaatagggatgacaatttcacttttagacatggaattgcaagcaatatgaccgggaaagtcttcaacattcccgactataacggtcttttcagaagaaacagcagcccagcatactccggtatgatgccgtaatttctggcaggccacaggcccctgataagaacggacgatcagttcgtcatcgatcaacgcatatactccggtccaaaaaaatgtctgcattttatggtgcaaaacagcttccatggtcgctaatcgtgcccaaatatcttcagtggtatgaatataacctttaatttgctcatacagccggtcatatttggctagtttagcacttttacctgtatcgttcattaggcctcttttgttaaacgttccaaaatatccaccaaatgtttccaccatttcccgactgtttcgatatctactttctcatccggggaatgcacaccacgtaaggtcgggccgaaggaaatcatatccattccgggatatttctccaaaaacagtccacattccaatcctgcatggatagatctgactacaggttcataaccgaacagttgtttataagattccactgcaattttcaaaatagcggattc

SEQ ID NO: 6066 - DNA, 2594 bp, Unknown
  gut microbiota DNA sequence
acccttgtattttcttctataaactcaggagttaagtttgaacggaacggatgaacaatattaaataaaataatataacatgatgaaaatccgatctttactattaatgattttactattttgcttgtcggtgtttttttgcctgacgggttgctcaaagtctgatacgcactacaatctgacggccaagccggattattcgcacagtacgatgtggttcgatgcgccaaacgatgcgctggcagaggccgatattttctacatcgtcccgacctgcatttgggactggagggatgcggacggcaagatttatcaccacatggacatcgacaatccggagcagcgaagccaggtggacggttccatacgcttggcccatgctctcttcgggaaatattgccgtttctatgctccttattaccgccaggttacaatggaatcgtggatggttgcccatgaggaaacggaacgcagatacgcggttgcccatggggatgtcgtgcaggcgttcgactactacatgacacattataacgcagggcgtcctttcatccttgccgggcacagtcagggagcaaaggcagtcatcgaactgctgaaacacaccctcactccccggcagcatgataacatgattgccgcctatgcgttcggcttttcggtctgtgaccaggaactggagcaataccccatgctccgtcctgcccgcgactcggtggactgtggggtgttgatctgttacaacagcgtgtctgctccggaagctgtctcgccattattccgagacaatgtgatctgcatcaacccgcttaactggcacacggatacgacctacgccccggccgggcagcatatcggtgcggtatttttcgatgccgaaggccgggcagataccttgagtcaccgtatcggggtgcgcattgacgagacaacccacaccctgatcgttgacggtctggacgaggaggattattacatcccgggcatcagtaatctgtttccgaaagggaattaccacgttcaggaactgaacctttattttctgaacgtacagcagaacatcccacagcgaattgcggctttccggaacaagtgaaccacaatctgaaacaagaccgcagaaataggataaagagtatcatagtcagatccacacaatccgatggccggttcatcccgacgagtacggggatatcgtagaggcaattactgctgcatgtggccgctgacagacatgagtatgtaaccctcgtccctgaattctattttcagggtaggatcggttttcagatttgtccgtacccggctggcatattttttcagttccgattctttgtttatgtccgccttaccccatatcccgtggataagataagacttgccgctcacttcgtgattcttcgcgcataacaattgcagaaagcgtccgtcgatcgtcttcaattgtgtggttattccgtctatgatcagttcccgggttatactattataagtggtatggtctgagagtcggtacaaatggggaatattcatgtatttttttattttttcccggactcgtttcatatatgctatcaaaacttcgggaggcctttctttgttgataaattcgtcggctccggcatccagtacggctacttcttttgcaggttctccgtgagtggtgtatacgaggatgggtgtttgctgatcgtgttccctgaccagccgggttatttccagaccgtctttccccggcatatccaggtcgagcaggaggatatccggtttccgctccttataagccttccaggcttctgaaccatccgatacaatttcgacttcaaaattctctttttcgagaattgtttttgtcaatttcgctccgaattcatcgtcttcggcataaagaatgctgattttcgcctcatccatgtccgttattatttatatttctttttgatatgggattcccgggctaaagtgactatgacggtcgtccctttgccttcttcgctttcgataccgatttctcctccgtgtgcgagaatgacggtccgggcgtaatacaatccctgaccgtggcctttgattttccggttgtcttgctgatctccccggtggtaacgttcgaatacatgtttcagatttttggaagaaataccgaatccgttgtcttttatcctgacttgcagatgccgggtatccggttcggtacaggtgatttgtatcttcacctgcttgccggagtatttgaaggcattgtcgataaaattctggaagacggcaaacaaaaaatgatcatctcctgtaatgaccgggttttccggccggaagtcgacttgaatatcgacttgtttgtctgtttgcctgttccaacgatcgggttgtgccgatgcttccagcatttcgcggagatcgatttcccggatatttagtcgtaatccgtgggcatccgtagattggagcagcatccggttgatcgattgcaacatctcgttgagttgttgctggctttgttcgagcaaggggagcgattcttcgggaggtacctcccggagcaggtaacaggttttgatctgattggcgacaggacgtttcaagtcgtgtacgag

SEQ ID NO: 6067 - DNA, 4473 bp, Unknown
  gut microbiota DNA sequence
tttcatttaccaaaccggatgaagatgtcataactgttttgaattctaaagtccattttccccgggatgatcattagaataaaacaatcgataattcgtccggtttcccggatatcccaataaatttccgacgatctaatcccgtcaactgattaccaaggtgtaaaaacaccaaaatttctatccataatcttcgattaatacagaatattctcttttaaatataacatttcattttataattttccccaactcaaaacatttccttatttttggttaaaattatttggcaatagggatatggataaatacaaggaagtggtggaggccctgatccggttcagggatgaacgggactgggcacagtttcatgattcgaaaaatctggcactggcgctactgctggaggcatcggaattgaacgagctgtttttgtggaaaaaagaaagccaggccgaagaggtgaacccggaacggctgaaagaggaattggcggacgtactgacttattcattactgctggccgagaagcaccatctggacatcttcgacattgtgctggaaaaaatccggaagaacggggagaaatatccggtagaaaaagcaaaagggacagctaaaaaatatacggaactatgattgtataccaatcgaccaaacaaggtttccgggatgatgttttcagcaatgagatcgataaaaaaattctggaagcatataaaatccatctgggccggagtacttctgccaatgaaaccttatcgtggaaaaactcgatgtcgtatatggacaggatcatggaagatcctgacatcccagcagatgccggtatttccattgaatttcagattcccctgacttccaaacggattgatttcatcattaccgggctaaatgaagtacaacaggaacaagtcgttatcattgaactaaagcaatggtcatcggctgaattaacggataaagatgcattggtaaaaacccgtttccagcatggtgtctcagagacggcacacccttcctatcaggcatggtcatatgccacgctgatcaaggattataaccagaccgtccgggacgagcaaatcacgctgaccccctgcgcttatctccataattacccgaaggaccaaatcatcacgaatccccgctacgaaccttatattaccgaagcccctccttttttccaatctgacgcaggaaaattaagggaatttattaaaaagtacgtcaaatacggtgactcaaaggatatcctgtacaaaatagaaaatggacgcctccgtccttccaagcaacttgcagacaacctggtttccatgctcaaggggaaccaggaatttatcatgctggatgaccagaaagtggtgtatgagacagccctgagcatgatccggaaagcaagtgccgacaaaaaacaggtactgattgtcaaaggcggaccgggaaccggaaaaagcgtagtggcaatcaacctgctggtggagaccacccgaaacaggctggtctcccgctacgtatccaaaaacgcagcaccccgggctgtgtatgcggcaaagttggccggaacgttacgaaaaaaccagatttacaatatgttcgggggatccggcactttctacaacacgccagccaacactttcgacgtgcttatcgtcgacgaagcccaccgcctcaaccaaaagagcggattgtttcaaaatcagggagaagaccaggtccgcgaaattatcggggcagccaaatgtgttattttctttgtcgatgaccatcaaagggtacacatcaaggacatcggagactctgcctatattgaaaaaacagcacgctcctgccatgcatccataaagaaactcgaactatcttcccaattccgttgcaacggttcggacggttatcttgcctggctggacaataccctgcaaatcaacgatacggccaacatccgcttatcgcaggatgatttcgatttccggatattcagtgacccgaatgaactgagaaaaaccatcgaagacaaaaacaaaacaaacaacaaatcgcggatggtggcaggttattgctgggactggaaaagtaaaagaaacccggaagccactgatgtgaacattcctgacttcgggttcgccatgaaatggaatctcgaaaaagacgggagtacctggattatcggggaaaactctattcatgaaatcggctgcatacatacctgccagggcctcgaactggattatgccggcgtgattatcggcaatgacctgcgctatgaaaacggtaaagtggtcacagacgtaacgaaacgctcccggatggacagttccgtgaaagggatcaaggtggggcgtaccccggcacaagccgcacagcttgcagaagaattgataaaaaatacctaccgaaccctacttacccggggaatgaagggctgttacgtctatttctgtgacaaaccactggaaaattacttcaggcaacaacttgaacttcctcaagaaaaagcgaaggtagtttcattgccggaaccccagggcccccgcattgaacgtgaagtcaatgacgacgtcaaatacatcgattacctgccgctctacaccctgaaagccgcctgcggtaaattcggtgaatggcagcaggcagaagaagaaggctggatcaaaacagaaggcatgggcaaattgacttcaggcatgtttatcatccaggcaaacggccactctatggagccacgaatcatggacggggatttttgcgtattccgtgcaaatattgtgggttcccggatcggtaaaattgtcctggtccaacatccggaacattacgattttgaaaatggtggcagctattcgatcaaaaaatacagcagtgagaaaaaacaggatccggaaaccggtgaatggatgcatgaaagaataatcctttaccctctgaatccggattatcagcctattgaaatcaggaatgaagaaggatttatcgtcgtcggggaatttatcgggattgtaaaataaaaaagggattccgggacggacctttcgtccggtttgagttttttaagtttctattccaacatcagtaattgagatcagttcgattattaaacttcaaccttccggcttaataaaggccaatccccggacgttttatttcttcctgcagcttatattttacctgcaattccgtcaaagcctgatcaactaattcaatttgcatccgggtatcctcatcgatattattctggtccgtaaaagccgtccatcaatcctatgtcattttcgatgtaaccgaagggattcggaaaggaatgataaccgatacagaatacagctataaaagaacttacaactgaatcctgtcgccatttacacaaaattatgaacagggccaatattataaagccaggatcacaattcgatcctattttttaaatacccaatacctcttataatctttcaaaacctttatgccatcttctgaaaatagagatgtcgtctctttaatccaagcagcggacttttgtctcaaatccaccatttccttagctacttcaggacttaattttattaaccgcattaatttcctattcgaatagaaataatttaccaatacatgtttacaacagagtaaaataagcactacattataactcaattcaatatctatttcattaaactgaccgtccaagcttatctgctgtgaagaaggagtagcatgagccagactacataatactttccagaaatcgcacagatgctttttgtcaggtattttcaaaagccgcaaaattttatcatacacctcatatttcctgtcttccaaccatttttctgcccatatttcattctgttgcttatagaaatatttaccgataaccagatattcaaagacctgacgcaacaaaatattcgcaacaccatattctcctcttaaaagaagctgatgagcgttgtacaacaaataagaaatctttacacaagcctgcatcagtaccttatcaaaatttcgttcgttatattcccacatgcctaaagcattgagataataaaatgtcatttgttcctggcaattaaagccctgtatgaataaattaacctgtatttctaattttttccctagaaatacctgattttcctgttcttgttgttggtattttccgataaaatttttcatacttcaatttataaaaatggccccacagttccaaacatctttattttaacgatatctctccatatcatcttctgtttctccgttataaaccattaacaaccacaacctcattctgaaaggaaaaaaacatgaaaccgattcccctgaaaaaagaacggcttcaatatgagcgatcgatgtatcctacccgcatctaaggaaaaatttgccgacatgccgttatttgcaagatcccgtcggtcattcggtggagactgatgtatttttctttattccgtaacttcaatatgaccagcttttcagaat

SEQ ID NO: 6068 - DNA, 1418 bp, Unknown
  gut microbiota DNA sequence
ttaaaagatactccacaagataattacacattggaatatacccggcggttatttttgttttcgtatcactgctttggagtcagctttatagatatggcaacttttacaagtcaaaatatagaaaggctggaaacaggagaatatattgtctataaaagacagaaaataaaaaaccaaagaggagtaaaggcaataaaaattcccgtgacagaaacaataaaagaactattggattggtttaaaatgaatacacctcttgttgggaattatcttgtccccgtaataactaaagattacagcggagaacagctatacaatcatatccggtcaagatatgtgcgttatgctaaaaatttaaagaaattgggcgaaacattagaaattgagcgtcttcgcttaacgagttatgtgagtcgtcatacaatggctatgactttacaaaatcaaaacgtaccccgggaacaaattagccaagcactgggacataataaccttacaactaccaatgtttatctggatagctttgatacaaacataatggataaagtagcacaattactctaaaatactctatgaattatgacttaaatatgcctttgagcgacttagtagctaagttgctccaaggggaagcagacgaattgcatgaagaagatttacatgcctatatggataatttaactcatggagataaaaaaggactccaacaagcgttgaaagaagtggaaaaatccattgtggagtggaaagatacctactttgttgaaacatatgctgataaagtaagattgtatcagcagggaaagttaaagtggacacaacgggaattggatgacttattctatgaggaagaatttttgaggaaagaaggtaaaacaggtttgactgttgattatctatataacgctattgaaaagataggcttcattaatgaacttcatggtgatgccattgaatgtgcctggcagaacaacgatattgaatttctgaggacacaatgggaagatttggctttggatcaaattagagcgttacaggcaataattaacggaatgcttagagttaccctactaaatcaagtaacgaggtacagagcgccaatagacccgaaaaacagttgaaagactacccggaagtatttgggatagatgtatgctgtaaaataacagggtataaaaagaacacgatatataaattgatagctaaaaataagataccacattttcgccccggtaataatggacgaaaactaatgttccgacgggaagaaatattggcgtggatgatagcccggcgacgggaaacaacagaggaatttataaacagcatggatgtgcggttggcggctcgaaataaatctaattctataataacccaaaaaagttcaaaaaaatgatcgatacaatctggttaatact

SEQ ID NO: 6069 - DNA, 2795 bp, Unknown
  gut microbiota DNA sequence
ataagaataatcatctttccaggcttttttccgctcgtcacagatcatcacccgggtatcggggtctttcaccactttgaccgtcccctttttagccatatcttttacgatttctgtatcgtaaccgatatattcctgggtattaccggtaaatcctcttttctccagatagtattttttccggtatcccatattattaccatttccgaccacctgtagtccccgtctattcagcaccatcgtcttccagaaccacaagaatcggaaataacacctgaattttcctcccgcaccgtctaccggataattggagtatccgatcacgaccgccgtatcgggcgtaaaataagaagccatcgcatgcagccatcgcccggatccgggcttacaattaatttcagaaaaaagcaacacatcatattgtgccgcgaggacacctatattaatagcaatcttcttcgtacgccggaatttcgtttcaggaaaaatccgggtagtcttcaaatgcgggtatttctgttgcaaatcggataaaacatcctgcgtctcatcctcggaacattcgtctacgacaatcacttcatatttcggatattcttgggtcagaaatgcttcaagattctgtttcaatagctcggccttattcgaacaggtaataattaccgaaactccttcctcgggttctacagttgccggtctttttttagtggtaagtaccgtactgcgtaaaatgatcataatcaaatgggcaaaaaaaaggaggatcaacaacaggaataaccaaccattatagcctaatcctacccaaaaatcaacaaaattattcatttcaaattaaaaaatcataaacctctataaagccataaagcgctttattacatccttttctaaatacattcaaaaaaaatcacacaaatatagtcacttattgacgatttattttgctattcagaatatattttatcacttttagtgtgaatttactaacattaatttcaattactatgaatcagaaagcaaaaggaattatcggtattttaaccggaggaggagatgtaccaggattgaatcccgccatcagagcagtcaccatacgtgccttacgagaagggtataaagtgatcggaatccggcggggctggaagggtttggtcgatgtcatccgggacaaaaaagtagataattcatgtaattatttcgagttgaccgaagaaatcgtaaataaagcaggacgaacaggaggtacttttttacattcatcccggacacgtgcttcgcatgtcccccaatcagccgttcccgaacatctgaaggacaaatacaatgcagaaataaacgatttaacccctgaagtcctgaagaatctggaatttatcggcatcgactacctcatcccaatcggaggagacgacaccttaagctatgccgtacgcctgagtcaggaaggagtaaaagtagtagcgatcccgaaaacgatggataacgatgtaccgggtacggactattgtatcggtttcagtacctgtatcacccggacgatcgagctgacccatgacttgcgaacttgcgccggttcacacgaacggctgctggtactggaagtcttcggacgctatgccggtttctcagccatgttaccgacactggcaggagcagcaaaccgctgtgtgattcccgaataccaattcgatatcgaacggttagcggaattattatgccaggaccggtataccaatccgagcaagtattcagtggtactggtatccgagggagctagttacagcggcggccagatgatgttccaaagtgatgaagcggacatgttcggtcataagaaattaggaggaattggagattatgtttccaacgagcttaaaaatctttctccgaagttcaataaaggggaaaccatcaatgtcatcaatcaaaaacttggttatctggtacgttgtggaaatccggatgcgatggactctatcgtgcctatggcttatggtaatcttgcactcgatttaatctctaaaggaatgcacgggcgtttagtcattttaagaaacggacgttatgataatgcacctatagatattgtcaccagtagtaaaaaattggtcgatatcaataaattctataataccgatcgtctgcgtcctcaatacaatagcttcgaatttatgccgcaaatgattctttaaaagctaaaggctagaggctaaaggctaagaacgattaaacgcttatagcttttagcctttcgcttatagctttaaattacttagtttttttaggggtcggtgccttttgtttcatagcggcagaatcgggagcgatgctatccactgcaataacgacagtctctgactcgataacggttactgaatcagcgggttgctctgttgcctgaactttcgcctgttccttttttttctgagaatttccgcaagcggccataaacaatactactgcaaccattgtagtaaagacccaagctgtagaaccttttgttttcatttcctgtttttatttagtattacagaaagattttacgcaatcctgaacaaaaagttttattacaggtcgccggacatacggttccggatgattttttcgaaaaaataagggtaaatccgatatccgaaaggctcacacccttcgaacaaaagtattctccgaagaccagaaaataaataaatctcatgtactgattttaaattacacaaaaatttgtcacgactaattgtatttctctttgcaaattgtgtacctaaaacaactatctttgtcctataagattatcg

SEQ ID NO: 6070 - DNA, 14395 bp, Unknown
  gut microbiota DNA sequence
aaataagtttatgaacatacatcttattgctatcgggggaagcgcaatgcataacctggcgttagaacttcataaaaaaggatatcaggtgaccggttcggatgacgagattttcgaaccctcgaaatccagattagaagcagcaggcctgttaccggaaaagtggggttggtacccggaacgcatcacctcccgtttagatgccgtcattttgggtatgcatgcccgggaagataatccggaactacaaaaagcacaggaacttggaattccgatttacagctatccggagtatctgtacgagcaaaccaaaaacaaattacgggtcatcgtcggcggaagtcatggaaaaacgaccacaacttcgatgatcatgcatgttttgaaaacgtgcggaatagaattcgattatatggccggagctttattggaaggcttcgataccatggttcacctgagcgaccgaagtaaaatcgctgttttcgaaggagacgaatatctttcttctcccatcgacagacgccccaaattccaccattatcaccccgatatcgctatcctcaccggcatagcctgggatcatatgaacgttttccctacttttgaaaactatgtagaacaattcgctcttttcacccaacagatcactccgaacggtaaactcatctattacgaaaatgatgaaaatttacgacagatcgcctctcgggtacctgcttctgtacaagcgatcccatatacaagttttcctcattataccgaagaaggaaccacttatttagcaggtagcttaccgacccctattcaggtattcggagaacataatctgcaaaacatttcagccgcctatctggcttgtaaagaattgggcatcgacgaaaccgcttttttaaaagccatcgctacttataagggagcagccaaacgcctgcaaaaaatagccgaacaaaacgatacagtcgtattcctcgatttcgcccattcgccatcaaaattacaagcgaccataaaggctgtacgggaacaatatccccgacgcaagttaatcgcttgtatggaattacacactttcagcagcctgaatgcagctttccttccacaatatcgtcataccatggacctggcagacgaagctatcgtattttttaatccggaagtcgtaaagcataaacgcttacctgagatcagttccgaagatgtcagaaaaggtttcgacgatacgcaattgaaagtattcacggataaccggcaattactagaagagctaacacaaaagaattacgaaaatagtgtattgctcattatgacttcgggcaatttttcaggcatcgatataaaagaattagccacgcaactcattcataaataaaatatagccgggaaaaattcccggctatctcaccaagcttctcctctctccgaacaagaacatattcgtatattatctcaaacaaattatacgaaacaactattatcaatccattttgtgacgtaatttcaaaatttaattataacttataaacgaaggctaaggcaaatgtaaataattttcaaaagaaacacaagaaacggtctttacaagtaaacatttttatattgcgtcaaccatggatatgtcaataaatcaaaggcttgctaattttctctatgagaaaaaaatttcacaagaagaattacgaattaaacttggtctgaagacacgtcaacaagtgagtaactggttaaattgccgggatcacataccagacaagcatctgatgggaattatccgtctattcccggaactaaatgccaattggctcatccgtgaaataggaagtccgcttatagaccaaaaatctctccggcaaatcaatcggaacgaattcggtttctgcgaggaatgtttggaaaaagacaaagaaatagaaaccctgaaaaccctactactcaagaaagaagaagaaatcgagaaaaaagaaaaagagatgcgagaatcttgccgggaattagggaaaatggaagaacgtctatcccaattcgaaaaagtattagcacaaaaagaatgtacccattagaataaaaatccattattatttggaatttaaaaaaaatcatttctatatttgttgcatcaaaagagaatagaagagatgacaaaacaaaatcacatgactcagaattggtggtggcgccggttgaacttcgtaataaacgatgaggtaatgtgattctattgtataaaagaactgaaacgcctgatgtttattacgaacatcaggcgtttttcttttgcttaatcattaaaatcagataaacacactaaaacgcaaacaacatgaaaggagacaagaaaattaccctgacagaaaaagaattaccgacccactggtacaacatcgtggcggatatgaccaacaaaccgttacctcctctgaaccctgtaaccaaacaagcagccagtaaagaggactttttgcctatttttgccgaagagttagtcaatcaggaattttcgcaagaacgttttatcgaaattcctgaacaggtacaagatttgtacaaaatctggcgtccgactccgctagtcagagcttatggactggaaaaagccctggatactccggccaggatttatttcaaaaacgaaagtaccagtatggcaggatcacataaacccaacaccgccatcccacaggcttattataactataaacaaggcatcaaacgcctgaccaccgaaacaggcggagggcaatggggatctgccctgagcttcgcagcccgttacttcggaatagatttaaaagtattcatggtgaaggtcagctataatcaaaaaccttaccgtaaactgatgatgaacacctggggagccgacgtcattccctcgccgagcgaactgacggaagccggaagaaaaatcctgagcgaacatcccaattcttcgggtagtttaggtatcgcagtatcggaggctgttgaaatggctgccaaagatcctcaaaccaactataccatcggcagtgtattgaaccatgtattgatgcaccaaaccgtcatcggagaagaagctattcttcaaatggaaaaggcaggagcggaacccgatgtagtgatcggttgttttggcggtggctcgaacttcgccggtatcggctttccttatttacgcaaaaaactaaccgaagggaaacagatccgggtcgttgcggtagaacctcaatcctgtccgaaactaacccggggaaccttccaatatgatttcggcgataccgtagggctgactcctctcattcccatgtataccttaggccataatttcgaaccggccaatattcatgccggaggacttcgctaccatggagcaggagcgatcgtcagccaattattaaaagaccggttgatcgaagctgtagatatgcctcagctagaaacttttgaagccggagtactattcgcccgtaccgaagggattatccctgcacccgaatcgacccacgccatcgcccaggcgatccgggaagcccaaaaggccaaagaagaaggaaaagaaaagacgatcttattcaatctttcgggtcacggtatgatcgatctgtatgcctacgaacaatacttcgccggtaacctgcaaaattataccatccccgacagtgaaataacctgctcactgaaagatttggagaaaattatttaaaagctaaaaggctataagctaaaagcgataggctaaacccactcgcttttagcctttagcttttagttttttgcttttagcctttagcttttagctttttgcttttagcctttagctttttgcctttagctttttgcttatagcttatagctttcccgcctttcagttttccttacaatagcgcttgataacattataggcgctcacgatacccaactcaccggctttactcaaatcggcatttgccaaagctttttggccggtatagatatacaatagtccccggttgaaataggcttcggcaatatccttatcgagtctcaatacctgattaaaagtttcgatagccctctcgatctcgccatttttggcatatacattggccatattgaataaggcaaaaacaaaatcagagtctatccggagacattcattatacccttctatgacctgagaataatctatcttgcgttgcatttgctgttgttcaccgacaatacggggagtcttatcatccacagattcgatataatcgaacattaacattctggcattagctaaattaaacagtgccaaaagattatcaggttctttctccaatatcgccgaaaagtcttcgatggctttggcatactccttttgattgagataaatacttccccggatcaaataagcatccgcatcccctgtctgcattatccgcccggtcagctcttcgacataagattctgcaaaatcggccggatataccaaatctttattacatagcgtaatagccggattataattatgtgcctgattataatccataatatgccggttataatattgtactttaccacttctcaaggaatccaggctcaggtattgcacataaaacacatcctgcaattcgatgatcactttcttatcctgcacccgtccgttgatcacatcccgcacttcgtcatgccgggcattgatatcgatcaacttctggaaattggccgtagtatctaccaaagcattcttatctccttctttcatccgcttatagcgatccatgatctgcatcgccaaataatgatccttatcggcagcctcgaaatcctttaactcctgattaacggccgcccgtgccagataagctttcacaaaatccggatacaaatgaatactctcagtgaaatcatcgtaagccccataccaatcccggatatccattttcagcaatccccggttgaaataaatcaggatattatcgggattcatttccaccactttatccaaatcccggatagccgcatttttctcgcctacctctgcccgcaacatagcccggttgtaataagcataaatataattgctatcgatccggatcacttcactataatcgttcaatacttccggatatttcttcatttcataccaaaccatcgcccggctcatcaatatacgcttattctcgggattagcttttaaagcccggttaaaatcttcgatggcattgtgatactctttatgctgaaaccacaaatatcctctcaaaccgaaagcatcgtccgaaaacatattcaaccggatagcagaactacaatcggccatcgctccctcccaatcgtccagtttttcccggaccacagcccggtttaaataagcggctaccagtttactatcgatcatcaacgctttcgagtagtctttttcagcagccttaaaatcccccatttcagcttcggtaatcccccggttggcatacacataagcatccctgggctctaaagcgatcgcctgggcatagtcggccatcgcctcctcatatttacgtaagttatgccaagccactccacgatacatataagcatgaaaataattgggattcaactcgattgccttcgaataatcctgtatcgccccttcataatcatccagattcaatttggccagcccccgaaagaaataaggctccgacaaatagggctttacccgaataatgttattaaagttatctatagcagaaatataatcatcgaaataaatggcattttgccccatccggaggatgttattggtattccactgagcataccccccccaagaacacaggaacaaaaaagcaaataaaataaacgttctcctcatttttctctaaagtttatgcgctaaagataaataaaaaagatatcggatacaaataaagcccaaatggatcgttggtataacataacttcaaaaacagacggatcaaaaaagatggagcccaagaagagccccatctttatatcattccgcttttaaaatccgaatcgatccggcaacgtactattcacgaggtgcatagtcgttatcatcgtcttcgtcgattccaggagtaaatttccaggtatcgacatctatcggatcattcattttcgatcctccggtagtcacatacccgtaatcattaaaggtaaatcctacggcataagcacgtctgttcatcgcagcaggcaattcggtcacttcatcccaacggtcagtatcgatattatattcccagcaagtacccggataacttccgttacctgtagccacatatcctttcaatacacctccatctcttgaagacacaaaagcaacggcatatgcgcggggaatctgattataatcattgtcgaaaccacgtccgtcctgatcaactaaaggctctttatcatcccaggtcgtaccgtcgaaggtatatacatcccggcggaaattggatccggaagaagaagcagcaccaagacataccacagctttgtctttgatcacaaaagcaacggcaccacaacgcggttcgccacggaactcaacgttactccaggcagcatctcctgattttgaaggatcgaaacaataaatatcgttcaccaccattccaccgctaaccagtccggtcccgacataacctttaccatttaaagaaaaggctataccgtctctacgtccaccatccttacgatccgcaggcttcggtaatttaatgactgtagtagtatcccaactgaccccatcgaaagtataaaaattgtcataatacgtttctttacccaaatattcacggtatccggttccgacataagccacctgatgaccttcttcaccgacgacgaatgccacagcaccggcacgtccaacagtaggaaaactggcgacagagacccacgatttaccgttaaacttccagaaatccgtcaaatatttatccttttcttcaacattttcatttctaccaagaccgacataaacttcaccgttcaaggtaaaagtcacagcgcctgttctgggttttccactaaacgaataaccccgggaccagtctccccacgtatcgtcatttgaatgacaagcaacaaaaaataaccccagcattatcaggcataaaaaatttacttttttcataaattacttttttatctgattcaaatttataattctatattacacttcaaaaatcatccggcaaaactaaacattttttgcatataattccactcaaatcacgagataatctttcgaatcgataaagatttcagttttttaacacacttccgcaaacattcccgggcggtgtgtacgaatgataaagaatattttcattcgttaagcattgagcgaattgcaataaaataacagagctcatgccatatttttagaaaatagttttaccttcgcgtcgtaaataataaaaaatcctattatatgcgattgatattttttctacttatagctacgttaggactatattcctgtaataatgacctaactaccataggtcaggatttgattaataatggaaatcatattgaagtacaaaccaccttgctgaaagaaacaggtacgataaaaatagactcctttatcacctccagcggaagatacggttcggctattacggaaatgttcatgggccgctataaagatcaatatagtggtgtcacgacggcatccccctgttttcagatcgttccggtttcccgaccgtctatcaatttccggtatttgctggattcggtcaccttccatttcaaagtagggaaaaatatttggggagatacgacagaaacagctactcctcaaacactttcactttatcgtttggcccgcttgccggaattcaggacagaccaaaacgactacttttataaccgggattctattccatggggagataaactggcaacagtcagttttattcccaaaaggatgattatgaatcaggtatatttcaaactcgagaaggatacgctgaccgaaggaatgtttgctatgatgcaaaacgacgatcctattttcaggccgaacagcaatagtgagatcagctattataaatttatcaattactttaaaggtctggctattcaaagtggaaaagacaataattgtttgttaagcctggaaatgatcccggacagcctgtatatgcggtttcattatcataatgcagaccaaaagtatacttacgatttgaagctattgagtcagagaaatgaataccaatattttaatgtaaaaaatataccttcggaaaagtatggtttcgaagctttgaccgaacagacaaaagaagtgaaatttacagaacatgacatggctatcgttcaagggcttagtggatatatggtaaaaatggtccttccggagcccgatgttcaatcgacttataaaaccgtggtaaaagctgaaattgaaataaaaccccgggtatgggcttcgccggaagttgcttatccatcgacgatcagtgtttattatacgaacaagattaatgaaataaaaggtgtggcttataacagtaccaataatcctattaccggaagatatgtaaagactgaaaacaatgaagaagacaggtatattttcgacattaccgattattaccaaacaatttcccggtattccgactccaaggatgtcagacagctgttattgaccatacctaatttaacttcttcttttaatcgtatgattataaaagacgtgcctgtattgagggtatattatgcaagttataaagactaaccaagaatcattctccgatatcgaacaattatgaaaagaatattccttataacgtttttgtctatattcatttttaaggtgtacggacaggataacatcggaaccccatactctgtatatggaatcggtttacagacagaaaatgccggtccttacaacgctatgggtggagttgcggcagctatgcgcgacaacggcaatatcaattatctgaatccggcatcttatacggccctggatacggctcgtctttattttcaattcggcgttacgggcgagtatgcccatttgtctacctacaaagaaaatgcaagttaccgggtggcacaaaacacggcattcaacatagcgttccgtctccataaaaacatgtatatgtctctgggattcacagaaaaatcggatatcggctacgacttgtcttatacaaacgtgattcctggaagttcggattcttactttcaacaaaatattcagggagaaggcgggctgaatgacgtttacctcggattaggctggagatataaaaacttatcgatcggtttgaacacgtctttaattttcggtaagatcgaaaaacgtcagaccctgaccacgatgatcgaaggtagtaaaattatcaaaaccagtgaaaacaatcgtattcacgatgttttgtttacccccggcatccaatatactttgaatctgtctcccaaatccattctgacattgggatcggctttcaattttacacaaaaactaaggtccaaaaccgattatatggcttatagcgtcaattccagtaccaacacgaccgagatgctcaatgatctgactttaaagcggggatatatcaaatatccattccgtattttgagcggattcgatttcagatacaaccggaaatgggatattgccggagactatacgttccaaaagatgtctgtttatgaagagttcggtaaaaatcaggaactgaaagattaccataaagcagccttagggttgtcctggacaccggaacggctgggacgttattggtggcagcgcaacagttatatgttaggaggctattttattcattccggcatcgatgtcaaaaatgtagatatcaatacttacgccatcaccttcggttctcaaattcctttttacacggcccgtaacgggatccttctccttggcgtggcattcgatctgggaatccgtggaacagaacaaaacggtttgattcaggaaaaatttgcaaaagtccgtattaatatcggcttcaatgaattctggtttatgaagcgaaagattaactaaacattaacatgacaagacgatgcccgaagcatcgttttgttatttttatccctatctttgtattagttaatttttatcacaaactctaaaatcatgaagaaaagtttattatctttagctgttatagccgtatcactatcagcctgtgacacaacaccgaaatacaatatcaacgggaccattacaggaggcgaagcgaacaacgtttatttattacaacgtcagggacgtacgatcgatacactggccaaagctcctgtagccgaaggcaaattcaaactgacaggtagcgttgccgggctgaccccagcttttatcgtcgttgaaggacaacggggaggggatcttatttttgtagagaatgccgattttactgcaaacttaaatctggaaaatccgacagcttctaaaatcgaaggaactgccacccaaggaatagccaatcaatataccgcaatctcaaacgaaatgggtaaaatggctaatgagctgaaccaaagttacaggactgcctaccaggaaaaagatgaagctaaaatgaaagaattgcaggagcagtacgagaacttgatgaaagattatgaagccaaagaagatgctataaacaaagcgaatgcagacagctatgtcgctgcttatattttagccggcaaactctacgaatatgattatgaaaaactagtcgaaaaattcaataccctgggggaaaatgccaaagcaacagaaccgggaaaaacaatcgccgacagaatccagaaattatctgcagtagcagtaggccaggttgctcctgattttactttgaatactcccgacggaaaaccgctgtctatgcactctatcaaaggtaaagtaaaagtgatcgatttctgggcatcctggtgtggcccttgccgtggagaaaatcccaacgtagtgaaaatgtatgagaaattccatccgaaaggactcgaaattctgagtgtatctctggatgaggataaagatgcctggttgaaagcgatcgaagatgataaattgacctggaatcacgtttccgacttgaaaggatggcaaaatgcagctgcacaactttattgtgtaaatggaattcctcacttggttgtattggacgaaaacaatgttattgttgccaaagatttgagaggagaagaattacaaaataaagtagctgaattgttgaaataatttaacattcattagcatacaacagagggtatcgtcaacacggtaccctctgttttttcgtacatttacgggaatatttctagttagcaagtacgcattccggatatgaaagaaaaaatcattttactgtttataggtcttctggtatttcaggggagttattcccaaccggccgaagtatcccggcattcctgggccgattcggtcctccaccaaatgagtctggatgaaaaaataggccaactcttcatgattgcggcctacagcaacaagaacgaaaattacgaaaacgaactggaaaaacaaatccggcaatatcacgtcggagggctcatttttttccaggggaaaccgactcagcaaatcaaactaaccaaccggtatcaaaaagcagcgaaatatcctttaatgatcgggatggatgcggaacacggagtaggctggcgcctggaaactgcgatggaattccccaaaatgctgaccaacggggctatccggaaagatagtctgatttatgcattgggagcaactatcgcccggcattgccaggaactaggggttcacgtaaacttcgccccggtagtagatatcaatagcaatccccggaacccgatcatcggaatgcgttctttcggcgaagacccggaggaggttacccaaaaagcgatcttatatgcttacggctctttgagtcaaaacgtgcttcccgtcatcaaacactttccggggcatggagataccgataccgattctcaccataccctgcctgtcatcccacattcccgccaacgcctcgactctgtcgaactctatccttaccagcatctgatcgaagccggcattccggcggttatggtctcccatctggcggttaaatcgatagattcgacaggcattccggcttctctctccagcccggtcattcaggaattgttacgccgggatctgaacttctccggcctgtgcttcaccgatgccatgaatatgaagggggtaacccaaaattcccagcccggcgaagcagaagtaaaagcgctgctagcaggtaacgacatgctcctttttccggccaatctggggaaagcagtggaagcgatcaaaaaagccctggccgatagcctgttggacgagcggacgatcgatgaaaaatgccggaagatactggaagcaaagcaaaaatatgtattaccgaatgtttatccggccgaaactccgggtctatggtcacgtctcaactctcctaccgacatagctctgaagcaacaactttaccaggcagccatcaccctgattaaaaatacagactctttacttcccctcaaacgcctggataccctccgtatcgccagtctgaatttcggagccagagcagtaaacaattttcaaacgacactggaacgttatactcaagtcactcacttcgtagcaaacaaaaaattatcggacgaagaactccggaatttgcaaaaaaagctccaaccttttaattgtatcattatttataataatctgagtacgaattcggctcaaaaagatttcggttattcgccggtcttagataccctgatccggcagcaaaccggcaagcgaatcattttatgccatccgggcatcccatacggtctcgcttcctacgcttccctcccgaccgatgctttattgctcagctacgaaaatcatctttatgcccaacagtatgcggcacaagccattttcggaggcatagccatgactgcccggctcccggtttgtgtaaatccggattatccggccggtacaggtattcaaacgcccaaaaccagactgagttataccagtccggagatgtgccgcctggattctgaaaaattagccaaaatcgactccatctgccaactggcggtccaggcacatgccacccccggctgtcaggtgctgattgccaaagacggtaatatcttttacaataaggccttcggtcatcatacctacaaacaaacgactcccaacaaaacatccgacatttacgatttggcctccgtaaccaaaatcacagccaccctaccggccataatcaaactgtacgattcccggaaaatcaatctggcggctccgttgtcggactattatcctccattaaaagagaccgataaaaaagacatcaccgtacaggaagtactatgccacaatgcaggtttgaaaacctttctgcctttatttacggatgctatcgatccgaaatcgctccccggacctttatttaccagcaaacggacagcgcacaacaccacccgcctgaaagacaggttatatgtaaatctcaattatcggtttaaagacagcacggtctccaattccccgaaaccgggctataaatacatggaacccggactttatatgttcccggcctaccaggacacgatccggtcctgtatacttcattcaccgctaaatcctaaaaaagaatatgcctacagcgatttggggtttattcttctgaaattcgcagtggaacacgtaactgaaaaatcgttagaccaatactgtcaggaagaattttatcggaaattaggtatgcaccataccgattttcttgctcacaaacgcctgaataaaaataatctggttccttcgtgtgtcgataaactttaccgcaaaacggaactcaagggctatgtacacgaccctgtcgcagcgctgctcggtggcattgcaggacatgccggtctcttttcaacagccgaagacctggccaaaatgatgcaattgtatctgaacggaggaacctatggaggagaatattatttttcacccgaaacgatggccaccttcagctgtaaaaacaatctgtttcctaaaaaccgcagaggcctgggtttcgacaaacccgaaccggatcaaaccaagatcaatccggtcagtaagtgtctccctttgaccagcttcggacataccggtttcacggggattatggcctggtgcgacccggataacaaactgttatacctatttttatccaaccggacttatcccgacgaatttaacacaaaattatctgaaatgaatatacggacccaaatacaggatattatatatcaggctttggaagaaagtaaaatcaggtacaattagttttcaaagtatttcaggccccgtttttattacagaaaaaattccgaatttagaatcattctaatgtattaaaatagggtaaagttaaagaaaaaggatactttt

SEQ ID NO: 6071 - DNA, 4028 bp, Unknown
  gut microbiota DNA sequence
aaatcctgtaagtctttgattctcagtgtcgggatgacaggatttgaacctgcgacaacacgccccccagacgtgtactctaccgggctgagctacatcccgtaattgcggtgcaaatataaaggagatatttgtaacttgcaacagtaaggtggaaaaaattattaaatactgattttttccggaaattgtttaacttgcggcaatatatgattaaaaaaggaggtatcatgaaaaagttcttattgttttcgctgttggttggcctgtttgggggaagtcaggctcaggatttgaaacctataaagttgaatcaaccgaatgttaaacggggattacctgtgatgactgctttacaaaaacgtcagtctacccgggaatatgctgataaaaaattggaattgcaggatttgtcggacttgttgtgggctgctgccggtattaaccggcctgaatcaggaaaacggacgtctccgacggccatgaataagcaggaaatcgatgtttatgtgtgtttgcaggaaggggcttatttgtatcatccaaaagcgaatagcctcgaaccggtgactaaagaagatttgcgtccggctgtcgggggaggacagggttttgtcgctactgctccggtatgtttggtaatggtggcggatttgagtaagttcggcggagaggttttaatgcctgccctggatgccggtattgtttcccagaatatatccttgttttgttccggcacaggcttagtgacagtccccagagcctctatggatcaggcaaaattgaagagtggtttgaaattgaaagatactcaacggcctttgatcaatcatccggtgggatatgcaaaatgataaaagaaaagttattgtgtactttgtgagaagatgggggatagtgttactgcttgcggtaacactatattgttgtaaaaatgagtcgggaacaccggggaaggtcgtgatcgtttctactaacgatatgcatgcacagctggctcgttttcctctgttggctactttgattcagcaaaaaaagacagaaggcggggaagtgattgtggttgatgcgggcgatcgtttttcgggtaatccttatgtggatcatgctctggagaggggggaaccgatgatccggctgatgaataaggtggggtatgatgtggttacgatgggaaatcatgatttcgattatggacaaaaaatattgaaaaagaggctgcatgaagccaattttccggtggtttgtgctaatatgctttctgaaaagagtgagttggggcagctgccggcttatcaaatgattgagagaggcgggctgaaattttgttttttcagtttgattcagaccggagcgaatcatcttcctgcaactaatccggctaacctggaagatatttctttccgttatttcaaggacgttgttccggaatataaacgggtggcggaggaatgtgacgtgatgatcgggttaactcatttagggtttgccaatgattctttgttggctttagtgatgcctgagttggaggtgattgtcggagggcactcgcatacggtcattcgtgaaccgaaaaaggtgaatggggttttgatcggtcaggccggttctaatctggagtatgccggtgtgactacacttcggtttaaaggtaaaaaactggtcgataaatcttatcaattggtgagtttgaaggatataggaactcccgatcaggaaattgctttgctggtggaagagatcagtaaccggccggaatttaaaaagatcatgggacaggcagcagaagacctgacccggaaagaggatgtcgcttcattgatgaccgatgccatgcgtgatgcggttggaggtgatttcgctttttataacaaaggaggagtacggctgaatgaactacgtaaaggagagattaccatggaaaaaatatataaaatggaaccgttctccaattatatcgttgttcatgaatggaatctgaacaagatggaagattttatcttaaaagattataacagagggaaagatcccgggaaacgctatatcaattactatatttcaggtggaaaatatgagatcatccggaatttgcaaggagaggggatcgaggtgaaattttatgacgccaggggaaaatggttgaaagataaacaaaagaaatacaaaattgcctttagcaattatgtggcttcttccaatgagctggtaaaaggaggggaggttaccgatatctttatcaccgatgcaattgctgtctacttgcaaaaacaaggaactgtaaaatatactgaacaacgggcttttgtgaaatagagttgcctgtttagtttttggtgatggtaaattcttcgatacccagggtgttgtagacttgtttcaactctttttcgttatcggagataatcagaagtttatcgtttgggaataactgagaacatccgttcggtacaaaaaaatgattgaagcgtttgacgagaacgaccagggtattgtcggggagagggatatcgatcaggtgatctccttgaatgagcatatcctgggtgactatgatttctgaaaatacggatttcacttcctcgggtagttccatttcgaattccttggccatttttttatttttgatggatacgcccaaaagtctggcaatatgggtgacactggttccttgaatcaatagagaaagtagggtgatgaagaacacgatattgaaaatctgatgggctcccggtatgttggcgatcaggggataagtagcgaaaataatgggtacagctccgcgtagaccgacccaacaaacatataaccggcttttaaaagtcatcttgcggaaaggcaggagacacaataagacactgacgggacgggcgaagatgatcataaagataccgataagcagaccgagccaggagatgctgatcaggtctttcggattgaccagtaagcctagggtaagaaacatgataatttggaaaagccaggctgtactatcgaaaaaattggtaatattctttttgtatacgatccggcgattcccgacgaccagtccggcaatatataccgccagataaccgttcccctgaagtttctcggtaaaagagaaagtgaaaaatacaaaggtcagaagaacaatctggtagagggattggttgaggattctgaaatggtttaacgtataaacagcacagcgtcccaataaatatccggcaattcctccgacactgaattggatgaaaaatgaaagcagcacctgtccgaaactgaactctcccgattgaatgatttggatcaataagatggtcagcatataggccatagggtcattactcccgctttctaattcaagcaggggacgtaggttgtgttttagatttaagtctttggaacgtaatatattgaatactgaggctgagtcggtggatgacatgacggcagctagtaataaacatcctaacaagggtgcttgtgcttccgggaatgcccaggaagcgaggagatagacaaaacctcctgtaaatgctgtcgttagaagtacccccaaggttgccaaggtaattccttgaccgatcaccggtttgatttctgttatattggtgtccattccgccggagaaaaggataatactcaatgatataactccgatgaattgtgctgttaccggattctcgaattcaattccgaaaccatcccgcccgaatcccatccctacaatcagaaataacaataagacaggaataccgagtttaatccctgttttaccgatcatgatgctgatgaatagcaagatagaaccgagcagcaaaatattttgagtggttatgatcatgtcctttttttgaagttaaacgcttgggcagcttcaaggttataagccaggatggataaaatatgaaatagttcggtttttacctttattttcctgaaaattatttttgagattctgttttttaccctatatttgcatccgcattggagaggtggcagagtggtcgatcgcggcggtcttgaaaaccgttgactgtcacagg

SEQ ID NO: 6072 - DNA, 168 bp, Unknown
  gut microbiota DNA sequence
cttcactgaccggcggaactcgcttcgctcagacaccaccggtcgggcgttcggaaaacctaaccggacactcgttcctgctccaatggtcttccgccataaaaccctgcatctcacgttaacacgacctggcaaaggaagaattagaaaaattttatagaataaaat

SEQ ID NO: 6073 - DNA, 505 bp, Unknown
  gut microbiota DNA sequence
cgtttacttgtcttatggggtatgtgcaatcagcaatacccggcttttccgttctgtatgaacatcacgtatgtctgccgtttctcttgtgagagtgcctttcccaccagccatgtgcggaacaggtgggtgttgtaggtattcaccctgaaagcgaccgggatgatgatttcaagggcgtacacgtccgcgtgcagcccgttttcaagctgcatgtagcggcacacctcgtagtcgttcagcacgtccgacttgcggacggctctgatggcggcgttcactgccgggacggtcgtatggaacaatccggctatttcggtggcggtcatccacacgtcgttaccggttacgctgactgccttgtcctcgatgatgattgtgtcacgtttcatggcttttctttttagatggtgcaacctgcaaattcctcgacgccgttcaatcttgcggcaaggttctccatgtcctgattgagcttctctttggttatctgtaggctcggcaa

SEQ ID NO: 6074 - DNA, 389 bp, Unknown
  gut microbiota DNA sequence
ggatatactttactatccaccggcatctccgcggcaaaccgccgggcttcctcctccgaggcacactgcttcacctcatatcccagactatgcaggaaccggtcggcgatagaggagaaggtcatcatctgctcctctcccagcttcgggaaaaagatctcccggttctgtcccagaatgcaggccagcatacagatctgtccactctcctccggagaaacgaaataacgtttcacatcgttcggagaactcagcggctgacgcttcatcagccggtcgataaatccggccagcagacttccgttcgaaaaagccacattcgcaaaacgggccgtcgatattttgaaccgcgaagaataggccatgatcatttcctccatgatcttctt

SEQ ID NO: 6075 - DNA, 1135 bp, Unknown
  gut microbiota DNA sequence
atttcagagagctttcggtcggtgcgagaaagcatttctacaaagtgtgaatacattcctgagctgttcgctgagaaagcttttgcgtaaggcgaaacggtttgcacacgttacagtgctatggcttcgctttctgctgagcctgtaaggtcgggagtttcccgataaactgaggtggtaccacgataattcgtcctctgacagattttctgtcaggggattttttatttatgtaccgcaaaaaaataatacggaggtatgaaaaatgacagtatttgaagaactgaaaagaagaggtcttctcgctcagctcactgacgaggaggaaataaaggagcttatcaacgctggtaaggctactttctacattggttttgacccaactgctgattctctacacgttggtcactttatggcactttgccttatgaaacgtttgcaaatggcaggcaacaagcctatcgctctgctgggcggcggaacaggcatgataggcgacccttcgggcaagtctgacatgagaaagatgctcacaaaggaaactatcgagcacaacgttgcttgctttaaaaagcagatgagccgtttcattgatttctctgacggcaaggctcttgtggtaaacaacgctgactggctcatggaccttaactacatcgacgtgcttcgtgacgttggcgcttgcttctctgtaaacaagatgcttacattcgagtgctacaagcagagaatggaaagaggtcttactttccttgagttcaactacatgataatgcagtcatacgatttctacagacttttccaggattacggctgtaatatgcagttcggcggtgacgatcagtgggctaatatgctgggcggcactgagcttatcagaaagaagcttggcaaggacgcttatgcaatgactatcactctcctgctcaactccgagggcaagaaaatgggcaagacagaaaagggcgctgtatggctcgaccctgaaaaaacttctccatacgagttctatcagtactggagaaacgttggcgacgctgatgttatcaagtgcctgaagatgctcacattcgttcctatcgaggagatagaggaaatggagaaacacatggagggtgctgaatacaacaaggct

SEQ ID NO: 6076 - DNA, 3796 bp, Unknown
  gut microbiota DNA sequence
ttatgaatcgttatcgtcaaagttcttcttcaaaataagtaagtctcttctttaattatcctgctctctaattagtattaattttattttaatttcaaatgaacatttacatttcaggtttaagctatggcacgaccgatgcagacttaaacgaattattttcagagtatggagaaatttcttctgcaaaaattatttcggacagagaaaccggaagatccagaggattcggatttgtcgagatgactaacgatacagaaggacaaaaagcgatcgatgaattgaatggtgcagaatatgaccataaagtgattgcggtaagtattgcacgtcctcgcactgaaagacagtctaacggtggatatcgtgacagaaacagtaattccaggcgatattgatcaggtgatcagataaggggttggctgaaaaatcaactattcggctttccagctaacctcttctataagttttatttcgggtgtcttataacactcaacaatgaagttcgatttattctttcttttcgatgtgagatcaggagttttcagtcctgaagtgttccgtttctgaaacagatttattaaacttttttgttctttttcctttgagaaatgagtgttgaaagtttaactagttattcaataaggctgatcgtttgttaaaacgttttttcccagcctatttattcggatgacctttctgccccattaaaacatattaatgttaccccggcatttctgttgtatgttctatatagatccgatacagcagagaaaattaaatagtgaaaataaatgctgttttgacgtacagcaaaataataatatatgacatttaaagaattaaatataatccagccgattttaaaggctattgaggaaaaaggatataacaggccgacaccgattcagcagcaagcaatccctgtagccttgtcccgaaaagatatattgggatgtgcacagacaggaaccggaaaaacggcttcgttcgctattcctatcatccagcttttacaggcagatccgattataacgaaacgcaagggagtcaaagctttgatcctgacgccgacccgcgaactggccttacaaatcagtgaatgtttagacgagtatgccaggtataccccggttcgtcatggtgtgatgtttggaggagtaaaccaacgtccgcaggttactatgttgcaaaaaggtatcgatattctggttgcgactccggggcgtttgctcgacttgatgagtcaggggtttctcagcctggatcaggtgaaatatttcgtgctcgacgaagcggaccgtatgctcgatatggggtttattcacgatattaagcggatattaccgaagcttccgaaagaaaaacagaccttgtttttttcggcgacgatgcccgattcgattgttacgctggcttctgctttattgaaaaatcctgtgaaaatcaccattactcctgaatctccgactgtcgatgctatcgaacagttcgtttatttcgtcgagaaagccgagaaaggacgtttattgatatcccttttacggaaagctgaaaatcaatcggtattggttttctcccgtacgaaacataatgccgaccggattgtccgggtattgggcaaagccggaatcggaagtcaggctattcacggaaacaagagtcaagctgcccgtcagtcggctttaggaaattttaaatcaggaaagacccgggtgatggtggctaccgatattgcggcccggggtatcgatatcaatgagttgccgttagtgatcaattatgatctgcctgatgtccctgaaacttatgtacatcgcatcggacggaccggaagggctgggaatgcaggaacggcctttacattttgttctcaggaagaacgaaaactagtagataatatccagaaattgaccggaaaaaaactctgcagggctgaagtttcggcctgagtagatggaaaattcctgggatttagtttttctattccgatttcggttgctgtgtcgtcagaccggttcgtctggaccgctccgttaaggcttttgtcgatttcatcggtttttctcctgcccggtggaactccttgctgcgcaaaaactttacgttacgtttctctcagacactatcgctcggtcgttcagaaaaagcatgatgatactcggcagaactccgatggtcttcaaacacgaacaccggagacgaataggtgtcggaataatcttacgattcgattaggtgataaattttattttttatttataaacaattcatacagttaaatggcaagaccacagacattcagtaagaaagaaaacgagaagaaaaaacaagcccggagattagaaaaacaaaaccggaaagaagaaagaaaactatccggtaatacgaatagttttgaagatatgatagcctatgtcgatgaaaatggccggattacttcgacacctccggaaacgaatcataaaaaggaagagataaaccatgaagaaattgtgatctcgactcccagacaagaatctcctgaggtccgtaaagggcgggtagagtattttaatgtttcgaaggggtatggttttattaaggatctgtcaggaactgaaaaatatttttttcatgtgagcaacgctctttccgaacttgtagaaaatgccatcgttattttcgacttggagcgtggtaaaagaggtatgaatgccattaatatttgtatctcggaacgaacagccgattaagttcgattttgtcaggaatacttgcgttgcaaccggggtatcggattagcaggtgcagcctgtaaattggacatagggtggcttcgaagctgattattagcgaaactaggtccggaattaattattcaactctgaaccgaaagtttaccgattaaaaaggggggggatgctggtcaagggacttgaaaggatgaagctgatcagagtcgaagtgagtataaaccagtttgatttaggctttgaaagtgaagaaactttccgtttgtcgaggcttgcttcgtgcctgtagggagggccttaggctctgctttgaaaaaacactgttgtctgagtctgatttttcagcaaaaaacgttaaacagaaaatcccaaagatttagtctcgactgaatcggaaatattctccataattatgaggaaattctccacttctaaagtctggatttcattttgtttttatgaactttcgactatttatcctacatttgcaggcatagggggagtgcctcgttttgtttacggccctttccggggggggctggcacttttataacttgaaatctctgtagctaaaaaaagtttaatctgaaataaacgatggatagagatacacttatatttatagcattttgtgtgttcatactcttattgggggtacggttttggcagcagctcagggagcggacggaaagaacggaggcagatcggagtattgcagatgaagcggtccccttgccggcgaaaagccggaggcgttactttattctgattcaggtgattgtgttaggaggtttactgatttatatgctttcctggttaatccgtgattttaagggagctgagccggtactgaatgctgggtttattttacgttgtttgatttttgtattcactatttatatattcatttcccggggacgtgatttactcaggcagcgtgttaaagggaataagaagaaataagaaggtgtaaatatcagggtcgacggatagcctgatattttttttgcaaaaccttaaacggagggttaactttttttaaggctaggaatttaacattt

SEQ ID NO: 6077 - DNA, 32798 bp, Unknown
  gut microbiota DNA sequence
tatcactgaattgcagaccggtcttgatttgagaaataacattctacctggaaataatccggacggtccggcttcctgctgctgctaatttctggttgtattttctttgccggttagctctgccgtgagatgcagggttttatggcggaagaccattggagcaggaacgagtgtccggttaggctttccgaacgcccgaccggtggtgtttgacgaacgtagtgaggagttccgccggtcagagaaggaaagccttaacggaccggtcctggcgaaccggtctgacggtataaaacccggaatcggaatagaaagaaaaaaataaacctagaattatttagatatgtttttatcttcttcagctaaatccttccatttggtaatgaagccattgcttcaatctcagggccggatatagaaaagcagccatttatggactggaataatagcgatatagtaagaaaaacatttcttacaaggcataccgtctgctaaataatggatcaatcccagagaaaattcatgaatagggggaagggtatccagtaaattgccgtatgtgtcttcctgttgagagagtgtcatttttttatattgttcctcgcataagacaggaagttcactcaaacgataaacgagacaatccgaattttttaagatacgcatatcgagttcgataccgacaggaatcacaagtaattgtttattatggatgatgagatggggaaaatgtaagccgtcgatccggatctctccctgaagtaggaaaagaatactattttgtttaatatcccctccataagaagggcaatcagagcaatttatgtgttcgttacaagacatatcaccaactttctgcttgttgcacacacataaattttcttcctggacaaacatatggatttttcctggaaggaactaatttgaaagacaataatctgaaattattttagcttgcgttgaaaatgcagaaaccaaagtggaagaacagagcctttcaaaatactcgaaatcgtgatactccaccaaattcccgtcaaccctaattgggggaaggaggtcagaaaataggccatcggaatacgtgctccggtgaaaataatcccggtcagtgccggaggagtcgtatgtccggtaccattgaatgctccggcagtaacggattcggttaccatgaaaagttgtgataaagccaaaatcttcaggtaattaccgccggcttcgatggcttccggttcgtttacaaaaagcccgaagatctcgtggtttaatacaaagaagagaattccggctcccaaaccgatactcccggctattcctaatgtcaggcgataacctttacggatacgttcataattcccggcgccgtaattctgtccggtaaaggcagccaaggcggtagaaaaaccggcagcagtcatccaggagatggcttcgatctgtgctccgatactttgagcagcgacccctactgctccccaacgtgcggctagggtagccaaggtcaaggaaaacatggaaaagagggcattttgtatactgaccggcaaacccaataaaatgatacgtcgtgcataatcttgtttcaatcggttgagcaggtgcatacgccctaacggaaaccggtcactgaagatccggcgtgcaaagatgccgtaaaccactaattgtgctaatgcagtggcaacggcagcccctgcggtaccccaggccggaaagggaccgatgccgtaaatcagcaagggatcgaggataatattgacgataagtcctacggcagaagtacggaaaggagtccggctatctccctgaccattgtaaagaccgctgaacgtattgttattgaattggaaaaataacccgggagcgaccagacgcatataatcgatcgcctgggtcgaaatagaggtttcaaaacggaacaagcccatcagtaaaggggctgccaggatgatgatacaggcatagataaatccgattgtagtcgataaggtaatggcctgactggcataatgagctgcccggcgataatctttcgaaccgacagattgggaaaccgtaatctcagccccgattttagtcataaaggacaaagcgttgcaaagccaggtaaaaaaaccggcagctccggctgcagcgacagcatcacttcccaaatgaccgagccacaacatatctgtcatgctataagccatttggataaaagaggccgagatcaagggcacagccatgatccacaagcttttaaaaatactgccctgtgtcaggtcggttgtcttcatcgatctatctactataatatgtcttccccctacttccttttttcctcttttcccttttcttttctcccttcgatcctctcccccctcctcttccgcttttagcctttagcttatagccttttactttttaccttttttattataagtttccagtgctttttccaaaaccaccaaagcctttgccaagtcttctttctttaagacataagccaggcggacttcgtttttacctaatcccggagtagtataaaaccccgaagccggagccataaagatggtctgaccctcgtaatcgaattcttccagacaccaggcacagaacttatcggcatcgtctatcggaagacgggccactgtataaaacgctcccataggtataggagaataacagccagggatccggttaagcccgtcgatcaggaatttccggcgttcgacatattcatcatacacgtcgcgcatatattcttcgggagtatccagtgaagcttcggccatgatctgtcctatcaaaggaggacttaagcgagcctgacaccatttcatcacattctcccggacttgtttgtttttagtaatcagagccccgatccggataccgcattcactgtagcgtttggagacagaatcgaccagaatgacgttgttttcgataccttcgaggtgaaaagccgagatatagggtgcaccggtgtaacaaaattcccggtatacttcgtcggaaaacaggaacaggtcgtatttcctgactaaatcccggatctggttcatttcttttcgggtatacagatagccggtcggattgttgggattacaaatcaggattgctttggtacgcggcgtgatcaaagcttcgaatttttctaccgaagggagagcgaagccctcgtctatagtagaagaaatcgtcttgatcactgctccgcaggaaatcgcgaaagccatgtaattggcataagccggttcgggtacgatgatctcatctcccggatcgagacaggccataaatgaaaaaaatacagcttccgatcctccggtagtgatgatgatatcgtccgtacagacatctatattgaatttgtggtagtattctaccagttttttcctaaaactcagaatgccttcactgggagagtattccagcacttcccggtccagatggtgcgccgctcgtaatgccacttccggggtcgccaaatccggctgaccgatattgaggtggtaaacgacggttcccttggctttggctcgattagccagtgggaccaatttccggataggagatgcgggcatatctataccgcgttgagaaatggttggcattcgttgaatatttattgttttgtgtaattgaggggcaaagataataataaattccaggaacttcaattcaaaatcacagccaaacccggcaactctacattgtatccaaaacttaacccctaactttaaattacagggaaaaggttagcgggatattttattgtatacctaattaaattatcctcaaaattaaagaattttttctctaatattttgctttagatcaaaaaaggagtaaatttgacgtcggaataaaaactccgaaaaagctaatatatgattaagtataacaataaaattattacgaaatgaaagtaacagttgttggagcaggtaacgttggtgcaacgtgcgcaaactgcattgcagaaaaagacatcgtaaacgaagtggttcttttggatatcaaggaaggtgtttccgaagggaaatcgctggatatgtggcaaactgccccgatcaatttgtatgacacccgtattaaaggtgtaaccaatgattatgcagcgactgataattctgaagtagtggtgatcacttccggtcttccccgtaaaccgggcatgagccgtgacgatttgatttcaaccaatgccggaattgtaaaatctgttactgaaaatgtaatcaaacattctccgaatgctaagatcatcattgtatccaaccccttggatgtgatgtgttattgtgctttcttagctgctaaagtcgattcatctaaagtattcggtatggccggtgtattggatactgcccgttaccgtgctttcttagccgaagcactgaacgtatctccgaaagatattcaggcactgttattaggtggacatggagatacaatggttccgctgccacgttacacttctgtaggtggtattcctgtaaccgaattgatcgacgccgataaattgcaggcaatcatcgaacgtaccaaagtcggtggcggcgaattagttaaactgatgggaacttctgcctggtatgctccgggtgcagctgcagctcaaatggtcgaagcgatcatccgcgatcagaaacgggtattcccggtttgcgctatgctgaacggcgaatatggtatgaaagacatctatctgggcgttccggttgtattgggtaaaaacggtatcgaaaagatcatcgaagtaaaactcgacgatcaggaaaaggaactgttagcaacttctgcaaaagctgttaaatcggtgatgaccgtactggacgacatgaaaatgttctaaaaacagcctaaaggttaaaaataaagaaaccgtcctgattttcggggcggtttcttatttttgcgcctcaactatcaagcaagagggaaatgaagaggaaaaaaaataaaaaggcttgccattttacgactccatatcatccttatatcaatagccggattcagacagtagccgttgaaatagtcggtttggaagacaacagctaccacctgatcgtaccggtagaaatcaatggtatacaaggagatatgattatcgataccggcgcatcggtcaccgtcgtcgacagacaggtgttcccggaagacctgcccgaagaagcagacgttcagatgacatcgggtagcgtcaccggtcagatccacgacgtacatttagtaaaagcagctaaatttaaaatcgggaaacgtacgatcaaagagatgccgttggctgctatcgatttggaatatgtaaacgaaatgtacgacaaacatctcaaccggaaaattatcggattattggggtgtgacttttgtgtcaggtatcaggtggctatcgattaccggaaaaaggaatttaccatgtatttttaataatctaccatctaaaaatcagaattatctgtttttttagaaaaaatattatacttttgcgtattaatcgtgcttaaagaattagcaaaaattaagtcatataataatttattgtaaaatgcagaataaaggagcgatcacattacttactattgcattagcgttagtgagtctttaccagttatcttttacctggaaaaccaatcgggtggaaaaagttgcgagggaatatgcgcagggagatcccgtaaaggaaaaagtttatctggattctattgcaaacaaggaagtttacaatttcctgggaattgcacaatacacttacaaagagtgtaaagagttggaattaaatctgggtcttgacctgcgtggaggtatgaacgtaaccatggaagtagacgtggtcgacgtggtccgcagtctggccaactacagtcaggatgaagctttcaatcaggctttacaagaagcggtgaagatgcgtacatccagcccgaaagactttgtgaccctgttcggcgaagcattcgagagaattgccccgaatgcacagctggcctctccgaatattttcggaaccgtagaactgaaagataaaatcaaaatcggagccagtaacaaggaagttttagacgttatccgtcaggaagccgaaggagcaatcgacaataccttcaatattctgcgtacacgtatcgaccgtttcggtgtagcacagcctaatatccgtaaagcagatatctccggtcgtatcgtgatcgaacttccgggtattaaagatgctcaacgggtaagaaaattgttgcaaggaacagcagcgttggagttctatgaaaccttcgataacggagatttctttccttatctgcaagcagccaatgaaaaagcccgtactatcgttgaagctgaagagatactgactactgaaaatgcagccaatgcaacggcagaacaaccggaaacagcccaagcggatacaactgccaatagcctgatctctcaggccgcagcacaagattctaccaataatctgctggccgatgaagctgctttcaaaaaagcgaatcctcttttctccgttctgacacccaatatcgaccgtcaaagcggccagatcatcccgacaggttctttaataggttattctcatgtaaaagatacggcagcggtaaatgaaatcctggctatgccacaagtaaaagcgactcttccccgtaatgcccgcctgctgtgggaaatgaaacccaatggggaggttattgctttacatgcgatcaaaatcacgacccgtgacggaaaagctcccctggatggaggtgctgtcgtcgatgcccgtcaggaatacgaacacaacagtggacgccctgtggtatctatgaatatgaatggagaaggagctaaagtctgggctcggctgaccaaagaaaatgtaggccatagcatcgctatcgtattggatggttatgtttgttcttcaccgaacgtgaacgatgaaatcaaagggggtagctcacagatttccggtcagttcgacgtaaaagaagcccaggacttagccaacattctgaaatccggtaaattacctgctccggcacgtatcattgccgatgagatcgtaggaccgtccttgggtagcgaatctatccaatccggtatgtggtcgttcgtgatcgctttctgcttggtactggtatacatgttgttcttctatagcaaaggagcaggtctggcagcagacatcgctttgtttaccaacttattcttcttattcggtgtacttgcttctatcggagcggtattgaccctgccgggtattgccggtatcgtcctgacaatgggaatgtcggtcgatgccaacgtattgatctatgaacgtatccaggaagaattgagagcaggtaaagggttgagattagccatcaaagaaggttacaaacaagcttattccgccatcatcgacggtaacgtaacaaccttattgacgggtttcatcctttactattttggagaaggcccgatcaaaggtttcgcaaccacattgatcatcggtattttcacttcattgttctgtgcgatcttcattacccggatcattctcgacaatgcatccaagaaaaatgataacgtcagatttaccactccatttacagccaactggttgcgggacgtacacttcccattcctcgaaagacggaaagtgggttatacggtatccggtattatcaccgttgtttgtctggtatctatgttcacccgcggattcgataaaggcatcgacttcgtcggaggtagaacttatacggttgctttcgaccagccggtagaagtggaaaaagtagcagaaagtctggctgctgtgtatggaagtgctcctgaagtaaaaactttcggcggagacaatcaggtcagaataaccaccaagtataaaatcgaagatgaaggaacggaagctgacgacgaagtagaggccttattgtatgaagggttgaaaagctacttacccgacggtaccagcaaagaagtattcctgagcgactatcgtcaaatgtcgcagaaagtgggaccggcagtggcggaagatgtcacccgggctgcaatctggtcggtaatcttcgccttattagtgatcttcgtttacattatggtacggttcagcaaatggcaatatggtgccggtgccgtcctcggattggctcacaataccattgtcgtattaggtttgttctccctgttggccggattcctgcctttctctctggagatcgaccaggcctttattgcagccatcctgaccgtagtgggttattcgatcaacgacacggtggttgtattcgaccgtatccgtgaataccatcatctgtacccgaaacgcgacgatctggaagtaaccgacgctgcattgaactctacattacgccgtacgttcagtacttctttgtcgaccttagtggtattgttagcgatcttcatcttcggtggtacttctatcaaaggtttcgtattcgctctgttgatcggtatcatcgtaggaacctattcttctctgttcgtggccacaccgttagcttacgaattcagaaagagattcggtaaaaaagaaacgactgtcgtgaagaaataaacagttctcactctcataagaaaacgccttgcaaaaggcgttttttttgtactttattggtataatataggatgcggcttggcaaaatcaatcaaaccagtttgttgtttttgctctcgcctttcactatatttgcctaaaaatgtcctatgcgtcaaattaaaatatgtttgggcagttcgtgttattcccggggaaacaatgtccatctcgaagtaatcaagaaatacatagcagaaaatcacctggaagccgagatttcattctccggtcatctgtgcgaagaattatgcagtagcggcccgatcctccgaatcgacgagaaagtctacaaagaggtcaatctctcgggtttatacaaaatacttcaggaagaatttccgataaaataataacaggcgaaaggcaacctcacccataacacagtttacccagcaactatgaacagatctatggatttaaaaccgatctataccgaaccggaaaattgtcaggactgttataaatgtgtccgtgaatgtccggtaaaagcgattcagatcgaagacaataaggcctacatcatagaagaacgatgtatctactgtggccactgtacccaagtttgccctaccggtgcaaaaaagatccgggacggggtcagccgtacccgtcttatcttgcagaattatccccgggtaatcttatccctcgccccctcctgggcctgtgaattcgaagatttatccatcggacaacttatcgcagccatccgcaaacttggtttttcaggagtatccgagactgcgatcggtgcagaattggtctcttcacgggtatcggattatctacaacaatcgcaaccgggagtgtatatctcttccgcctgtccggtagtggtcgaatacatccggaaatactccgccgagcatactccggccatcacgccgatgctctctcctatgttagctcatgccagaattttaaaagactattacggaaacgatttaaaagtcatctttgcaggcccatgtatctgtaagaaactggaagcggatcattttaaagagctggtggaagtggctatcacttttaaagacctgaaaaactggtttgaaaaagaaaatattcatcccgaacaattaactccggctgcagaggatcactttatcccctggcaggccggaatcggttctctgtaccctgtcgaaggaggcatgcttccgggtatcgacggtgaaagcaaaaagattgtaaaaatggctttctccgatttgagtaatatcaaagatgtcatcaagaacctggatacgcgccgggaaaaagatacgatttttctggaactgctggcctgtaaaggaggctgcatcaatggtccggccaaactcagccagacttctctggccatcaaaagatacaatattcagcaacaccgggccgcacaccccgaaagtaccgttcccgatctcgggcatatcgatctgaccacgacattcaaggcttacgactgttcgacggcccggcatacagaagaagagatcaagcaagccttatctgctgtcggtaaaaacagtcctgaagacgagctcaactgtagcgggtgtggttatgactcctgccgtgattttgcagtagccctggtcgaaggccgggcagaagaaaacatgtgcgtatcctatatgcgacgggtggcccacgacaaagcgaccgtcttgttacaaaaaataccggcaggcgtattactggtcgataatgatctgaaaatctccgatatgaacagctgttgtgccgacctgctgggagaggatgtcgtcatggtctacgaagcttcgcccggattacaaggcgtcgaattggacaaaatctgtagcttcaccgacctcttccgcacagtattgaacacaggtaaagagatcacggaacggcaaatccgggaaggcgataaaatctggctgctctctatttataatatccaaccccaccgcctggtattcggaatcttacaggatcttcgggaaccttatgtccgtaaagaatggatgctggaaaaaacccaggaagtggtacgcaaatatatggctacagtacaggaagtggcttgcctgctaggtgaaaatgcagcttttaccgatgctaccctacggtcgattatggaggcgggggaaaaggtaaaaagctaaaggccagaagcaagaggggagggagaaaaaaggttggaggggaaaaagatgggggaacgagtttataagaaaaaaggaaggatgaaagaatcggatatatttatagaagtagactgtttccaaaaaaataaagcaggcaatatcgtctgtggagacagttacatgtcccagaagttaaaagaggaagaccggatcatcagtgtattatcggacggtttagggagtggtatcaaagccagtgttttatcggcgatgaccgctactatggccatgaattacacagccatgaacgaaagtattctccaaaccgctctctcgattatccataccctgcctaaggatatggtccgtaaaatcagttattccaccttttgtatcttcgacatcgattgtttcgggaatacccggatcgtggaatacgaaagcccggcggtctatctgtttcgtcgcggacaggcagtggaaatccggaaaaaaaagatcccgatcgaacgggaagatctggaaaatacctttctgtggatatcggagttcaagctggaaaaagaagaccgcctgatttgtttttccgacggagtcagccaatcgggaatgggtagcagtaatatgcctttcggttgggacgaaggagtcggtatctatatcgcagaaaccttaagccagcaccccggtatatcggcgaaagaattagcccgcaagatcgttttaagggccgaacgcaacgataactatcgtttgctggacgacaccagctgttgtgtcatttaccggcgaacgccgcgcaatctgctcatctgtacgggcccgccttacgatgaaaaaaaagaccggtatctggcagaaaaagtcagggatttcaaaggtaaaaaagtactctgcggaggaacgacagccacgattatttcaagggaacttcaactccccctgcaggtcagtatggatatcaccgataaagagctccccccactctcctatatggaaggaatcgacctgatcacggaagggattctgaccttaagtaaggtggagcggcttttaacccaagggatccccgaaaaatcacagggtccggccaacgacctggttaatctgatacaaaacagtgataaaatcacctttatcgtcggtacccggatcaatgtggcacatcaggatcccaacctacccgtagaactggaaatccggcgtaatgtggtaaaaaaaattaaatatttattagaaacgaaattcctgaaagatgtagaaattacctatctttgacccctcaaaatgacacacatcaaagactacacattaacaggaaagaaattttaaatttgaatcctatggacaaaatcaaactgagattatgtgcaggaaccatgtgttatgtcatgggcggagcccaattaatggaaatagaagaattgttgtctgaagaagaaaaacaaggcattgaaatcaccttttctccttgtctgcaacggtgtaacggcaaagatacacctccttttgcagagctgaacggagaaatcataaccggtgtcagtaaagaaaccctattacgaattataaaagaagaattaagacatgttgtacgataattttgcgatgctcaccaaacgggagttattaatccggattgtcaagttattaaaaaaagacgaactgatcacaggtctgaaatatctccctgtcgaaatgcgtccacgcaacaagcgaccggtgaggtgttgcatccacaaagaccgttacatcctcaaacacaagattatctcgattctgggctttgaaattacagacgaagagatcgacctgattcatctctccgatttcgcccgcatggcgatggctaataaaaatatgaaggaaaatattctttctgttgtccacgaagcttgtagtgcctgtatccaatcacaatatgccgtcacaaacctttgccggggatgtgaaggccggccttgtgtgatgaactgccccaaagctgcgatttcgtttatcggcggcaaagccagtatcagcagtgaggattgtgtcagctgcggattatgccagaaagtttgcccctatcatgctattgtatacacgcctgttccttgcgaagacgtttgtcccgtaaaagcgatcagtaaagatgccgaaggcgtagaacatatcgataaagaaaagtgtatctattgcggaaaatgtatgcaagcctgtccctatggagctatcatggaacggtcgaaaatcatcgatatacacaaaagtattagtaatccgaagaaaaaaatcgtagctatccctgctcctgctatctatggacagttcaatgccactccggggcaagtactggcagcgatcaaacaaatcggtttcgacgatgtgatcgaagttgctctcggtgccgaaatcacagctgcaaacgaagccaaagaattggaagaaaaaatgcaggaaggccaagcttttatgaccacctcttgttgcccggcttataccggttgggtggacaagcatgctccgatgctgaaaccctatgtttcggaaacccggagcccgatggtctatgcagcccgatacgcgaaggagaaatatccggatgccgaagtcgtattcatcggaccgtgcctggccaaacgccatgaagccgattcggtcgacgaagtggattatgtgatgagcttcgaagagctgggtgcttttatggtggcttatgacatagatgtagccaattgcagcgagaaagagctcaaccacgaagtgacgaagtacggccgtggatttgctcaggccggcggagtacaggcagctgttgtcaatgccatcggcgacaaatattccaatattcatatcgaagggttggataagaaaaatcaagccctattgaagagtatggctaaaaaacccgacgctcaattcgtcgaagtaatggcctgcgacggaggttgtatcaacggcccctgttcattagctcccctcaccttagccaaacgacaaatcaaaaaagtactggaataaccaaaagagcaattggtttgtcaaatcgatgtcccctgtaccgcctttttacggccgcagggggcatcgatcttataattagtacgttttcagtgacaacggttaacttctgaaatttttgtaccccttgaaacctaaaaaaataaaactagatatggtacacctagaaactaagaaagatttcagtttgagcacatttacctatttctttacctaaaatattagaatgactctccgctccgatcacatatataaatcccgttccccggaagcaattcgcttataataattcaggaaagtcggcaataatttcttatctgtaaagaaagacattccctcgatttcctgcaactctttttcgatcagttgctcgccgatccgacgggtttctgccgaagcataatcattcaggtattcacggaaagtcagtacggcattcagcttacagaatttaccttccactcctttttccagcaagttcatgatcttatccccggtacgtccgcaacggtagccggcagtacagaaagaagtgatgtaaccgtctccggccaactcgcggatcacttcgtccaaactgcgttcgtcgcccagcataaactgaaccttatcgggattttcttcctgtacctttttctcggaataggctccgataccgattttcgaagaagcatccgtctgtgtgcaaccataattgataatttcacgccgtaattcagcacgctcccgggccgtgacaatcaagcctgtataaggcacggccagacgcaacaccgtcaccaatcggcggaaagcatcgtccctgaccaaataaggcgaattttcgctcacaaacgatcccaaagcaggctgcatacgcggaaaggaaatggtgtgcggtccgataccgaactgtctttccaggtcgtgagcatgatgaactaaccccatcacctcaaaacgccagtcgtacaaaccgaacagagccccgatagccacatcgtctatccctgcatccattgcacgatgcattgcgtacaaacgccaacggaaatttcctttaatcgtattggccggatgcaactcggcataacgtcccggatgataagtttcctggaacacctgataagtcccgattccggcacgccacagtttccgcagattctctatactcatcggcgccgcattgatattgatgcgacggatattattaaagccgttcccggtaggagtcacccgtttggttgcataaatcgtcgccatactatcggcaatatagtcggcatcactttggggatgctcaccatatacggcaatcaaacgtttatgtccctcatcgatcacagcctccgtctcccgtctcacctcctccatagtcaacacatgccgtttttcagcacagttatcacttcggaacccacaatagacacaactatttacgcagaggttggaacaatataacggagcgaaaaagacgatccggttgtcatatactttcttttttacctgcaatgcggcttcacgcatttcttccaacagtcccggatcttctacattcaacaacacagccgtttcttccggagataacaactttatatccagagatttctgtaaaatatcccgcacttgctgtttatccggctgacgatatttttcaagattaccgaaaatcgatttttcatcgataaagtcttttccgtttaccagatatttttctatttcagctggtttaatcacttgctgaacccattctttcatgttcatatcgactcatatttctattatctcaccgccaatccccaggcatcggcaaattgcggatacttctttctgatcaggaatacttcattccaacaatcggtgtgggtattgaaaggggcggtagtcacccggtacatgccattttcgttcctcaggatagcactttctttaaatcccataaataccaagcgttttctcaaattttccactctttgtttactcttgaaactcccgacaatcacataataagccctgattgaatcactttcggtatcgactactttctcctcttttataggagccaccggatcgacctcaggagccacctctttatagacagtgtcttttttcaccggaacaggtgcaatcatcacttccagcggttctttttcggctgcttttttctttttcttatggtctttatgtccgaacagtaaatttatcccgaaacgggcattagcggactgtgtattggtataattgcaagccaataagttgtcggtttccagataaagctggaacgggccgagttttgcggtcagaccggcaccgagattcacataacttccccgggtaatgctatatgaaaccgaagcactgacattacgcatcaagcgtccgttcaccgaagcagtcagcgaaggaataaacattttatcaactaatgaagcccggaacaaccctccgacataaaaagtacggttcaactgataggtagctcctaaatacaatttcgggctcaccatcgtagtataagctttacctctgcttctcagctgcaaactatctttcaattggtctgtcaacttcgtgaaagcactatcgatagaaatatatcccacattgtctttattcacactattggaaatatcggccccttcccaggtaaaccgggcatcctgataaaaattataccgaaaatccttatttccccaatgaataaaacccaaatccgtcaaactggcgaacaatttaattttatcgttgaattgatattcacctcccaaatcgatagcaaaaccgggatttttagtattcagaaaatccgcaaccccgatgtcgtcggtattgaagtcgaaatcgtcccaatcgatcggcttgttgggttcgaacggcaaacctgtctgttcgttacgaatattcaccggagcggtgatcctgatattctgccgggaatgtatcttcatcgttccatctttctctgtcaccacatccaattcagaatccgtcatatgagcattcgcaatacctgcaagatatttcaaacgccctccgacggtaagcttactgttcacctgtttcgacaaacctaaagccacttcgatataggaattcagattgacccccagcttcccgaaatccatagagggatggtccgtattaccatatttcaggaaagtgaacaaatccttgttataacgaaataagaaatcatttttctgagtgatatccaaagtcccgtaccaacttttagctttcacaccgatggaaagaatagaattttcattattaaaagcgatgtaattccgtttatgcaatgatttataaaacttattcacatccatataaaccgaatcgtcccgtttgaacaacaaatcctcgacggtaaacgaagagttcagataattcacggaaacgccactgagccccggcagaccgataaagactttatactccggctgataagcaggatttaaccgaaattgctgcggaagatttgataagaaataagatgtattgttcccatcctgagctttaacaacactacctaatgaaaggattgccagcgcaatcaacaaaatacgcttcatacacttctaataatttcaatcaccaattaatcacagatttgacgatgtaaatgtatgttaaataaacaagatattcaataaatcctcccaattatattttataaattttaatcttcttttccgctccttctttttccgcttcaaatatcgtatcccaactccagcttagccacatcgctcatccggtcgggcgtccatgccggctcgaaaaccaggtttacggtagcactttctataccttcgacttccattaccacatcatgcacttgctgcacgatctcatcggcgatcgggcatccgggagccgtgagggtcatgtgaatgatcacttcggaaggctttggaaattctatatcgtatatcaaccccaattcccagatattcaccggaatctccggatcataaaccgtgctcaatttctcaataatcagatcccttgttatactggcagtcatatccatccgtctttaatcgtttaaaatttcttacttcgtattttgcgaagctgcctcagcagcaattgcatagaatttgatctgtttcaccatcgcaagcaggccattggaacgggtaggcgacaaatgctgggtcaatccgatctcatcgataaaatgcaggtcggctttagcgatatccgccggcttctgtccggaaaagacccggatcaacaatccggcgatgcctttggtgataattgcatcgctgtcagctgtaaaatacaaaaggccatcctgcatatcggcatgaaaccacaccctcgactggcatcccttaatcagattttcttcggtcttatgtgcttcatccatcccttccagacccgatcccaactcgatcagataagcatatttatccatccaatcatcatatatagaaaattcatctataatttcctgttctttttcctcgattgtcatttttatcaatttttatcctatcctttacaaaaatataaatatcaggccaacttaaacattttagccacccggtgtaatccttcgcaaaacagatcgatttcttcagaggtattgtacataccgatcgaagcccttaccatacccgttaccccataatgttgcatgaccggttcggcacagagctgtcccgtacgaacagcgatccccattttatctaacaatatgcctgtatcggaatgatgtatttctcccaatgcaaaagacaggacggaagatttccgtatagcttcgccaaaaatccgcatagcaggaacctgccgcatccgctccatcgcatagtccaacaactgctgttcgtaaacagcgatctctggcaaaccgagggattcaacataacgaatggcttctcccaagccgatcaccccgataaaatcgggagttcctgcttcgaatttaaaaggaagctcgttataagtcgtcttttcgaaatgtacttctttgatcatctctcccccaccttgccagggaggcatccgattcagcaaatcctccttaccgtacaacactccgactcctgtaggaccatataacttatgtcctgaaaatacaaaaaaatcacagtcgagcgcctgcacatctatcggtatatgctgaacagcttgtgcgccgtcgaccaacacttttgcaccgatccgatgagcccggccgatcagctcttttaccggatttaccgtccccaacacattcgaaacgtaagcgactccaactaatttcacccgcggagtcaataaagtatccagttgtgacagatcgagctcccctttatcgttaaacggaagtactttcaataccgctcctttccgttcacagagcatctgccagggaacaatattggcatgatgctccatttcagttaccaggatttcgtcaccttcccggataaaagcttctccgaaagaaaaagccaccaggttgatgctttccgtggtaccccgggtaaaaataatttctttatccgaaccggcatgaatgaatttccggacaatttcgcgggcttcctcattggcatcggtacatttattactcaaaaaatggactccccgatgtacattcgagttgtacttcaggtaatattcgttcattttttcaatgacttgcaacggccgctgagtcgtcgccccattatccaggtataccaagcgttttccgtatacctgttcttccaatatcgggaaatctttccggacttttgcaacgtcgaacatatccgattattttttacattgcataatgcaattataacatttcgataattcacccctcagccgcttatcgatcaaatcatcgattttcacccgcaggggttcgagttttacccgccggataatgtcgtgagcaaacccgaacatcatcatcatccgggcttcttccggactgattccccgtgaacgcagatagaacatagcttcttcatcgatctgtccgaccgtcgccccatggctacatttcacatcatcggcatcgatgatcagctggggtttggcatttatccgggcggtatctgtcagcaataagttgttattggcctgataagcttcggtcttctgtgcatccggccgcacacggatacatccgctgaaatttgccagtgcagcatcatccagaacacccttgaaatgctcgttactcgtacaatgcggagcaatatgatcgatgtaagaaaagttatcgacaatctgttttttatcctggatatacatcccgtacaaatgacattctcccccttcttcattcaaagcgacatacatattgttccggatagtacccccgtacaaggtcaccaggttactttcaaaagtggaattacggtgttctgagacaaataaagaattgatctgggaagccccgagatgttgattctgtacctgataatattccatatgggcattggggcccaaatatacttcggtcgtattgttgattaaaaaatcatgctctgaaagcgtgtgatcgcaaaccagtacagtcgctctggcatttttccccagtacgatcaggttacgttggaatcccatcagatcggccttcgcccttaagagattgataatctgcaaagggcattctaaaacgacatcgtcagggacataaacaaatacaccgtcctgtgcaaatgccgtattcagtgccactaagccatcccggtgagcgacaggcgcatagtggttataatgtttagcaaacagatcagggtatttcacactcgcttcctgcaaaccacagataaccacttcctccggtatttcggctgccggattcccatcgaaccaccaaccgttcacggtcaatacgggagtggtaaccaaatccgtaacagcacagcggaaagtttcgttcatatccacctcctgccggatatatttcaacacgacgttataatctttgccgaataagggcagcagattcagataaatataatcttcctgtttattcgggattcctcccaaatcgacaaatttacggaatgcttcctcccggcaaccgttcattaccgcgctgtttcctgcatcgagcagggcccggccttccctgaacaaagttgccaaatcggtatttattttttcaaaatcgttcatatccgactacttaccttttacttcttccttgatccaatcatatcccttctcttccagttcggctaccagctctttgccggcggttttcacaatacggccgtcatacaatacatgtaccacatcgggtacgatatagtccagcaaacgctggtagtgggtaatgacaatcgtagcattctccggctttttcagtttgttcacgccattggccaccgttcgtaacgcatcgatatccaaaccggaatccgtttcatccagaatagctaatttcggttcgagaaccgccatctgaaaaatttcgttcttcttcttttctcccccggaaaaaccttcattcagggaacggttcagcaacttattgtcgatcccgaccaattccattttctggcggatcatctttaagaaatccccggccggataaggaggctgtccatggtatttacgaatctcgtttactgccgtcttcaaaaaattcaccgtactcactcccggaatttctaccggatactgaaaactaaggaaaattccttcccgggcccggtcttctgccggcatctccagcagatttttaccattgaattccacttctccctgggtaacctcaaaacgttcacgaccggtaagcacagcagaaagcgtactctttccggcaccgttcggtcccatgattgcatgaacttctccggctttgatttccaaatcaatgcctttcaatatttctttgccatctaccgaggcatgtaagttttttatctttaacataatctcacttctttcagaatgaatttacttttttattcttctcccttttacttgttaccttctcctttttaggctccagcctttagctttttgctttttagcttttttaccccacacttccctccaaactgatctgcaacagcttttgtgcttccaccgcaaactccatcggcattttattgaggacatcaccggcataacctttgataatcaagcccacagcatcctcggtcgaaattccccgctggttgcaataaaaaatctggtcttcgccgattttagaggttgtcgcctcatgttctacctgagccgtcgaattctcgatttccaggtaagggaacgtatgtgccccacatttgtcccccagcaataaagaatcgcactgagaataattacgggcattttggcagctcttcaccacttttacttttccccggtaagagttactgctgaacccggcggagatacctttagaaacgatccggctacgggtattgttaccgatatgaatcatctttgtaccggtatccgcctgctgataattattggtaaccgctacagaataaaactcacttaccgagccatctccttttaaaatagtgctgggatatttccaggtaatagccgaaccggtttctacctgagcccagatcaaacgggcattttcgccccggcaaattcctcttttagtaacgaaattataaattccgcctttcccgtccttatccccgggataccaattctgtaccgtactgtatttcacttctgcatttttctcgacaacgatttccacaatcgctgcatgcaactgattttcatcgcgttgaggagcggtacaaccttccagataactcacataagcctcatcttcagcaacaatcagtgtacgttcgaactgtcctgtattccgggcattgatccggaaataagtagacaattccatcggacaacgtacccctttaggaatatagacaaacgaaccatcgctgaatacggccgaattcaaagcagcaaaataattatcatgataaggcacgacagtccctaaatatttccgtactaaatcgggatgattttttaccgcttctgaaaaagaacagaagatcactccgcgttcagccagcgtatctttaaaggtagtctttacagaaacactgtccatcacggcatcgaccgccactccggacagggccatttgttcgctcaaaggaatccccagcttatcgaaagtagccttcaattccggatcgacctcttcccaactcttcgtctccttctgtttcggagctgcataatatacgatatcctgataattgatctcaggaatatccagttgagcccaacggggcatcttcatcgtcaaccaatgccggtaagctttcaaccgaaattccagcatccaatccggttcctccttcttggcggatatgatccggatcacctcttcgttcaaacctttacctatcgtatcggtttcgacattcgtcacaaacccatacttatattcacttccggtaacttcttctataatattgtccataaaacctattgaaacttgaaaattgcaacttgaacctaaattcaaagccaatcttacgattataatcacaaaagtaagaaatttatttaacacacatccagagtcaaagaaccaaaagttaaaaaagtctgtccgaccgtagaataaaatccggaggatggttgatctgtctgttaatttacactatttttgcagaagataagctgtacctcggcataactttcaagcaagcttgaagattctgctcccggtttgcattatctttgcccgtataaacagatcatcaacaaacatacgttcaattttaccatgtccaattatacagaactttctacattaggagaatttggtttgatcgaccacctgacaaaaacgattcgattacagaatccctctaccctgaaagggattggagacgacgcagccgtcctggattatggcaataaaaaaatcctcgtcagtacagacatgctgatccaaggtattcatttcgatctgacttatacccccctaaaacatttgggatataaatcggtagccgtcaatgccagcgatatctatgcgatgaacggcattccgaaacagatcacgctctccctcgctgtctcgaaccatttttctgtcgaagggctggaagagttttatgccggcctatatctggcctgtgaaaagtacgggatcgacctggtcggaggcgatacgacttcttctaaaaccggcatgtgcatcagcatcacggtattgggagaagccgatgaacaggatatcgtctatcggaatacagccaaagagaatcaactgatctgcgtcagcggagacctgggagcagcctatatgggattacaattgctggaaagagaaaaattagtttttcagggagacgaaaatgcccaacccgatttcgccggttatgaatatatcctggaacgccaactgaaaccggaagcccgtaaagatatcgttcaacagtttaaagaaaaaaatatccttccgacggccatgatcgatatctcggatggtctggcttcggaaatcatgcacatttgcaaagattccgggatcggttgtaacatttatgaagaaaaaataccgatcgattaccaaacgttcaaaatggcggaagagctcaatatgaatgctacggtatgcgccttatccggaggagaagactatgaactcttgttcaccgctcctttagagcattacgacctgctgaccgctatgccgggaatcagcgtgatcggccatacctgcaaagcctctgaaggatgttatatgactacccgcgacgggaatactttcgaattaaaagcccagggatggcagaatttttcttcaacaacggctgccggggaaagtgaaaataaaaaagcaaaggaggacagatgagcagagatttagaagatgttttacgggaaatcggggagctgagtaatatacatgcagaccgtaaaaaactgcgggccaacttgcgggagatcagagaccaccgtctggcttattacaatcaaagcaacgaaaaggagttgcaggccgaattttcagatgccctgtttaaaattcttttactggaattagatgaagaagaagaagaaagcatcgagatagcagaactggcttatctgggcttggggcatattttcagacgaccggaattaccgacccccgagctttataaacgcaggttattgcttttgcattatttctgtgattattttaccgattccatcatcgaagtatttctctccaaatatcgggaggacaacatattacaggcgagaagtctggctatcgaatgtctggagaagatgcagttgtcggatatgttttatctggaagaaaatgcaaccgattttatcgacggagatgaacaactatcggacgcttgcaacggtatcgaaacagatccgcgtttatctgaggaggaaaaagccaatgcagccttactacacaaggttttatacgcttacctgaaagccaaatacaaaaactgagagctttgagctctcagtacccttctcaattaatgattcggattaaatctcctttcgccaccccggggagaaaatgaacgatgacctctgttttcaccttcttctctcggacgagcttttttcactactatctttcttccttgaaattccgactcgttaagagcattaatagcattcattccttcggtttcatcctccatttcaacgaaaccaaaacactttgaattgccggtttccttgtccataattacttttgctgaagaaacagtaccgaattctccaaagagagttgcgagatcgtcacctgttgtggcggaactcatttttgctacaaaaatattcacaataaaaaatattaaaaaaatgattaaacatatagaagggtacgtagagctatatttttagttacaaaaacacaaaactaagattcttctatcgacacaaatataaagtaaattattaatactcagaaaaaaaatctcccgataatttacaacaataaaaatattttcattttttctttgcattttatttgcacattccaacaaaagctctacctttgcacacgcaatgaaacgctggtggcatagctcagtcggtagagcaaaggactgaaaatccttgtgtccctggttcgattccaggtgctaccacttcccgataagcagttacataagtagctgcttatttttatattccccccgttcatggagcaatcgaaatccgatagtcaagcataaccggattactatcgcttgtaataccaaccgatagagaccacagccgacacgatgcacactcatttacggtaaaagtaagttctgtagctccccgatcgaatctaccacataatccgccccagcagtttccagttcttcccgggagccatatccatatacacacccaaccgaactcactcccgcatgcttcgccccgagtatgtcgaatttacggtcaccgaccataattacttcggaaagagatacaacctccttagtcttcagtacataatcgatcacctcttctttagtcgagcgtactccgtccaaagtagcccctccgacaaaggaaaaataagcggcaagctgaaaatgatccaatattttccgggcgaatacttccggcttagaagtagccaccatcatggtctttcccgcctgacacaaacgatccaacaactcaggcatccccggatatacctcgttttcaagccagcccacagtcgcaaaacgttctctatacttcaagatcgcttcttgcgcctgagcttcggataaacgatagaattcctgaaatgaatccaacaaaggcggtccgataaaaggacacaactcctgcaaatccttcacctcaatccccaaatgccgtaaagcatactgcacacaggtggtaattcctatcatcggatcggtcagcgtcccatctaaatcccataaaatatatttacaatttttttccattattcctcttttaaattcgaaagtttacctgcctcaacgttacttcgttcctgatcagtgccgcctttcagatttctgattagcgaaccttcagttctgatggggggaattttatccggaacatagttccgccgatcaaggtaatgctaatccgaatccgatggataataccataattcagctttttctacaaagataatcttaaaatagcaaatgacaagtccggcagactttcagcgatcgaaaatctaccggactacaatcctcccctccagcctgtcaattgatcacaaacgctcttccagccattctaccaactgatgtttatcttttgcctgtccgatgatctttccgtcaggcccgatcaaaatcaaagtaggcaaataaggtgcggcatacatcgtgatcaccctggccggtttgtatggctcagggaattcatcgattacctgtttccatggcaattgatcctgttccaaggctttcagccagtcctccctgcggctgtcgttggtcactcccaggatctcgaaccctttatccttaaagcgggcataaatctttttcatttcggggaacgaagcccggcaagggcgacaccacgaagcccaaaaatccagcaacacgtatttaccccgcaaatccgacaaagccagccggcttccgtccggcgtctccagcgaaaaatcgggagccggttgccccggccgtacccgctcgcggatagcaatctcctcgcgcacctctgccgccataggactattctgcactttaggatccaaaacggaaaatacttccttcaactcttccaacgtcatatcgttccacatcatccgcagattcaaaacggacgactccaccgtgcggttttcccgtataagctccaactgccgttggcgtacagcttcggaaaagcgttcggacaaaggctccgtttcgtcctgcaatttataataggcttcggtatccgtattcctcaatccggccattttctgttgtgcctcggcatattccttgtgctccggggcttttaatatctgcccgtatactccggcgatcttctcatacacttcctggttcaaactcccttccaccgtttgtccgccgatcgaacggtagccataccgttcgatcacatctttccaggcagccatcacccggatcggggaattctctgcaataaatcccagacttgccggctgatcgctatcaggacacacctttacagtgacggaaaccggggattccaaacgcccttcgaacacgaattttccattccgcatattcaccgtatctcccatcgtcggttccccgaaacctgccgattgtaacaatatggcttttccgtcaccagccccttcaatgttgccggtaatccggtaaccgtctgccggggctgtgcaagcagccaccccaaaaaggataccccctattatcatttgtgttttcatatcataattttttatttatttcaatacaatttttttctctgtcggagtcatgcaaatcatatgtttcaaatcttccatcctagccgcatgatttttcatcgtttccacgttcagggcataagcccggcgggtagccgaaaaagcacgaagcgtaatatcatgccgggtaataatgcggtcgttatatttgcgggcgaccggcgtttggccggcaaaaccggcaatatacaccacagcattggcaaacacatcccgggcctcatccgtcatatcgtcggacaaagcagcaaatccccagtggagaaagttaccatgtcttccgatcgccacagcatcccatgtcttagccgaaacgccaccggaaattatctcagcttcaggcgaatcctcgaaaccaccgggccgcgataccatgccgacacggagctccgcttcgacatatacccttctttctgcacccgccacatcggtaaagaatcgggagctatggtatcatcgatataaggcagcgtccgcatcggtttcttcaccatcggacggtcgaagtcgggaggcaaataaccggttttttcataccgggtcaggcggcctgaactatccctttccataatgcccggcaggataggagccggccgaccgtccatcaccgttacatcataattgtccgacaattccggccggtaggctttggcccggatcaccgtcacctgccggaaatagcgtttcaacatcttgtcaaaggaagccatacgtttcgcactgctttgtgccaacaccgccgaatcgggacggttaccgacataatcgacatccggcgaaccgccgacatacaacactttcaggttacttttacggatcccggcctgtaaacctccggacaggcaccaacaaagcactataccaatgattgttttcattttctttatatttaattcccgaatacttccttcaatttttcatccattttttcgtgagattctccacctcccccataacgtccgataatcattccttctttatcgattaaaattttcgtcggtaaagagtgaattccatacagctcgctgatatcttccgagcgatcgaagtcttttccatcgaacttcaatccacgcaatacgtgatgaaacatcccgatgtcatctttctttacagctgtccgccatttagcctcgtccggatcgtcgtcggacacacacaccacttccaggccctgatctttatactttctatacaattctttcaaatggggattacttttccgacagggaacacaccaactggcccagaaatcgataatcacgtattttcccctgaggtctgccaacgaaaacatttctccgtcgatatcctttttgctgaatatggcagcaggactgcccggagaaccatttttcaacttttgaatttcctgatatacttcttgccccagcttacttttctttacccgttcactcaaacgatcgaaaacagcctgtgcttcgggataagtcatggaactgactttatatctcaattgtcctgcagtcacatacgaatcgatatgtgttgctataaaccgatcagtaatttttcccatttcttcgtaaaacggctccattttatctttgatttcggtagacttttcaggatctttctcttttctataagcatcgttcaaagccttcattcgattccggacagctattaactctttattcaacgcctgcgcttcctgtccggttaacgaacgtttaatctacaattatcgtcttgcctttcacctcgaaacggacatgggaagttttttcaatgaccttcaacatatcgtcgatttcccgataacggggcaggcttccactgaaatgacggttacgggaaatattattacggaaaaagacttcgatatcgtaccacaaagacaattcatccataatctgttcgatcgatttatcttcaaaaatatagactcctgatttccaaccgatataattagatacatcgacatttttaatctcggtctcaccgatcaagcgatcgaactgcgccaactgaccgggcttcagcattttttcagcggatcgttcggtttttatcgaaacagctccccgtaccaaagtggtctgtacataatcggcaacccgggtattgatattaaactccgtcccatacaccttcacctcgatatcgtccgtcacgacaacaaaagctttctgccgatcgtgagcaacctgaaaataagcttctccttttaaatacacccttctcatatctcctgcaaaatgtaccggatacttcaattcagaagcggaattcaaccacaccctggtcccatcactcagtacaattgcatactcacctccccgaggtacgatcaactgattctcggtatcttcaatccctgcagtcaacgtatcggaatagattaaaccatgattactgtttttagcctttaccccctctccaatctcgacatcagcggtttccggattcagatttacagtctttccctccccggttaccaaaatagccttttgtgttccgggcaaaatagtcgccgtcggccggttttcggtcaataagggctcttttacggatgaagtcacctgccaccataaaaagcaagccatccctaccgacaagatacacgaagcagccagccacccccctatccgtaccatccggtgccttctttttctacgttctgcaacggttaacctgacttcgtaggaagctttgaaccgacgaattcgttcttccgtaggccggaaactttccggagaacacagaaaagtttttatttcccggtaaaattcccggtgttccgaagattcatccaaccaagcattcagcaggttccgttcttcttcagatatatccgataatacactccgctttaaaagtacccaatcgatcttcatgatctttaattttagatacctcttaaacacgaaaagataaaatttgtttacaggaaaagtatttttttaaagaaaaggagtaaaaaaaagaataacggccagatcatattccgcaaaacgctgccttaacatctccataccccggtgagtttgtaccctcgcagtactttcggaaatatcgagttcttcggctatttcctcaaattttttcccttcaaaaaaacgccgccgacacacctcccggcatttttcgggtaactccagcatcacctcctgaattttccgcaacacttcttcttcctctatccaatcgacattatccgaccatagacaagcttccgcatataaattcatacgccggtcttccaccttacggtcccgcaaataattaaaacaacgattccgcacactattaaaaagatacgactttaaagaaaggtcgtaattcaggatttccgatttttcatacagactgataaaaatttcctgcacaatatcattagccacatcctcccgaaacacaacgcggacagcaaaggtaaagagccgctcgaaatacttatcgaacaatatcgaataagctttccgatcgttcttgcgtaaatattttattaaaatttcatcttccacgcctcaccagaatatttatcatctatttttacaaaaatatcttaaatttccaatcgggcaagaaaaataatgcaattttttgataaaacaattaaatagtccaatcgaggacgatatcaagttttatccctgaaccgacccaaaataagaataatcatttcaacatctgatcgatttgctgattgataaattgtaattcttcaggagtcaggattatatcggcagctttcgcattctgaatcgcctgctccggattgcgggccccgaccaaagcaacggtaattccgggatgttcgatcgtccagcggatcaccaattgtccgagagtcgcttttttctcatcagccaaaggttgcaatttttctaaaaaagcattcgttcttttaatgctttcgtctgtaaaaaaagggttttctttccgatgatcgccttcagcaaatcggtatccgggttgcatcttaccggtaagtaagccacgttcaagcggactataagcgatcactgatttttcattacggatacaataaggtataatatcccggtccatcccccgattaaccatactataaggaatctgatccgataccagatcgatcagtttagcggcatcttccaacaaagcagcatcataattacacacacctgcataacgtacttttccttgctctatcaaacgctctactgcctcgaaagtctcactcaaaggagtcgtagcatccggccaatggatctgatagaggtctatataatccgtaccgagccgccgcagactgtcttcacactctttgatgacactctctttgccggcatatttgtaaatatctatagggttgtcctgattatctttgcttttaaaagcgaattcaccttgtggcaaatcccatctcataccgaatttggtcagaatctgtacctgatcacggggaataccccggatagcctctccaacaatccgctcactctcgccttgtccataaatcggtgctgtatcgatagaagtcactccaccatcgtaggccgcttttatggcttttacagcttcgtcacgattcgattttccccacatccatcctccggcagcccgagagccgaaggtgatagcggataaggtcaagtcagtatgggctaatgttctatattccataatagttttatcatcgattgaaaacccttaaaatacgaaataaccacctcaggagttacaacttatatttcatcacaatctcacattgttccccttcatccaaagccagatggataaaaccattctg

SEQ ID NO: 6078 - DNA, 1234 bp, Unknown
  gut microbiota DNA sequence
taacctgcaagcggtacgatgtaagtcagaccatccggaatactaatcaaattatatccttgttgcaccatatctttcggattggcaaaaccattgtaccaagcatacataatgacattatctgatttaacaggtgtttctcctgcggcatgtgtgagtgctccccatacacctgcttgttttccaaaaccttctacgaatttaatgtaatgatcggtgaatgcccggaactgttccacaacttctttctttttatttgaatattcgtcggtgccaatatgcactctaggtccccggaatacagggttctctccatcaagatattctttgaagagtgcatcaacaaatgaatagacttcgggatgagacaaattcaaatgatccatgccatattccttgctgcctaattccggtttgtaatgactgaaggcaagcgaatgggcaggaacgtcgatttcgggaatgatctcgacaaaacgttctgcggcttcctcctgaaaatggacgaattcttttttagtatagtaaccatcgcgggctgtcagtccgggatatgtttcacattccagtctgaaggctgcataggtctgattccaatcgtcattgaaataggctttgaaaccgttgttgttcaataccacatgcatgaagttcattttgtaatatgacattatacacgcaaggtcacgtagataattcataggaataaactttcgcccgcagtctatcaatagtccgcgtataccgtaatccggccagtcccggatatgccctttcggcaagtttccgttcttgtattgttctcccatctgcaataaagtgcgggtagcccaatacactccgacaggttcattcgcagaaacttttacataatcaccgataacaatgtcatacccctctttctccaactttttatctcgctttattgtgaagaaaaaatcgcctttacaaggctttccctcggcgatttccggaagtactccgaacaatgccttatagtcggcagcaaattgtcgggcaatcttctgcaacccaggagcaccataaatgatgcgcacagactgctttggcataaagaagcctgttgctcctttccactccttcagttcaggtatcacaaagggtttctgttgctgagcatagataccgaaacaaaaacagatcccgcaaattaagcaggtcactcgttttactaatccggcaaaatttgttttttgtttcatcatattcatag

SEQ ID NO: 6079 - DNA, 13275 bp, Unknown
  gut microbiota DNA sequence
aagtgattatactggggcatcttcatatgccattgtattttatagggacatttactgaatatccctacctatttccgaacggccgccttatgctaattccacaggtcttgttcgtattcgaaaatttcattttttcatcaggaaaacaacacctaatgcacattccctttccccctaacctatatttagcattctacggcaaaaaagataaaaaatcacatacacactttgatttcctctattcttgcatttttaacactcaatattttaaatgttaaattatttacaacaatagtttccccttcctgaggaatactttgattgaaatacaacaccaaaccggcaagcgtctcatactcctcacgctcttccagatccaggtgatatttttcatttaagtaatccacctccaaacgtcctgaaaagatatattcttgttcggaaatcatcacttctttcaaattgaggtgatcgtgttcatcttcaatctctccgaaaatttcctccataatatcttcgatagtaacgatcccggccgtaataccgaactcatcgacgacaacggcaacacttttctgatcccggataaacaaattcaacagccgttgtgcagacatcgtctcaggtacgatcaatacccggctcaacgctttggcaatcgtcggaggatctttgaaaagagtcgatatatgaacataaccgataatatcgtcgatactttctttataaatcaaaatccgggacaatccggtatcgataaagagttgggtcaactcttcgatcgaactgtcgatagacaaggctacgacatcagggcggggaacgatacactccctcagcttcacttcggaaaaatcgagtgcattccgaaaaagtttgatctcgtgcatttcctcctcctgccgagcattgacttctccttcctcgatcaggttgttcaaatctacttttccaaaagcccggttgggttctttatgccctaatttccgtccggtaaaaatccgcagcaaccatcctcctaaccacaccgaaaaataagacaacggaaaaaacaacagataaaacaaaaaaacaggaacagaaaataacttcaaaaacagattagaccgtaagcggaatacggtcttcggcaaaaattcagcaaaaaccaaaatgatcagagtcgaaacgagggtctcgacaaacagttcgaccccgatcgataaatgtaaaaattcgaactgtttgaccagcagatcggacataaaaataccgtagatcaccatgacgacattattacctaccaataaagtcgtaatatacatcccggaatgcgaaatgaacagatcgatgagagcctgagtgactccttttttagacttatcgatctcgatccgtaatttattagaagtcaggaaagcgatctccattcccgaaaagaatgcagataacagaagacaaatcaatatcaccgaaagggttgctgtcattgcttacgttgttgcttttcaacttcgatactacctgaaatattctcaaacaccggatgattcagattctgatcggaatggaagccgttattaccttcgataatttgtccgtcggcactcaacttgacataacggtcggaatagatcaattcttttttcatatcccaatagagtaattcggtttcgagctttttcccctctgcattgattatcaccacttcattacgcgcctcccaaagcatttcatcttccagctttttggcatatttcgctttaatcgaaccgatcatctttcctgcaggatcataagaaagtacatggattcctttcggaaactcttcatatttttctttttccctatttacttttatgtattccggggccaataccctgtatttgatccgggcagaatcggaatagaccaattccaggttttcaccggtcatatcgggacgtttctcccgctcagccaatgcattgacttctttgatatcatttttacatgctaaaagcattattgctcccagaagaacaataatgcttttcatataaagtatacgtgaagaaacactcattaatatacgacttactattttctgaaacgtgctttggtcgattcgttgatccaactaccgattttaacggttgctccatcggtaacactacggaagaaagcctcgtctttactcgggaaatgttgggaataaattccgatcaatttatccgcttcttctgtcatagcaggatccacttgttttgctttttggaatttatcgacagcagcccagaatacggatgcgtggtcaaaatcgtcttcaccgtaattggaggccgaattggcataggcttttccgatcagcatcaatgcggttccgttgttcggattaagtttcagcacttccagcgcattagtcttagtcgcctgatattgctttttagccaattgcaactgagccattttcaggtaatattcagctttagcctcgttatcttcggatttcgcgatcgcttctttcagataaccttcggttttatcgaattcctgacgtttcaggaacatgatagccaagctataagccgcatcagcagtcggatccaattggtacaattgctcagctacagttgcatataaaggcaaatcgacacattcgctccgccgtaacagagaagccacctctttcaagttagcgacatcttccttattggcttcgtattttgcagaaagcaagttattcaaggtttcacaatctgctacaccggcattgaaaaacatagcatccacattccccttcatcgttttgaacgcttcaaccgttttgggttgtttggcatttttgattccatcatcgataaaaccggaaactttcatataaagagcgatgtattcatctttcgacagttctccttttttcagcagatccccggctccgaaaaacatggtttgcaccgtgatcgggtgagttttattaccttcgagctcgaatgatttagccaaataagaaaaagctgtttttttagtatcatcccctccgaaacgatataaagtagcccctttctttcccaaaatataaccttctccatacctttgatgatccccaaaatatttcgcccattgatcatacaacatcatcaaggtatccacataagtcttatcttttgtctgctgatagatattgatcaacagatcttcccctttggtataagtaagcatctgaaacttgggagcgttattaaaaacataccgccaggcaggcaaagcttccttataatttttttgtttaagaaattctgaataaatagaagcattctccaacgttttcacactatccagtccgtatttggagtcgagtgtctgcgcactgactgcccctcccataagacaaataccgaatgctaaagccacaatctttttcatgatcttatcttttttaaccgatgtatttaatgttttgttagttacttatctaagcttactctgcaaaaatatcactatttttcttttaatatacagggaacacctgtattttagctaatagttcgactttttaacatatttcaagatctcattcaatcctacaaaactaagatatttacaaaataaaatatccggagtcagatgtctttccaaaaaatgtgcatttccccccgtaatcaacacatgtccttccgggtattgtccgagaaagcattctatatactgttgtacctcaaaaagcataccagacatcacgccattccggatagcttcttctgtcgactgtcctattcctccataggtttctgtcggtgtcaccaaaggcaggcgggctgtaaaccggtgcagtccgttgaaacgcatttccaatccgggagaaatatttcctcccagaaacacgccctcggccgagacataattataagtgatacaggtacccgaatcgatcaccaagagggaagcccccgggtaataactctttgctccgacacaaatagcgatccggtcgaatcccaaggtctcgggagtagcgtatccgattttcaacggcacctccaaagcaggcgaagcttccagccagtaatcggcttgctcttttatagccagctgcatttcggaatcgatatgaccacttccggtaagaaatatccaaaccttttcccctttttctttccatacccgaatgtcttcaagaatcgaatccaaccgatagtttaccccgatcagccggtcttcctgaaaaaaagcatatttactacgggtattcccgatatcgattaccaaattcattgcctaaaattcaaatctctgatctatcatctgttacctgcctctgttttctcccacatctcccgcacataacgcgacattttcataatattcgtaatttctgtaaacacgagcgataatttattatttttttcactgaaccggcaaggcaaaatttgcagctgcacaaacctcagtatagcggcaaacaaggccgactgataaaaaggagaagtctgttcgccgacaaaatacatgatcattttcccattcttcaccaataatctctcgatccctaaatccatacaccggcgtctcatcctcacaatttccatcaatccggtcacctgtgccggaatttcgccaaaacggtctttcagctcttgcccgaatttctccaggccggcctcatccggaatattgtccaactcccgatacagccggatcctctcgctgatattctccacataggtatccggaatcaatacttcgaaatcggattcgatcacacaatcggcaacgtaagcctgcttttgttcggtcggaggcgtttccattccagggaactcttcttcgcgtaattccagcagagcttcattcaatatacgctgataggtttcgtaaccgatttcagcaataaatcccgactgttccgctcccaggatattcccggccccgcggatatcgaggtcctgcatcgctatattaaaaccacttcctaaaccgctgaaatcttcgatcgctttcagccggcgcctggcatccgaattaaccgtatccaaaggaggggtcaataaataacaaaaagcctttttattcgaacgtcccacccggcctctcagctggtgcagatcactaagcccataattctgggcctggttgatgatcatcgtattggcattcggaatatccagccccgactcgataatagtcgtagcgatcaaaacatcgtaatcgccccggacaaaatcatgcatcactttttcaagttcttcgccttccatttgtccatgtgcaacacaggttttcacctgcgggacaatccgttgcagcatgccctgaatatcccggatggtctcgacccggttgtggataaaaaacacctgaccgttacgggccatttcataaagaatcacctctttgatcagctgctcgtcgaaacggtgcaattccgttacaatgggataacggttaggcggcggagtacggataatcgacatatcgcgggctcccatcaatgaaaattgtaaagtacgcgggatcggagtcgccgtcatagtcagggtatctacattcaatttcagggtcttcagtttttcctttaccccgactccgaatttttgttcctcatcgacgatcaacaatcccagatctttaaatacgacatctttgctggtcagccgatgggtaccgattatgatatctactttgccttccttcagatcgttcaggattttcttaatttctccgggtttcttcatccggctgatatattccacccgacagggcatgccttccagccgcctggaaaaagtatggtaatgctgataagccaaaacagtcgtcggcaccaggacagccacctgtttgctatcggccaccgccttaaaagcggcccggattgcaacttcagtcttcccaaatcccacatctccacagatcaggcggtccattacctgaggtttttccatatcggcttttaccgcttcgatcgcttttatctgatcgggagtctcgtcatacataaacgacacttccatttcttcctgcaaataactatctttagaaaaagcaaaagcagcttctttcttgcggcgggcatagagggcgatcaactcccttgcaatatcttttacccgggacttagttttctgtttaagtttattccaggcatctcctcctaatttgttcacgacaggaggaacaccgtctttccccttatatttggatattttatgcagggaatgcaatccgacatacaattccgaattattcttatataccagccggatcgcttcctgttcgttgccatcgttgttgattttgaccagtccgccgaatcgtccgatcccatggtcgatatgcacgacataatcccccggatgcaaattttgcaattcccccagggtgatcgattccctcccctgccggatgcgggtagtctgcaggcggtatttatgataacgatcgaaaatctgatgttccgtataaacacaaatcttttcattcgaatccgaaaatccttcatgtattacgccttccagccaggtaaaaccgatttcgtatcctttatctttaaaaatatcccggatacgctggatttgcatttcattgttcgaacagatatacaaccggtaatcgttggcctggcgggattgcaaagtctctgccagcaaatcgaaatgcttgttggtcggaggctgaggttcacaggctacgtctatcgtttctccccggaaatacatatccggtccccattccaccacatggcaatcttcgagataattcatcagtccttcggcagaagtgacgagctcttccccggcttcggcatataaagctttcactttatcgtgaaggaacatcccatttttgatccaccagaccggtttaacagagaaataggaactcaagtccgtatgtttaaatcctccggcctctgttttgccactgagatcaggaacgatcgatactttcccggtctttttatcggataactgggtctcgatatcgaaaaaacgaatcgattcgacctcatctccgaaaaaatctatccggaccggctgttcttctgcaaaagaatacacatccacaatactcccccggatcgaaaactgtcccggttcatagacaaaatcattccgttcgaacccgtattctaccaaaagattttcgacgaaagaaatcgataaggcatctccctgattcaccaccatcgacatgcgggaaagcacttcccggtcgacgaccttttcagccaatgcttccggataagtaatcaaagtatcgacttcgccattccggatattattcagcacttcggtacgcaccaggaccgaatcgttatctttctcttcctctttaatcatcctgcgataagaagaaggcaaaaaggcgatttgtttttcatcggccaaagccaatatatcattataaaaataggcagcttcttcccggtcgttcagcacaacgacccgcaaccccggccgggtgatacgcatggctccgacaatcagggaagtcaccgaaccggcattgttgacaagtctgtatttccggtcactacgggtagttaacagctccgttaactttttcaccgcccgggcagagagatatttttgcagtaaatcctttgtgttcaattttcttctaattgatttcgacaaaggtaaaaataatgtagcaaaacttacatagcaaaaaaataaaaagtcagattcccttagaaaacaggatacatccatactgtatacaacaaacctattgcggaacagaatgcgtgatacagttacttcccatattacaaatagggacaaaaaatacttgatttcaatatttgaaataattgagaatattttttgttttttcttaaaattaatatatttttgttatgacaaacaatattaaactaaaaaagaaaaaatagatggttgaaagactttatacccaacgactcgtcttgctactttctaatattaataacagctacattattaagccaaatcataagttttattagttttgatcgctctaataattttttacaacaaatgcttggctacaatgtagaagcactggcacaagatgaaggatacaacaaaggagataaactaaaatcagtaagctgtacatgtcctaataacaaatcaggcttttccttgaaatgccgtgccgatggtaatttagaacagtgtactcctacccgacaaggttcaaatggttgttataaagtcaaatttagcaccaagccattggatttgatttgcgaaggatcaggaattaaacgggatgccaattgctctgcaagaattacctttttttgccgactcttttgaaatactaaatgattcgatacttatttttaatggagctgcatttgaagaccaagtcgtactttgggattatcgtaacaaaaaacggattaactcatacttaaaatacacccctcattacaactgccggcctctaaaaccatttaccaaatgcaataatgaaatattatggcagcgagaatttgaacaaatgctatacagagttacagagcaagaattaatcccagcccgatacattgattttcaagagttcgcgtataatggcaaattagaaaaaacacctcaaggtatatactttctacaaccggatatagcacacatgaatcgttattacgaaaatgacaagtatatccattttatttttgaatgtgaagctttagatgatatgccgtttttggtctattattttaaaaagtcggggaaaaaaatcattttaaacaataatcattataaagacgacctaaccttttatcacataaccccaccggccatcaatgcatttacaaccgccggagatcctgtttctgttttatatacatcattttaacataaggaggctaataaggcaaaaatccagacaggcattccttaaaaagtatatttgtcgagatactgtttcctgacagtatctcgctgatttttatcattgctgtccggtaaaactaaaacgaaaccatcaaccgcatctgcaattcatggaaattcttatccatcggataatacacattactcaaacggctgtatttgtattcccccatcaccttgatatactgattcagtgtatagttcaaaccgacggtagccgcctgcattttaccccctccgatactcgtcgagacaggaggataatccgaaacgactccgcccgggtagaaaacatgctttccgatcaggaaaaaatctcctttattgatatcgttgagattgacaatgctataacgggcgacgatttccagcgaattcttttcattcataccgtccagtaaaccgtattcgtcgttgtaggtataacggttgcccatgatcagatagccggcttctacataaccaccgtcgaatttggtactgcggatcgggttaccggctttccaggcatccagcgtcgtccaactccatactcctcccagttgattggtgaataattcaaaatcgggccggtctttgtacaaacgtttatacagatattccccgcggacgaacaaacggtcggtcttaaacaagagttccggattcagatcgagaatattcttagcccaggcgacatcggcattcagaaattttgtagtcgcatccacataagtctccatggccgactctatagttacttcagttttaaaagcatcgtcatcgactacccgtccggtatttatccgggagtaacgcaatcccaatccgacatgcagcgtcatataatcgtcgttgatcaccttatacaaccaacgaccgctcagactaaacccctgaaatccgctgatctgatcattgtatttattttcggcaaaaataccctgatcggccaacaccttctgattgaaaaacttataagtaatccccagacttcggccaggcgccaaagcattgacgactgccggacgggaaataaaatgatagttataaagactcgtattgtaagccatcgtagaaggctcgcaaaaataaccggctttcacactctgtaccccccggtaattctctttaaagttgtattgtccgaaaatattcttctgtttgaaagaacctttagaaaaatcgaaatcggcataaaaatagaattgtttgtatttcaatgaagtacggatacgtgcatcggtaatagcagcccccgatttcatcggcgtatattcggaatgataataagctacatcggtaaacaaacggcctccggcagtaaatctgagtccattgttccgattgacatatttcaacagcggattggccacatcttcaacctgagcctgaatattcccggaccataaaaagatcgcaaccaaaaaggcggggaaaaatatttgttttttcatctgattcatttttacaaagttttgaaattcaccctaattaattattatctaagtatcccaattttctcaatacttcccttgcatcgaccagggtctgggaagcaggactcttccgccatccgtgcgtaatcatatagttgatactcatatcggaatggttggtaaataaagcatccaaatagggaggattgaacatgccgtcggctacgccgaaattatattgtccgaaatacttcgccatctgatcataggtatcgaaagtataaggatggtttttcatcttcgcccgatggatcaggtaatcctgccagggttgatccaattcaggataatcattaggggcccccgcgatacacggtccgataaaatgtgctttatattttacgcccaggttgataaaagaagcatatcccagcggatcgtcataagtgagatcggtagcaccggtccctttccacaacaggaaacacatgggaactttgccctggaatacctcggccacccggaccaaactttccaaagagaaggtttgcaggatcactttaccgttggtatttcctacattaatcgtcccgttgttgatataaaaaggcgtgtcctcgggttccggtttttcgataatattcatatcctgcgtattggccagtacatcatacacgatctgttcgaatcctttgggattcagccagggttctttaaattcgatatagattcccgggatattcttatttccggcttcccataccggatcgatttcatacccgaaatcatatttcacaatatcggcagtaccgctcagactggtaatcgtttcccctgttttcccgacaatggaatattgccggggcattcccggttgattgcggtcccggatcaaccgataccctttcgaatacataatcaggtcttccagtgtggaaatatattgcttttctttagccaatccgggcagggcttcttcgagattctcgttattgaaccaactaccggcatcgagcatcagcagttcttcgtaagtataataagccggtaagttaggaacaaaattcgcttcatccgcttttaccttttcttcggcttctgtctccgagtatccgattttcatataataattcttccggatttcccggggtagtgtttctccgaaaaccgtttcgatgttagtggtccgtttcaggttatcgtcatgtagtgccagtaccactccgtctttcgacacctgcatatcgcattccaggtaatccgcaccgatttctctcgcccaccgataggcggattccgtttcttcgggtgtccaaaaagtagagccccgatgtgcaataaccgcatattcgggaacatagtcgcgcactttgatcatttcaggagaaagctcatcgacatgtacccggtcgacatccaccttcacatcattaaatttctgattttcacatgacatcgcagacatacctaatccgaatgccaatgctacataaacccatcttttaatcatagttgtgatttttaaataaagtgattattgttttgcttgtttcactagatattgttcttcctttgccgtgaatccaataaagatgaacgccagggcacaggccaccaataacacgataaaattccagttccagcccaaattctgaacaacatatcccaaaccgatattagcaaagagggcggtcccgaagaaataaccgaaaaatccggtaaatccggcagccgtaccggccgcttttttaggggctaaatccaaagcatgaaccccgatcagcattaccgggccgtagatcagaaaaccgatggcgatcagacagatactgtccatcagcggagttttactaaattcccaatagacaaaaacaaaaatggcgacggcgaccatataaatcatggtcgtaatagcacgtctccccttgaagactttatcactcaaccaaccacagaaaatcgtcccggggatagcggcaaattcataagaaaagtaagcccaaccgatctctttgatatcgtagcctttcacctctttcagataagtaggtgcccaatcgagcactccatagcggacgagatagatgaaagcgttagcgatagcgatataccacaatattttattactcaatacatatttaaagaaaatttctttggctgtcagttccacttccgactgggcactatagttgggcggatagtcgttacggtattgttcgataggtggcagaccacaagactgaggggtatcgcggatcagcagataagcgatcaccacaatgcccaaagcgacaatagcaggaaaccagaaggtaccggcctgccaggaaccgaaccaggccatccccacggcagccatcggtccgatcaaagccccaccgacattatgggccacattccagatcgacattttcgtcccccgttcatgctgcgaaaaccagtgtgtcatcacccgtccgctaggaggccaacccataccctgaaaccaaccgattaaaaactgcaggataaacatcgacacgacagacgacaatccggcccgggtacccagaattaaagtcgtcaaagcagacaaagtcaatcccaagggtaaaaacttacgggcactactacggtcagagactccacccattaaaaatttagaaagtccgtaagcaatggcattcgctgatatagcaactcctaaaagtcccttatcgaaccccatttccaccaagtaaggcatcgccagcgcaaagttcttacgaactaaataataaccagcgtatccgataaaaataccgataaaaacctgtacccgtaaacgtttgtatgtcgggtcgatctgttctttcggcaataagggcctatgaggctccggtcttaaaaaactccacatatttgtttattttaatataaaaaattacccatctccgtctttatggataaattttacgttatttaaacttttaatgtttcgttttttacgtaataaagagaaggaggttaaagcgaagaagattcagatc

SEQ ID NO: 6080 - DNA, 18536 bp, Unknown
  gut microbiota DNA sequence
gacaaatgaacgaatgtttctgtcatacaccaccggtcgggtattcggagagcctatgcggcccctcgtttctgttccaagggtcttccggaacaaaacccgatatctactgtttgcactacttggcaaaaaaagaatcaattacagcacatctttgttattttagatgccaatatgtcaattatgaattttttaggagactcagattaaaacagctgctcctgcataaattaaagaacgaggtctctacagacctcgttcatctcatttgaaagtaattgttttcagatcattcaggatctatccctacaattatttaattttctcgtagatataaagttcatgaatttcaccggtatacccttcttcagcgaacggaccctgtgacataccgagaacgatcagtgtaccacggttgttcaatacaacgaggtcgtcgtttaccgggtcaatagagagtccttcgatttcacctgcacggcggaaatcactcatttcgcggaataattcaactcttccggcttttgcaccacctgcaattttacctttacgcataacaggttttccctttttatcgagttttacgctgaacggagtttctttcaccacttcagttccgtcttgtaaaccggtaaagtgtacttcagagatgtcagccacatagatattatcaggaatattgtacaaagattcgccatcatcagaggtgaacagcatttttccatcagcgatgaaaataccttgacaccagtacggagtaggacggcattgcattttggtatagtactgtccggtttccaggctatagcaatatacgtaacggctatctacccagtcagacatccaaaccatatttttctcccgatcaacagcaagacctgaaacctctacttgtcctgattcaggagaccaaggcaggtcgcgtttccatttcaaagtctctgcatcgtaaatcgatacggcgatattataaccacgtccgtattcgaatttttcaataccgcagtaaatttctccattgtagatatcgatatcaccgaagtggttggcaatttcgggattttggaacggctgatcgttcttcatcaccagatttccctgtttgtcgtatttgtacagtactttggtgtcggaaacatagtagtaattgctatcgatagcaattccctgacgtccggcaaccggaatcacttttttcaaccggtattctgaaccgagatgttgtgcatttactgacatgcctacaaaaagcagtgccattgcaaaaaataatttattcataataaaggaatttaggatattaataaaggtaaatcaaatcttagaatttagccaaaagcatgatttgcaaactatttccgtttcctgtccgcgtacctgcatctttcactttatcggtatagatagagtggatatagttaacctggaatttcaggttcttgatcaattcgtaagtacaacccaccaggtaagcatctctgttgttggcagaggtcttgttggttttatcgcggtacatatcgtaacgtactaccggcaggaattttccgaagcgataagcggccaaagcataaaaaccgtcttcttctacattagcttcgctacttttgatatggccgtattcagcacgcagatcgagaccgttcgggtcgaaataccaggcaccggcaatcacccgattcatcggaagatattttttaacatcgtctccgactttaccctggtattcaccgtagttgtacgatcccataatactcaactgttttacaggacggaaagtcagacgaccgacgaaatctttacatctgttgtcatcgttcaaagtaggcaaataaccgttggtcaaagataaattatagctcaaatagctgaatcctttttcctgattctgcaacagatcaccgtaagccatcacaccgagatcacgtccatagtcgatcagatcggcagaagaaatcgcattccggcataccatacgataacagatattagagaaatctacagtctccaaagtagccggagaaatatcgtagttctcgaaacccagcggcagataatattgtcctgcccggaagttgatggctttgttaatgtgagcactgacaaaagcgtccatcacagtaatgactttctttttgtaagccccgccatcggtagaaccggaaaaacattcgaactgagcccggaagtcaaacgtattggagatctttttgtcaagaagtacccgcatacgcttcaactggaaagaagatctgttatccccgttcttatctccataattataaccggtctgaatataaccggatactttcggtaacttagaaagaattttgttcaataattcttcttcattggctgacaccggttcgcttttagcagcagcttctccgtcttcagtttttgcccatgctgatgtacctacaaataaagcacagcacaacattaccacgtttaatagaaaattttttttcatagtaacatcaaataaattatacgtaaaatcaattatataattctattcctgaattattctttcggattagatacattttcgcggattccccattcttctgtatggaaacgcagaccgggttccctgacatcatgacatttcacgatcaaagccccttctttttcccaatagccttttaccgtataaccgttcatcggcccgtcttctttcccacgcactgttttatcgtccggattcaccacaatcttcaatccacaagactgattgagcatatccatatctccccggctattccctccgacaaccaaaggacgggttttaataaaggtcgggatcacatttgctttaccgtcatcctgcggaatcggtaagatgatatcatctgtcaatttaccgccgacaaccaccgattttacccccaggatatttacctccgggataccgagttcttcggccagaaatttctgatataaaaattccggagaagcggtcaaaatccaaacctcgaatccatattccttgagattggcaatcagttgtttcatttccggatagaacttgttccggtaagaagtctggtaacatgcatatcccatttcgagaatttcttcgggcgtcagtcctgccaaaaaatgcacccgatcctcgacataaggtttccccacattatttccatcttttaccatccggttcagaatcgccattttctctttcgaaaacttatccgtttttcctttaaaatgttcgtcggcatattgatataaagcttcatccgccaaataatgaggtacctgtcccataaccgtaccgtcaccatcgaaaaccgccactttccgaatcttcatcgtaatggtcgaattcaggaaatcttccagccgatcattgacttcttttgaccatcctttgatctgccgataggtttgtgcagagacacagggggtgatcagtagcatcatcaccaggatgatactactcgttaaattcttcttaatcatggatttaattagtttttgtttttaaccagatattgttcttctttataagtaaatgcaataaacaggaaggctaaagcacaagcacccaacaaaacgataaagttccaattccatcccaaatgctgcacgatataacctaaaccgatattagcgaacagggccgttccaaagaaatagccgaagaacccggtaaatccggcagccgtaccggcagcctttttaggagccagatccaaagcgtgtaccccgatcaacatcaccggtccgtaaatcaagaaaccgatagcaatcagacaaatactatccatcagcggagtagcactgaactgccagtaaacaaagatcgaaacagcgatcaaaaccatatagatcatggtcgttaaagcacggcgtcccttgaacaatttgtcactcaaccatccacatacgatcgtaccgggaatagcagcaaattcataagcaaaataagcccaaccgatttctgtaatatcatatcccttcacctctttcagataggtgggggcccaatccaatacaccgtaacggatcagataaataaaagcattggccagcgcgataaaccacaaagtcttattattcaaaacatatttgaaaaagatctctttagccgtcagttcaacctccgatttagcactgtaatttttagggtaatcattccgatactcttcgataggaggtaaaccacaagattgcggagtatcccggatcaacgaataagcgataaccacaataatcaaagccaccaccgccgggaaccagaatgtaccggcttgccaggaaccgaaccataccaaaccacctgcagccatcggaccgatcaaagcaccacctacattgtgagcacaattccagatagacattttcgttcctctttcgttttgtgaaaaccaatgcgtcataacacggccacacggaggccatcccatcccctgaaaccaaccgatcagaaattgcaaaataaacatagagacgatggaagaaactcccactttcgtacctaataaaagagtagctaaagccgacaatgtcaaccccaagggcaagaatttacgggcactactacggtctgaaaccccacccataataaacttagacaatccataggcaatagcattagctgaaatagcaaccccgagaagccctttatcgaatcccatatccaccagataaggcatagcaagagaaaaattcttccgaactaaatagtagcctgcatatccaataaagataccgatgaatacttgccaacgcagacgcttatacgtcggatcaatcttttcttttgacaacaagggccgatgaggctctggttttaaaaaactccacatagctattagtttaagattcaaattgtttctaagaaaaacctatcactttcgttattacaacgttttcggcgcacattattttgaaatgaaataaaacatcttcatttcgaaacaaaagtagataaaaactccatatatccaaaaaaaattatgaaaatttttggtaaatttatttaaaaatatccggtgcgaatatttcgcttcgaaaaacaccctttcgaactcaaagttcatcacgcacaagatgttttataacaaacaaatccccgatttttgaacacactccatggttttcaaacctaaccgaccgggaaacaagcctccggccggtcaactcccagaaaactatttctttcaatcctgtaacatttccgccaagaccgagattggatgtttacaacatttagaagtagacatttcgatctgccatttacaagtttcacaatcagttacgacataatccacaccggattcctcgatctgtttaaacaaggaattaccgatatcctgcgaagtcttgtaattttcctttttgaaaccgtaagtcccggcaattccgcaacattgcgaatcgagcaataccagttccacattcggaatcgacttcaataattcgatcgaataataagcccaccccagcttttccatatgacaaggagtatgataagccacccgtagtttcttatcttttctgaactccaattgtccggtttcctgactcagcaagcggtaaatatagcgggtagccagctctacctgctctctcacatcttcattcttcacgcccaacaaatgcggatattcatcccgaatcgtaaaagtacaggtagaagaggtggcaataacaggaatatttttatccacgaccgatttccgaatcgaaccgatattgatatcagcctgtttccgagcttgtttgataaaaccattcgaaatcagcgccaccccgcaacatttttctttttccaacaacctcaccccgatcccgagggcattcataaccttaacgagatctttccccaactgcgggtaattgtaattcacataacatccatggaaataactcacctgtttcggaaaagcaagttgttctttcacttgtttcttataccagctttcgaaagttccgaaagcatatttcgggaaagtacggcgatgatcgattttcaacactccatccaaaatcgcttttaccggtttcaatcccagcgttgcattcacaaccggcgccacaggagtggagagagtcccgaccaaatcggtattcgccagaataaaatcccgtactcccggtttctttttactgaatttaatccttgccgcctggatgatatctccgatcttcacattagaaggacaggccacttcacaccgcttgcaattgatacaatatttcaaggtctcgtcataaaaaccgaacttcttcagacgcaggcgttctccgtcaggacctgcctgtttaggaccgggataatccggattgacagccgctaccggacaataaaccgtacaaaccgtacatttgatgcactgttcgaaattattgtcactaatattatgttgttgaagattcataacctcttttatttacttaaaatttgttcagctacatacaaagcactcaaaacagaaaccccaccaccacatccttctttaatcggattaaatccctccagaacagctcccgccacatacaaattttccaatacctgcccgtgcaccatcccccggaaatcggttcccgtcttcacaccgaaaccttcatacggttgccggtcgaatgcattccggccataccactgattccgatcttccggataagtgacatccaaatcaaaaacaggttcatacacccgttcggaagtagcgatcaatccctgactgaaataactgccactagccaggacgatatgctttccgacaaaaggaatctctccgtgattataagaaaagagccggctaatccgattcccttcctgttctgcccgcaaaacggtatcccctagcatatatacacctccggcttgctggaaacatttgcgtaattgctgctgtgtacggatccccgggacagaaggaggcagagtaggcaagagacaaatttcttttccaaccctcttttgtaaataatccaaggtcgtatcctgattcaaaccgaataccgccggcaacacgatcgcctcgacctcaccggcttcccttttcaacaaagtggccagttcgtccagattttcctgtttctcaaacatccgggcaatattgacagacctcatctcagtaggatttttacgcaaatattccaaagcagggaaattaaacgaatgaatcctactttcagtacccattttccggaactcatccgcgataaactgagtatagaaatccaaaaatcccaggacattgaatattgctattttcttccagggtaaacgatcggcagcatcacaatccggatgatctttcaaggtaagccaggcaggcttcagcgtccccatcggagtcacccgataatgattcttcaaggcgcttccactcatatggattccgacttcctcaaaaaatcgctcagcctcaccggtcagtcttgaaaatacctccatccccatttttacatagggatgggcaggcgcctgttcctgcaactgtccgatagctttcaaaggatgagccacctctgtcccgtcgggcaacacattcagcaaatccaaagaaccggaagaaaaatgcagggcactttgtcctgaagatataatgacacaacgttgtccgtgtttcgacaaacaaataccggcaaccaatcctgccagtccacccccgattataatcgtatcgaatttcatattactcttcttgtttttgagacattttcaaaccgcacacactttcataaatccaggctgtatactcactttcccgcaaagtatccccccaggcgataggcgccatccccttccatctctcattcaagaaagaagccagatcttctttcgcccgtttagtacaatatttatgcatactgctcatcaatccggcagcccggcatgcacaaagttctccctgacaggtacccattccgacacgcgtccttcttctcaaatccaccagattgtgcacttctaattcattcaaagcatactttacctctccgacagaaacttcctcacactcacatactaaactattttccagcacatcattcccggaaaatctttccgccagatctccatgccggtaaatagaagaatttcgctgagccaagggtaccgagataatctttttctccacttcttcacgatcctccctcgaaccgggcaatttttcactggcggtcgtacacgggacgttcacattcaactttttacaaattaaatcggtagcccactcagccatcagccggtaggtcatcagcttcccgccggtaatcgtaataaatccctcaagtccatcccggacagcatgatccagcagcacaattccccgactcacattccggccactcggatcgtcgtctgccgcaaccaaaggccgtacacccgcataagcccgcaaaatacgggtttgtgccaggaccggagccaatttttccccttcgcgtaacaataaatccacctcaccgggagtcacatacatccggtcgacttcatcaaacgacaccttgctcgaagtggttccgatcaatgaaatcgtgtcacccggaaccagaatatcggcatccgcaggcttgcggcaccggttcaaaacaatattattcacccgatgcccgaaaatcagcagggcacctttagcaggcagcatattcaccgttattcccgccatcttagcgatgttgtgtccccagattcctccggcatttacgacaacgttagcataataatttttagtctctttcgtcctatgatccagggctttcactccgacgatacgatcctgttcacggattaattccgtcgcctcgtggtaagtgagaatttcagccccatgattacgggcatcgatgatattcgaagtagtcaaacggaaaggatcgacagccccatcgggaacccttaccgccccgataatagccggattggcagatggctccagcaacagcgcttctttcggatcgataatatcggcccggattccggcacgtcgacaagcatcgacaaattttgcctgatattgaatgtcatcctccggcaaactcaggaacagaccgtcggtctcttccacacaatgactggcaatccgccgaagaatcctgttttctttaatacattcctctgccgattcctgatcagtcactgcatagcgggcaccactatgcaacaaaccgtgatttcgtcccgtcgctcccgtcgatatatcgaatcgctcgatcaaaagcacacgaatccctctacgggcacagtctctggcaattccagcaccggttgcgccaccgccgattacaatcacatcaaatggcttggtcatatcattttgtttcatttgtgcagaaaattatattttcgcccacaaagaaacaaacaattcaaaacatttcaaaagaaaaacgaaagtattttcaatcaaaacgaaaacaaatgaaacaccatatcccaattactccccgaaacgaaaagccatctaccgaatggcctcacgttgaaatacccggaaaaacagcctattgtttcctgattattttattacttttgtataagttctaaaaacaagaccatgcagatattactcgcttgtgccaaaaacatgacgacaaggcccgggctttcaccgtcaatcctgacaaagccgaagtttctggaagaagccgaacgccatgcactccaattagcggccttcacggaagcggaattggggaaagccctgaaatgtaatccacgcctggctatcctgaacaaactacgttatctgtcttttttcgattccgaggacagcgggcctgccgtgttgtcatacaacggcatagtctatcgccacctccgcgcctgggaatttacagaagccgattatgcctacgccaacaaccatctgtggatttgctcctttttatatggcctgctccggcctatggaccggatcaaaaactaccgtttagagggtaacgtaaagctaccgaacaacgacaaccggaacatgttcgatttttggaaaccacgtttgaccgatgtgctgatcgattcagtaaagcaggacgatggctgcctggtgcatcttgccacagaggaaatgacccgtctgttcgactggaaacgggtcagacgggaagtgaaagtcctggaaccccaatttttcattcgtgaagaagacaaattgaaaaccattgtcgtatatgccaaaatgtgtcgtggtgccatgacccgctatatccttcaaaatcgcctgacgactaaagaagaactaactgctttttcctacgaagaattcaattaccggcccgaaatcgtccacgcgaaagcagaggcattgccgtttgtattggaataaatcacttgtatcttcgacataaaaaataaagctccttagacgatcgacaccttaatccccaactcctctaattcccggaccactttgggagatacgccggaatcggtgataatctggtcgacagcatccagttcgcagatctttccaaacccccgccggccgaatttagaagagtcggtcaggacaataatcttttgcgccgcatcgatcatcgcacgatttacactggcttccataaaattcgtggtagtcagtccatattttaaatcgattccatctacccccagaaaaagcttcgtcccggaaaaattctccaacatccgcaaagcatattctccggtaaccgacgaagaggtatgccggacaataccgcccaactgaatcacttccacctgctgacaattcaggagagccatggcaacgttcatcgcagaagtcagtacggtcagctgagcctccggaggtatacagcgggcaaaagccaataccgtagtaccggaagcaataatgatagcgtcattgggagtcagcatttcggcagccttcataccaatccttttcttttcttccggaaactgtttttctttttcctgcacatgccggttggctatatagggatcgatctgaatagctcctccgtgtgaacgatatagtaatttcttttcttccagtaatcccaagtctttccggatcgtcaccgaagaaacattcaattgccggctaagactatttactgaaacgattccgtttacttttaataattctaaaatcttttgatgtctttcagacaatgacatgatcttttccattccagtttttaaattcgtataaaagggctgaacattcagacacttcaccttatattacaccaaatgagctaacaaaggtaaaaataattactcagaataggatttggaagtcaaggaaaaattattttataacacccggcagccagacaggcccccaggataggacccaaaaccggaacccagctatatccccatccactactccctttaccccggatcggtaaaacaaaatgagcgaaacggggaggcaaatcccgggccggattgatagcataaccggtagctcctcctaaagacataccgatagcgacaatcaggaaagtcaccggaaacaatcccacagatcccaatccgacctcaggcgtattcccatcgatagccagacacaaaatgacaaaaaccaacacaaaagtaccgatgacctcacagatcagattacgggggatattcctgattgcaggcatcgtacagaaagtacctaatttcacatcgggatcttctgttgcatcgtaatgatctttatagaaaacatagaccagaacagctcccaaaaatccaccggccaattgcgctataatataggcaggtacataagcccagggaaaagtatgagccaacgccaaaccgatagacaaagccggattcaggtgagctcccgagtagggagcggccacaaatgccccgcacatgacggcaaatccccaggcaaaagtaatcaccacccagcctccgccgaaacctttggaatatttcagtaatgaactggccaccactccgtctcccagcaggatcagcaaagcagtaccgataaattcgaacagacattttgtgaataaagaaatcgtcatagcaagccaatatacaattatcgttcaagcacccgatcgacagcatctctccatccctctttcagttcttccattttctgttgttctccggaaggaataaattccttttctttatgccaatgttgacggatttcatgaatatcgctccaataacctaccgccaaaccggccagataagcagcccccagagctgtagtctcgatgatcttgggtcgtatgaccgtggtattcaaaatatcggcctgaaactgcatcaacacattattcgcagcagctcctccatccacccgcaattctttcaattcgataccggcatcccggatcatggcattgaccacatccatggtttgaaaagcgattccctccaaggcagccctggcaatatgggcggctgtcgttccacggctaatacccgaaatagctccccggacatcctgattccaatagggagcggccaagcctgtcaatgccggtacaaaataaaccccaccggcatccggcacactatgtgccaaagtctccacctcgcccgaagagcggataatccctaaaccatccctcaaccactgaacgatcgccccgccgacaaaaatgcttccttcgagggcataagtcacttcttctccgattttccaggcaatggtcgccagcagattattcttcgagacaaccggtttatcaccactattcatcaagaggaaacaccccgttccataagtattctttaccattccgggttcggtacacatctgaccgaacaaggcagcctgctgatccccggcaatgcctgcaatcggtattttatgggcaaagagggtcgttttcgtgtgtccatatatttcgctggaagtcttgacttcaggtaacatcgcggcaggaataccgaacagttccaataattccggatcccaggccagccgatggatattataaagcatcgtacgggaagcattggtgacgtccgtaacatgtacttccccacgggtcaatttccagaccagccaggaatccaccgttccaaaaataagctttccggcttcggctttttcccttgccccctcgacatgatccagaatccatttgactttagtggcactgaaataagcgtctatgatcaatccggtcttctcccggataaattcggttttcccctcagccttcaaagcatcacagtatgaagccgtacggcggtcttgccagacgatagcattataaaccggttgtccggtctcccgatcccatacaatcgtcgtctcccgctgatttgtaatcccgatggcagcgatgtccaatccgttaataccggccgaagcaatagccccggcaatcacagaagcctgggaggtccagatttcctgcggatgatgttccacccatcccggctgaggaaatatctgccggaattcttgctgagccacagctttgatttcaccatcgtggtcgaaaacaattgcccgggaactactggttccctgatcgagcgataaaatatactgttctgacattcctgaataattataatatactttttcagttacaagggttacagcggttaacttaactcctgaaccccttgccgcctttaaaaccgctgtaactttcaaatatacgttttactctaaaatatagtgtccggccaaatcggtaaactcttttacctgcccatcgatccaggcctgatcgtatcccaattctttggcaacgatccgggccactttaggggcaacttcggcagccacccgggcatccaggaacaataacctgacacgcctggccagtatatcctcaacattcaatgccatctcttcccgaaccgcccataccacctcggccacagtgtaatcatatttgggatgcagtttttcggccatagccggatcggactgcatcaaggttttgatcgcctgaatatccgagccataaatatacaaatgattattgagatccggatttaattgataaccatgaatccggaatttttttgtcacacatgctttcttttccagcagattcaattcgatcgccttatccaccgtatcttcagccattctccgataggtggtccatttccctccggtgatggtaatcagcttattttcagaaacaaaaatcttatgactccgggaaatttctttcgtacttttaccttcctttttgggagccgctaatggacgtaatccggcaaataccgaaaggacatcgctccgttgaggtttacgagtcaggtaacgtccggccgtattcaggataaattcgatttccgactccagagcttgtggctccaattccggatgttcccgtaaagtatcggtcgttccgacaaccactttgtcatgccagggcacggcaaacaatacccggccatcgtcggtcttggggatcatgatagcgtaatcactttgcagaaacgacttatccaggaccaaatgtaccccttggctcggtttcaccatatgctcgtgagtcggcacatccatttccataatgctatccacaaagatgccggtcgcattaatcaccgctttggctttcacttcatattcctgcccgttcatcaaatcctgaaccttcacccctcttgcccggccatcggatccgtgcaacatcgccgttactttcatacggttgatcggacatccgccattttcgacacaggactgagccagattgactgccaggcgggaatcgtcgaattgaccgtcatgatagactacccctcccttcaaaccatccacccggaccgtcggtaaataagacgtagtcttctttttggatacatatttagaacgccccagactaagacggccggcgaggatatcgtatatcgtcagtccgactgtataaagaaagttatcccaataacgataattcggaatcagaaaagattgattttttaccagatgcggagcattctgttggagtaatcctctttcgtacaaagcctccaataccaatgaaacatctccctgagccaaataccggactcctccatgtaccaacttggtactacgactggaagttgcttttgcaaaatcttcccattcgaataaagcgacactataccctcttgtaactgcatctacggcaactcccaaaccggttgcacctcctccgataacgacaacatcccagactttggacggatcagagattttggataataaatcttctcgtttcatagttatttttatctgatttataaccttgtacgaaaaataaattaaaaagtatctctttctgtcagaaaaatacagggtcttcctggttttcaaaataaaacgatccgtgtactttatcaaaatattcactattttagaggctccaaaacatctgggataaacacgttgtagttttacccggaaagaacacagcattaaaagtatgtaagtatgaatatcgtatttgtcgaatcgttaggaatgtgcgaatgcacgataaacaaaagtctggctactctgaaaaaccagggacatacagtcactttttatcacgaccggaatgagaatgaagaggtattgatcgaaagagcccgaaatgccgaagttgtcgtagtcagcaatattccgttgcggaaacatttctttgaaaattgtccgaagctccggatgctctctgtagcctttaccggagtggaccatatcgatctggaagcatgtaaaaaacggggtatcacggtttgtaatgccgccggttactctacagaagcagtagccgaattaacgatcggaatgatgatcgccgtgtaccgaaaaatggtaggcggagatgccattctccgtatcggcggagaccggcagggagtcctgggaagcgaacttcacggaaaaacagtaggtatcgtcgggctcggagccatcggccaacgggtagctctgttagccaacgctttcggatgcaaggttttaggctataaccgcagccccaaggcccttcctcatatcacccaggtggacaaagatacccttctgcgtcaatcggatatcattacggtacatcttcccttgaacccggaaaccaaagcatttatcgggacaaacgaatttgcactcatgcaaccacatgctgtcctgatcaacaccgcccggggacccatcgtcagccaggaagcgctttacaatgccctgaaaaaaggacaaatagccggagcagccgtcgatgtctacgatcaggaacctccgcttcctctgaacctggaattatttaatgcacctaatctactgatgttgccgcatatgggctacgccacccgggaagcttttgaaacccggcagaatatcgtaatcaggaatatcgaaatgtggctgaacaataccccacaaaatcaggttctttaaatcgataagtgtatgttaaaattattcatcgtctttttttgtcttttgccatttaccggatggagcaaagattatcgggtcagattagaggtgaaaaatctaccggccgattctcaacccattctattacggttttataacggagcattatttgccttagataccttacctgtacgctcacaagataccttgtctttcaagataccggaggctacttctcccgggacactgagaactattctgggttttcctccttatgctcaattttcagggaaaggtcccatctttttggattttctctttaaccgggaagatatcgaaatatccctcgattatcaaaatcctcaggcaacagcccaggtgatacactctacagaaaatcaaatttatttcgacttcttaaaatcggagactatttacaatcataaattaggtttggttggacaagtagtgataaactatccggacaaagataagttctaccaaaaagcactcgaatattataaaaaattccagctcgaacgagataaattaatcgataagaactaccgggagcacccgaatacgctggcaggaaaactgataaaaaatcaaaagttacccattattccgggaaacctttcacagcaggagcgggattcactttttaagtatcggtatttatcgttaatcgatttctcggatacacttttactatatactcctttttatacagacaaaatcttccaatacattcaattacataaaaagccctatgccagtccccgggaaaacgagacgaactatatccaggccctggattatctgatccctttgctcaatgtgaatccgatcgtacaacaaaatctgcttcaatttttaatctccggtttcgaaagccaacaaatggaagaagtattggcacatatttcaaaccattatatacaacaatgtggcagcaacagcgatattgtcaaaaggcggctggaaggttacagcaaaatggctataggccaacaagttcccgacttcacactaatggacatccataaccatccagtcaatctctatagtgaaatctctccctacaccttgcttcttttctggcatacacaatgcagccattgccaatcattaatggaagctttacctcaactgtgtcaaaaagagattttcacccatcaacaaataaagctcatcggcatatccatcgatgaaaacagggaagactgggaaaaattttctattcaatatccgctggaatgggtaaatatccatgcagcaggcagttttgacagtgaaatagcaaccgactataatcttttcgctactccttcgatgtttttgatcgacgaaaatcacaagattatcgccaaaccgactacgatcggggaattggagaaaaacataagggaactgatagaaaaataatattgctgtccgctaaagcagttattttagcggacagcaataacactaaggaacaaacttatagacgatgtcatcaaaacaaacatatccggcattgtcttttgcgaatgctgttacatgagaacgggatctgggcatggaaggtgtttcttcccactcatctttcagatagttgtaccgacaacaataccaatagggtggggctacgcttaatcctaagtcaccacctacaatataagcatattcctgcccgtccacagtcaacacgaatgaagatgcatacgaacgtgtaattcccggatacttgtcaggcaaaagcgaattcaacggtataaaacggaactctttcgggtcgaatcgataaacatcccgacaatcttcgtagctgctgtgtccgaaacaaagataaacggttccgttgagttgaaatgtagtggctcctgctttcggcaataccatattggctttccctccccaaccgtattgaggatcgaattgataaaattcaccggaatatagtccattagctttcaaaccggttccgacatatcccatgccgtttaaagagaaagccacagcatccaccacagcatctcccggaaattcaaatgtcagggaatcccaactattgcttgtggcatcatacacccaaaaatctttatagtattccttttcatcagtgatagacttgcccagaccgatatatgccttgtcttttattgtaaatgcaactgccccgatccggggtttacccggaaaatctttcatcgcctccccatagcttgttttcgtataccgccttaactcgttgggcgagctataggaagatgaaaagggaattcctaa

SEQ ID NO: 6081 - DNA, 1433 bp, Unknown
  gut microbiota DNA sequence
agaccacctcggcaaaactgttattatcctggcacgtcctgaacatttgcaggatgtggaaactttaaaattgttgttgagccagggatttacccgtataaaatcaggaaaagcatatcaccggatcgacgatatcctcgctgaaaataaagttctttcgagcccatccgatctatatctcgtcatcgaccggatcaacatcacccaggaaaaagataccgcttcccgggtttccgaatcggtagaaacggccctgtatgaaggaaaaggagaatgttttatagagatcgacggggaaattcgctccttttccaatcgtttcgaagcagacggtatgagctttgtcgtgcctacagtcaatacctttagtttcaactctcccttgggagcctgtccgaaatgtgaaggatatgggaaaattctgggtatagacgaagacttggtcgttccgaataaatcgctcagtatctacgaagaagctgtgctgtgttggagaggggaaaaaatgagcgaatggaaaaacgaattggtgaaacatgcacacaaagttaatttcccgattcatactccctattatgaattgacagaagcggaaaagaatatcctatggaacggatgtccgtactttggaggaatttacgatttcttcaattatttggaatccaaaaaatacaaaattcaaaaccgggtgatgattgccaggtatacaggaaagaccaagtgcccagaatgccatggtactcgcttaaaacccgaagcttcatacgtgaagatcggcggtaaatcggtgcccgaactggttgaaatgccggtatccgatctgaaagtattcttcgataccctttctttgactccggctcaaaacaaagtggcagaaaggatccttcccgatattaagaaccgacttgaatttttacttgaagtaggtttgggttatctcactctgaaccggctttcttcttcactttcaggtggagaatcccagcggatcaatttagctacttccctgggttcggctttggtcggctcgctctatatcctggatgaacctagtatcggattacattcccgggataccggacaattgatcaaagtattgaaaaaactaagggatttgggaaataccgtcatcgtcgtcgagcatgacgaagacatcattaaagcagccgatcaggtgatcgacatcggccctcaggctggacgcctggggggtgaagttgtatttcagggcgatatgaaagcactgaaaactgccggtacgttaaccgccgattatattttcgggaagcgtaaaatcgaagttcctgcccggagacgtccctggaaacaaaaaataacaatcagcggagcaaccgagaataacctgaaaaatatcactgtcgatattcctttgaaaatcatgactgcgattaccggagtcagcggttcaggta

SEQ ID NO: 6082 - DNA, 2428 bp, Unknown
  gut microbiota DNA sequence
attatgttccggaaataagatctctttcttaaatacagccgtttttccaggcattcccaagtccgctccggatgtaactgtccatacagatttttcttgtcatccaaatttcttcgggataacgaaagatacaacacgcgatttgcctctattgttaaccaacggtccaactcctcttgctcggcttccgtcaattgccctttcaggctttttattatcagttgtgagatgtaaaatgggtatttcgaatatttcattttctttccgctttttatgtaatacaactaagcggatatggtgggtgaaaaaatgaaaaaaaattgtttagaaaacttcatttctgaagcaaaaagagcaggcaggtgatttcgtaaatgtagtctttgagcgttctgtaggctatttttttctgagtttttacggtattgacagaaatattcagttctttggcaatctcatcattgtttttgccttgtatggcaagaatgaaaattcgtttacatttgggcggaagattttcctgggttttaagcaatatccgctccacttcttcctctataatgaaatattcgaataaagttttgtcttctaaatcgtgcaaactctgctcgtaacgtaacctgattttttgatgttttatataattcaagacagtattgcgggtcacggaataaaggaaagatttaatgtgtataactgattccatttcttcccgatgattccaaagtgcacaaaaggcttcctgcacaatatcttctgaagcatccagattatttaaaaaccggttggtaaaaaggcacaacgaatgatacagaccatcgaaaacggtcttgaaaatcaagctatctccttgcctgaaacgttccatatccaatgtcacaccttccaccgaacaacttttgtataaaaacagtgtaaatatatattttcctccggatacccaccaactattccacaactaaactgaaaaataatcccttcatagccgaaaaacaaacgaaaaacttcgtattttcgccctttgaaatctatattatatgaacgataaactcaaagaggaaatccggaaaacgctgggaatcctgaaaaacggaggtgtaattctttatccgaccgatacgatctggggattgggttgtgacgccactaatccggaagctgtcaaacggatttatgacatcaaaaaacgggccgacaacaaatcgatgcttgtattgttggacgatgcagggaaaatagcttcctatgccgacgtcccggatatagccctcgatttgatcgaagtggccgacaaaccgacaactatcatctatccgggtgctaaacgtctggcacccaatctgatcgcagaagacggtacgatcggtatccggattacgcgggaagaatttacccgatctttaattttccgttataataaacccatcgtttcgacttcggccaatatcagcggcgaaccctcccctcattttttcggggaaatcagtgaggagatcaaaaatgcagtagactatatcgtagattatcgccgcaacgatcataaaccggcagctccctcgagtattatcaaactgggaatgggcggggagattcaaattatccggaaataatctttagctcttgactttaaacattcgactttaattatggctttgattttaaatatagatacctctacttctgtctgctcggtagccttagcccgggacggaaaaatgattgccttgaaagaaaataacgagggattgaaccactcggttttattaggcacttacatcgacgaaatcctaaaagacaatcacatggatgcccattgtctggatgccgttgcgatcagtatgggcccgggatcgtataccggattacgcatcggagtatctatggcgaaaggagtatgtttcggagcaggtaaacctctgatcgccgtaccgaccttacaagcactggccttatcggtatcggaacggatacgggaagaagcgctgtattgcccgatgatcgacgcccgccggatggaagtctataccgcttttttcgaccgtaacaaccaacaggtcatcgataccaaagcagaaatcgtcgacgaaaattcgtttgccgatttattggccggacataaaatttattttttcggaaatggcagcgacaaagtcaggatgctccttaccgctcctaatgctcattttatggggcaagtagaaacctctgcccggcacatgatcccccttgcagaggagctgttcggccggcaagaatttgtcgatgtcgcctacttcgaaccgttttatctcaaagattttattgccacgactccgaagaaaaaagtgatttgatccaattttcgccggcatatcgggttttgaatttttcgattatattttttataaaaatataggaaatcatctgttaaaagttaactttgcaaatt

SEQ ID NO: 6083 - DNA, 15483 bp, Unknown
  gut microbiota DNA sequence
cagagaagttaagcccctgagtgccgatggtactgctttatggtgggagagtaggttggcgccgaattgtgaaagcgagttacgaaagtgactcgcttttttttatctgattatactgactaaaccaatatttccttacattcgttgtatttttaatgaagttatggaaaaaattggatgacatgcgcagatattggcatatactccgaaaatataagataagtctggctctttgccctatccttgtattgattactgtatggtgtgaaacgatacagcccatgtatatggccgaaatagtcgatcaaggagtgatgaagcgcgatttgtcactgattgcagagaaaggagtgtatatgattcttatctccttatcgggattgggctttagtgtggtgaatgtctatatcgcttcgcgtacttctatcggtttcggtacggatttacgaggggctctgttcgaaaaaatccagcgtttgtctttttttgatctcgatcatttcagtacctcctcattgattacccgcctgacgaatgatatagcacggatacagcaggtagtgctgatgtcgatgcggatgatgttgcgttcaccgtttatgttggtgatggccatattttttgttgtacagatcaataagcagttagctcttaccttgatggcttcgattccggcgttgagtatcgctgtttttgtgattctgagaaagggatttccttattttttaaaagtgcagcagaaaattgatcagctgaatggtgtggttcgggaaaacctgattaatattcgggtggtaaaatcgtttgtaagagaagacttcgaagcacgaaaatttgtacgtagcagtgaggaactgagggatatggtgatccgggcttcgaatattattgttgcgatttttccggtgatgcagttggtgatgaatttgtcggtaatcgctattttgtgggtaggcggatataaggtgatggaaggggaattgcagatcggagagttgatttcatttgtgaattacctggcacaggtgttgatgtcgctgatgttgttgtcgatgtttatcatggcatctgcccgtgcttcggcttcttcacgccggattatggaggtcttgaatactacaccttctttggcgaatacgcccgaaggcttggcggaccggtataaaataaaacggggggaagtggagtttgtgaatgttagcttccggtatggtaatggagaaaacgatgtcttacggaatgtaaactttcatatccggccggcggagacagttgctgttgtcggggctaccggggcggctaagagttcgatggtgcagctgattccccgactttatgatgttacggggggagaacttcgcatcgatggtgtacctgtgaaggattatcatctgaaagagttacatgcccgtatcggtatggtattacaaaagaatgaattgtttacaggaaccatattggaaaatctgagatggggaaaaccggatgctactctggaagaagccgaagaggcctgccgggtggctcaggtacatgattttattctgacactcgccgaagggtaccagacgatattaggacgcggaggaatcaatctttcgggaggacagaaacaacgtctttgcattgcccgggctctgctgaggaaacctaagattttgattttggacgatagtacgagtgctgtggattcggaaacagaactccggatcaggaataatctcaattgtttgctgaaagatactactgtactgattataacacaacggatcaatacaatgcagtctgccgatcgggtaatcgtattggaagacggtgaagttgaggctatcggtacaccggatgaattgatggcgacctcccggatatatcaggagatttataactcacagcaaattttaaattagttatggcacacggagatcacctgaaatatcaagctaagcctaaagcgggaagacaaactctgttccggctgacttcttatctggtatgcgatcggctgttattgtctgtcatcggcgttttgatcgtgctgagtattgccgctaatctgggaggttcttatctgctccgtccgattatcaatcgctatattattcccggagatttcctggggttgggtaagatgttggggatacttatcggggtatatctgaccggagtgtttgctgtttatgtggaataccgcttgctgaataagatcgggcagcggactgtggcccggatgcgcgaagatttgtttcggaagatggaacagctgccggtggggtatttcgatacccaccagcatggtgatttgatgagtcgctataccaacgatatggaccggattagtgatgctttgacggatagcttgtcggatatgttgtcgagtgctttgaccgtagtgggtattttttgtctgatgttggtcatcagcccgatcttgaccttggtcactttggttactgtcccactgatgttttggagtgcccggggaattgttcgtaaaagtcggcaatattttaaggcacaacaggcatctttgggttcgataaacggatatatcgaggagatgattagcgggcagaaggtagtaaaagtgttcgggcacgaacagaaggcgatctcagatttcgaggaactgaaccaggatctgaagggaaaatcactgaaagcgcagttctattcgggcttgatgatgcctgtgatgcaaaatttgagtaccttgaactatgtgctgatcactattgtgggggctttgttagctatattccggggttttgatgtgggaggtttggcagcatttttgcaatattccagacagttcggacgtcctatcaacgagctggcgagtctttataatagcatccaggcagctttggctggagctgaacgaatattcgaggtgatcgacgaacaaccggaagctcccgatttaccggaggccgtgaatctggagaaggtgaagggagaggtggttatgaaggaagtttggttcggctaccgaccggaaaaaatgattctgaaaggcatttcttttcaggcggcagccgggcgtaagattgctttggttggagctaccggagccggtaaaacgacgatactcagtatgttaccccgatttttcgatatccggtcaggagaaatccgtatagaccggcaggagattcgttgcatacaccggaatagtcttcggcgctcgatggctattgtcttacaggatacccatctgtttacaggtacggtacgggaaaatatccgcttcggccgtttggaagccaccgacgaagaggtcattgaggcggctaaactgactgcggctcattcatttattaagcggttgcctcatggttacgatactttactggagaatgatggtgctaatttgagccagggacaacgacagttgctgaacattgcccgggcggcagtggccgatcctgccattttactattggatgaagcaaccagtaatatcgataccagaagtgagatcctgatacaaaaaggattagaccaattgatgcaggggcgtaccagtctgatcatcgcccatcgtctttctactatccgtaatgccgatatgattttggtgcttgaacgcgggcagatcgtcgagcggggtacccatgaagagttgcttcggatgaagggaaaatatttttctttaaatcaagaacaattccgttgattatcaatttttatgtatgaaattccttggttcctgtccggggagcggaaaacttttgagggtatagcatccccagaattaggcattctttggaaatatttcagtaatattaggtatttttacatcttttataggaatgtgtttttgcttcaaaattttgaagctatgtttttatggaatgagaaagcaattcagattgtcgcagggccttgtagtgttgagtctgaagagcaattgttcgcaacagcgcgtggcctgaagaagatagggatacagacactgcggggagggatttggaaaccccgttcaagggctcatcatttcgaaggggtgggagaatcaggcttgcggtggttacaacgggtactgcaggaattaagtatgcaggtggctatcccgggattacctcttttttgcggatcaatgcatccggacctgttttttgtccgtgatgtcgatgtgaattatgccggagtggtaaaaggaagaaaagaagaatttgtacgtttgggattgaccgagaaaacacactatctggctagtaccggtattcagggacagattgccgattcccgtagtttggtgttattggatgcttatgctgtggatggcttgcaggcagagcagattcgttttttgcatgccccggagtatctgaatcctacttatgaatatggggtgactttcgaacggggaacggcagtggaatacggtgatcgtaagcatatctttatttctggtacagcgagtatcgacaatcggggggaagttgtttatccagggaatattgcggggcagacgcgcaggatgttacttaatatcgaagctttgttgaaagaggctggaagtagtttagccgatctggccaaaatgatcgtttatctgcgggatatcgccgattatccgattgtccgggatttgatggaacaacaatttcccgatgttcctaaagtgattgttctggctcccgtatatcgccccggatggttgatcgaaacagaatgtattgcgattaaagcaggaggaaatccggaattcaggaatctataaacgaattgtgcatttcatggttggaaaaaccggagcgagaaatgaaaggcggccagaacccagagtaaagtgttgtgttatatgaatgtcggaatttccgaaagaattggtgtattttttgaaaagggcagcaagttgaaaaaggaaaggaactctgggttcagcttatgccattcgttttatgatataacgattagtgtgccataattgaggtttgtggtttaagttgttggttatcagtggatgaccgttttcttgaaaaaatagagatgtgtagaatttttctacaatgtaaaaggatattttctacaattgtagaatttttccacaattgtactgaattgggaggcctgattttcagaaaagacaggaggaagggaatgtttgaaaattttccgggaaatatagattagatatgccggaatatctttaattttacacgcctttaattttgaaaacgttttcaattaattttaatgatataacaatggctaaagaacaatttttaggaagacatgtcggcccacgtccggaagatgtagaggagatgttgaaggtgatcggagtgaagtctgtcgacgaattgatagaacaaacagtaccggcatccatccgtttacaggaactgttggatttgcctgctcctttgactgaagatgagtttttagctcggatacgggctgtcgctgctaagaataaactatatcgttcgtttataggacaaggatattacgataccatttctccggctgttattatccggaatatattggaaaatccggcttggtatacttcttatactccttatcaggccgaagtatcccagggacgtctggaagctttgctgaactatcagaccatgattatcgaactgacagctatggagatcaccaactgttctctgctggatgaagcgactgctgcggcagaagcaatgactatgatgtatgctctgcggggaaaggaaatgaagaaagccggagcaaacaagttgtttgtagataataaagtattccctcagattaaagatgtattagtcacacgttctgctcctcagggaatcgaactggtttacggagattacgatacttttgaatttactccggaaatattcggagctttagtacaatatcctgctgctaacggtgcgatccgggattacagagcttttgccgatcgggtacatgccaatggttctcttttgactgttgccgccgatttgatgagtttggtattattgactcctcccggagagtggggggccgatgtggttgtcggtacttcgcagcggttcggtatcccgatgggatacggtgggcctcatgctgcctacatggctactaaggaagaatacaaacggaatattccgggacgtattatcggtgtaacgatcgatgctcaaggaaataaagcattgcgtctggctttgcaaacccgtgaacaacatatcaaacgtgaaaaagcatcttcaaatatctgtacagccaaggcattgaatgctacgatggctggtttctacggtgcatggcacggtcgggaaggtttacagcggatagcacggcatatccattcggctgctgttattctggcggaagaaattagtaaatacggctatcagctgaaggaaggaaaattcttcgatacgatccgtttcgtgctgccgcagggagtgactcaggaaatgattcgggaagtagctttggaacatcagatcaatctgttctattgtgcttgcggaacgactgtcggattatcgaccgacgagaagatcagtgaagctgaaatcaatgagatcatcggtatttttgccgaagctgctgggaagaaagctgagaaagtgactttcctggacgattgcaccgtactcgatcctgacatgttgcgggaggatgagtttatggctcagccggtattcaatatctatcattccgagacggccatgatgcgttatatgaagaatctggaacgccgggatatctctttggcgacctctatgatttctttgggctcttgtacgatgaaattgaatgccgctgtagagatgatgccgatcacctggcctgaattcggaggtatgcatccttttgttccgtttgatcaggcggaagggtatcagcaaatgatccgtgagacggaacaaatgctggaaaaagtgaccggatttgcaggttgcagcctgatgccgaattccggtgctgccggtgaatataccgctctgatggtattacgtcaatatcatatttcccgtggagaaggtcaccggaaggtgatgttgatccccgcctccgctcatggtacgaatccggcttccagtgctatggccggtttgcagattatcgtaacggctaccgatccagaaggaaatatcgatgtcgaagattttcgggctaaagcggaagcgaataaagacaatctgttcggggctatgattacttatccttctacccatggtatttttgaagaatcaatccgggaactggtgaagattattcatgataacggtggacaggtctttatggacggagcgaatatgaacggtcaatgtggtttgacaagtcccggatttatcggcgccgacgcttgccatttaaatttgcataagacgtttgctatgcctcacggtggtggtggcccgggtgtcggtccgatctgtgtggctaaacacctggtagatttcttaccttcacatgctgtggtgaagactggcggagaacaaggaatacatgctgtgtcagccgctccttatggctcggtgagcatgctgcctgtgacctatggctatctgttgatgctcggagcagaaggtttgaagcacgtaactgaaatggctatcctgaatgcgaactatctggcttcttcatttgaaaagctcggctttaaaattttgttcaaaggcaaacagggacgcgtagggcatgaaatgatctgggattgcagcgctttcaataaagaatatggtatttccgagctcgatattgctaaacggttgatggacttcggtttccatgcaccgaccctgtcgttcccggtacatggtactttgatggtggaaccgactgaaagtgaaccgaaagaagaactggatcgttttatcgaagcactgaagacaatccgcgaggaaatgtgtgaggtagccgaaggaaaagcagataaaaccgataatgtactgaagaatgctccgcatacgcataaggttctgacagctgacgagtggactcacacttatccgcgtagtaaagcggcttatccgctgccttgggtggctgagaataagttctggcctcaagtaggacgcgtagacgatgggtatggcgaccgcaacctgatgtgtacctgcgatccgctttacgattatgtgaacgacgaaaattaaagatcggtcgatcatattttaatcccgggacggttgaagccgaatcccgggatttttttgcgaaacaacctatctgaataacgaaaagttcacgctgccgtattgccggtgttctgaaaaacgggggtgactggaaaagtcggtgttggccggatgttctataatagcaatcccattttcggctaacaattcattatcgaagattgcggcagggatatcgtcgattttatccaacttatagggagggtcggcgaaaatcaggtcgaatttccgtccttttaattttttgcaagcgataaagacatcggttttatagatttttatgtgcttaaaacccaattcctttgcagtccgcctgatgaacatataatgtttgtaattctgttcgatggagacaatctcccgggcaccacgggaagcaaattcataactgatactgccggtacctgagaatagatcaagggcggaaatatcttccaggtccatataattggtcagtacattaaacaaattttctttggcaaaatcggtcgtcggacgggcactgaaactcttgtcgggaaaaatctgccgtcctcggtgagaaccactgattattcgcatttgtggatatttagcaagtggataaaactggaattattcaattcattattccgtacgagctgggacaatggggcgcaattcaggatagatacattcgggatgtatttattcatgagcgtcagtaaattcggatcgttgaccagattgcccgataaggaggtatgcacgttctctttatcgatatgacattgttgcagacaattcagggtgtaataaatcaggtcagtcaccgaaccgtaatcaaaagaattgaacaacagtacctcgttgttctgagtcaataataaatcgaaataccgatcgtgtatgtcgataaatagatgattggtattgaattgaatgctttcgatagcttgaatgataaaagcataagcattattgacgatacacagcgaagcataacgggagctcagaaaattgacgaaactacgtgggagtacttcgaccaggtaactttcgatcgctttgattttccggtataataagatatcgtttttctgaggttgcaggcagatccggtacatatctcccaaggtattcttattgaacacatgggcgggcaacaggattttttctttttggcaaggtagaatatatacttttttatattttaaattcaatagttcatcttccaccatgattttttttaccttggcaatgacggcatcctggctatccaactggtaaggctggaaaaaaaacaccaaaagctggtgattatgattgtggacacaaaatgaaagtccatccgtcgagtaacggatggacaaaatatattgtgaagaattttcttttatgaaattactgtcaatataatatacgttctgcatgcaactacattattcccagttacctacgttattattcgcttctttcaggtcaccgactttcagccccggatatttcttcaacctttttctttcaccgttttcctgaaggatttcgtctttgtattgatcttcgatgtcttcaaagatataggtattggaaatccaagcctggaaaagagggacttctactcctgaatcggtaaacatagaagaggcacccatattgaattgatatttccgtttcgtgaaaggcacataacggagatcgtcgatcgggtaatctttattgaaaatggtttctaaaacgccttgttttacagtgtcacgaacaatccgcccttctttgatagcctgagcttcggtaattcctttttccaggtcttcgtcgctcaacgaaccgattgaacgaacaacttttaccgagtcgtatttgatgaaattgatcagagtgtcaaaactaccggtatatttcccatatactcctttataagcttcctgagctgtacggatatctttcagacgatcggcaattctcgcatatctctgttcttttatcactttaaattgttgaggaatcttaatactttcgtagcatttatagccaagaaaaataataattccggcaaggataatctgaataataagctttttcatatttaacgttatttttgtatgatattaatgcataaattttcatcagacctgtgaggttgatcctaatttcgtatctttatccccgcaattcaaacgttgtcaacgcagcacaaaatcttaatattgctcgcaaatttaggaaaaaatttagattaaaggcataatcttctattaaatttcatgatgatccaaaaacattttgaagatattatccggaagaaattcggttatgatttttctccgacccaacagatcgctgttgagcattttatccgttttttctttgcccgggaagaagaagggatttttctgttgaaaggatatgccggtacgggaaagacttcattggtcgctgctattgtgaatgctttggtaagccttgagtataaagtcgttttgctggccccgaccggtcgggcggcgaaggtttttgccggttatgccggacaagcggcttttacgatccacaaaaagatttatcgtcaaaagtcttcgaccgatggagaaggcttgtttaatctgggatttaatgccggtgctgacaccttgttttttgtcgatgaggcttcgatgatttcaaatgccgatggggaaggtaatttcgggagtggttgtttgttggacgatttgatacagtatatatataatggacggaataaccgtttgatactgatcggggatgtggctcagttaccccctgtaggcctggatattagtccggccttggacagacgggaactggaagctgcttataatttcaaggtgaccgaggtggctttgaccgatattatgcggcaggcagaacagtcgggtattttatacaatgccacacaggtacggagtctgatcggaatcggatcggaaaatctgcggctcaggatcggaaaatttcccgatgtttttaagatcggtggtggggaacttctggaagaaatagattcctgttacgggcggttcggggaagaagaaacgattgtcgtttgtcgttcgaataaacgggccaatcggtttaatgaaggaatacgccgcacgatcttataccgggaagaggatttttgtagtggagaccggattatgatcgtaaaaaacaattatttctggggagctgattatgaaaaaatcgattttattgccaatggagatatggctaccgtacaacgggccggcagaagagtagagctttatggtcatcattttgtaaatgctacactgaagatagatgggtatgaagaagaggtgacggcttgggttatgctggataccctgatgtccgattatccggcgatgacgtatgaacaaaaccgtatattttatcaggctgtagaagccgattatgccgatatcccttctaaaaagaaacgatttgaaaaaatccgggaaaatgaatattacaatgccttacaactgaaattcgcttatgccgttacctgtcataaagctcaggggggacaatgggatgccgtgtttatcgatcaggggtggttgccggaggagatgctgaatgatgagtattggcgttggttgtatacggcgattacccgggcacaggaaagggtatatttcgtcaattttaaagaagagttcttcgaaataccggtttgaaaataggctaatgtaccggtctgtatacacagtgcggtacattagcctgccgggtattagtttattttcagatcggccatcattgcatcgattttagctaaagcttcagcttgggctttatgaaaatcgtttacatttttcatcgtggcacgggcttcgaaatagaattttattttgggttcggtaccggaaggacgaacggagattttgcaaccgtcggccaggaagaattgaagtacgtcactggtggttggaaaatccatggtttttgtttctccggttttcagattgatttcctgtaatgttgcataatcttttttgatgatgatttcactgttattgatcgttttcggggtgttgtgccggaggttgttcatcatatctttgatttcctgagctccggtcaggcctttgcgtacaatataaaccattttttcttgtgagaaaccatattcagcatagatcgattcgagaataccgaacaaagttttcccctgatcttttgcccaggcagcaatttctgccatcaaagaggtcgaagatacggcatctttatcccgggtaaaagaacctggcatgaaaccgaacgattcttcaccggctccgatgtaaccttcagctccctttttacggatcatatcggcgatccatttgaaaccggtgtatacatcgtaacagggaatcccgttcttctcggcgatatctttaatcagctcggaagtaacgatcgttttaccagtatactcgttgcctttgagtaggcctaatgctttcctgcgctggatgatataccaggtaaaaataatgttggtctggttgccgttgagtagaatccactcgccccggtcgtctttaacagcgataccgatacggtcaccgtccggatcacaagccatagccaggtcggcatcgatctcccgggctttatccaatgccatcttgaaggctgccggttcttccggatttgcagaagctacggttggaaaatcaccgtcggtaatcatctgttccgggatagtggtgatattggtgaacccccaattacgtaaagaagcaggcactaatttataagtggtaccatgtaagggagtaaaaacaattttcaagtcgtgctgatgttgaatggcttccggagataaactcagggtttttactgtattcaggaatttctggtcaaagtcttcgccaagagtcttgattttatccgggacagccgtgaacttaatatcggtgaccttcactttttttacttcgtcgatcacatttttatcgtgagggggaactaactgtgaaccatcattccagtaagccttataaccgttatattctttcgggttgtgtgaagcggtaatgatgactcctcctttacatcccaattcacggatagcaaacgacatttccggtgtcggacgcagcgattcgaaaagataagctgtaatgccgttggctgaaaaaatcgctgcagtcgtttctgcatattcccgcgaatgatggcggcaatcgtggcctatacatactgaattattttctcccgggaacagccggttaatataattggcgaaaccttgggtagcggcacctaccgtataaatattcatccggttgctccccacacccataattccgcgtaacccaccggtaccgaattccagatcgttgtaaaatgagtcgatcaattcggtcgggtcactggcattcaacaggcgttctacttctgtacgggtagctttgtcgtaggcatcgttcagccacatttcggctttggctctggctttttgaataatttcagtattctccataatgtattttttattgttgtgatgattctgtctttgttgatacgataaaatattccttaaagatttgacaaagataggaaataaaaaaagccctgcaacgcagagcttttttatttttaacttgatctttaagatctcttttctttgattttggctttcttaccggtaagattacggaaataataaatccgggcacgtcttacttttccgactttgtttacttcgatttctttgataaacggtgattctatcgggaaaattctttcaacaccgacatttcctgacattttacgaacagtgaaagttttagtgcttccggttcctttgacctggataactacaccacggaatacctggatacgctctttatttccttcgacaattttgtagtgaacgcttactgtgtcacctgtgttgaatgaaggatgctctactgggttctcagcggcaaatgcctgttctgcaactttaattaaatccattatttcaaattttaaaaatccatttatcggacacagtattatcacggagtctttcgtataagagactgtgtacgtttttatcgaggtgcaaatgtaggaaaagttatttttatatgcaaatgattccctttttattttataacttctgaaaagtttatgtataaaagaggaactatctatccggttatttacaaggctggtctgaaaacaagccggtattttgaagggtattgaaagagaaaatattgataaagagtgagattaggggcgaaacgaagaaattctgaggtggaaacgtttgtataattttgctgaaaaaattttttattccgaaaaaaggtcatatctttgtaatcggaggtgaggattcctagtatcaacaggaattctttttaataaaggcacttattggaggataagtgtcatttatttttttatgtataaaataaatgttaaataaacggttatgagcaacaaagtgtcttatgtaacaaaagagggattgaagaaactacaggaggaattggaaagattgcagaatgtagaacgtccgaaaatttccaaggctattggagaagctatcgaaaaaggcgatatttcagaaaatgcagaatatgatgcagccaaagatgcccaggggcttttggaagcaaaaatagcccaactgaaagataccatcgcgacctgtcgggtgatcgatgagtcacagatcgatacatctaaagtacagatgttgaataaggtgacgatcaaaaatacgaaaaccggagcaacaatgacttatactctggtttctgaaactgaagcaaatttcaaggaagggaagttatctatccatacaccgattgcacaggctttggtcggaaagaaattaggagataaagtgatggtgaaggtacctgccggtgaaatggagttcgaaattatggatatcagtctgtaaaatgcgatttgtatggcttcaattttttctaaaatcgtgaaaggagaaattccttcttataaagtagctgaggatgagtattattatgcttttctcgatattaatcctttgcaaaagggacatacgcttgtgattcctaaaaaagaaaccgattacctgttcgatctttcggatgaagagttagccgggctaatggtgtttgccaagaaggtcgccagggctattggtaaaaccattccttgccaacgggtcggtgtggctgtattgggtttggatgtcccgcatgcacatgttcatctggtgcctctcaacggaggggacgatatgaatttttgtaatcctaaaaagcaatttccggctgaggaaatgaaagcttgtgccgaatcgatcgctacgaatatgtgattatgaatccggcctgagaaggctgactgacgatagaggaaacgagggtgtccaaaaagtatttgg

SEQ ID NO: 6084 - DNA, 776 bp, Unknown
  gut microbiota DNA sequence
aatgcacccgacattctccggtcagtttaaatccacgcaacaactcatccgttttcaggcgtttcttgccgggaagctgcaaagcacgcacaccaatccagccgtctgtaccagctatgcgaatatacgtctttccatcggtctgcaaagttccgggagcggattcatgcagatgctctatcttctctgtttcaaaaattttcagaaccaccgctgttccgtcggactgtaccaattctgtccacgcagccggatagggagacaaaccacggataaaatcataaatccgcttgacaggctggttccagtcgatgcgacaagtatccttgaatattttgggagccgggcgcaattcgcccactacagccatttcttcctgcggaacggatttcaccgtatctgcaagaatggcatccacagtctccgtaaccagacgtccgccaagcatcatcaacttatcgtgtacaatacctacattgtccgtatccgcaatcggcacacgaacctgttggatgacctctcccgtatcaatctcatgtttcaggaaaaaagttgtgatgcccgtttccgtatcaccgttaatcaccgcccaattgataggtgcagctccacgatactgcggcagcaacgaagcatgcagattgaaagttcccagacgcggcatattccaaaccacctccggcaacattctgaaagcaaccacaatctgcaaatcggcattccaggcacgcaaagcctcgacaaacgcttcatctttcaatctttccggctggaga

SEQ ID NO: 6085 - DNA, 9453 bp, Unknown
  gut microbiota DNA sequence
ggtcggttcgtatagggttttgaagaatagttaaacaaaaaaggcacatgatgatcgggttcgttgggatgattatagtaatcactccacagaaaatccttcgtcgtacggtcgaagaaaagttccaattcctgaataaagaaaacctctcccctcaatgccttcataccctcgatatcgtgaggcacaaaccaaccttgctgaaacggattactctcgacacaaccttgtccctaccgcttttccctgccagttcagtcatcgatctttattctgacgggcctgaaatcagcgcacttcggacttccagacattccggtaagcctgacttttccgatataggcccgggctttatcctggtctcccagactctcccataacttacccgtactccaatctaaataagcctattccaggggttcggataaattcccggatacgaatccttgttccccgtttccgaattttttcatcgaattctcgcaatactccgctactttccgggcatagaaaccacggattcctttccatcaggagtacaacgcatccatccctgtatcgtatggtcattaaccttttctacacgttgttcggagttccttaatccggataagctgaaaaccacaaagcagttatctttcgaataactgcttcatgattaaaggggtggaagatcgggctcgaaccgacgaccttcggaaccacaatccgacgctctaaccgactgagctacatccaccattttgcttttgcgcttgcaaagataaggagaatctgttattctgcaaacaaaatatcaaaaaaaaatgtctaaaattcagttttagtcgttccatccaaaacaataaacttgcattcaagtatttaccgaggagggatttctatatttccagtttcaatctcacgggcggcatactccaactgctcgtaccattcttcaccataccgagcgatcaaagcctgttttaaaaaacgatacaacggcatacctgcttgctcaccttttagccgggcacatccgcaaatatcccaacggttgtaattcagcgcttcaaatccttcgtattttgtcacccggatcggatataaatgacaagaaatcggtttacgaaaatcacacttcccttcagaccaggctttttcgatcgcacaccaacaacttcctttttcttctatggcataagcacattctcccccttgaatcaatggggtcaccaaatccccatcctgatcgatcaccgagaaaccttgttccttaacagctgcaatcccttcgggtttcatataagcccggatattttcatagttcgtctcgatccgcaccggctcatcctcttccaaaggggcccccgaatctccttcgacacaacaaattcccctgcactgcgctaaatcacaacaaaacttttttacaaaaatatcgaaacttacgattgtatcctctatctgtatcatagtcgaaaaccgacaactatatggttttgtttatcatattcataaagtctgcaaagtttacaaactttacagactttataaatcatttattcctgttattttatcaagctttttccggtcatttctgcaggctgggcaattcccataatctgcaggatggttggagcgacatcagccaaaacaccgttattcaaagcctttcccttttcgtcggtcacccaaatgcaaggcaccggattcagcgaatgagccgtattcggagtaccgtcgggattgacagcattgtcggcatttccgtgatcggcaataatcaatacatcgtaaccattggcctgagcggcagtcacaaccttttcgacgcaacggtcgaccgttgctactgccttttggatcgctgcatacacaccggtatgtcccaccatatctccgttagcgaaattcaggcagacaaaatcagctgatttagcattcaattgttctactaatttttccgccacttcaggagccgacatctcgggttgtaaatcataggtagccactttcggcgaaggcaccaaaatccggctttcgccttcaaactgcgcttcacgtcctccgttgaagaagaaagtcacatgagcatatttctctgtctcggcaatccgcaactgtttcaaaccggccttactgatcacctctcccaaggtattctctacattctctttattaaacagaatatgcagaccttcaaaagtagcgtcgtaaggagtcatacaacaataatacaaaggcattttcttcatctgctgttcggggatatcccgttgggtcaaagcaatagtcaattctttggcgcggtcgttacggtagttgaagaaaatcaccatatcacccggttcgatcacacccacaggccgatggtcgcttccgacatgtacgatcggtttgataaattcgtcggtaatcccttcgtcataagactgttggatacttacctccacatgctgcgtaggagtaccgattccattcacaatcaaatcataggcttcctttacacgctcccaacgattatcccgatccatagcataataacggccgatgacagaagcgatccgtccggtcgatttgtccatatgagccttcaattctcttatgaatcccagtccgcttttcggatcggtatcccggccatccataaaacagtgaacaaaagttttggctattccaaattctttagatacatcacatagtttcttcagatgctccaaagagctatgtactccaccatccgataccaagcccataaaatgtacttgttttttattgtcacgggcataagtaaaagccttcacaatctcgggattctgcataatcgaattatcccggcacgctttgttgatccgtaccaaatcctgattcaccacccgtccggcaccgatattcaaatggccgacttcagaattacccatctggccatccggcaaaccgacattttctccacaagtcagtaattgagcatgcggatatttttccgacaatgaatccataaagggagtcggggtattaaaaatagcatccgtcttgtcatgcttcccgattccccaaccgtctaaaatcatcaataatactttattcatatctgtttttatttattgttattgcttaaaatcactacaatcatttgtttacaaagttaatttattatcccgactttctcccgaaagtaccgatttttagcggaataatttttacggaaacgtttttatcgtcactctggcaattcaaattttttcaaacggtttatactcaaaaacgtcctaatctttgtaaggtactatcccaaacaaatatttataaaaaatttagtactatgtattgcataatactatattaatccatatatttgttccgtaaaaccaaagaagaggcgcttatgaacatagaaaacacacaggctcaaatgcggaaggggatactcgagtactgcattttactgatcatcgcccgaaacgacgcctacgtccaggacatcatcaataagctgagagcttcgaaaatgctggtggtagaaggtaccgtttatcctctgctcacccgattaaagaataccggattgctggcctatcgctgggaagaatcgacacagggccctccccggaaatattacaacatcaccgaacaaggacgtcaattcctgcaagccctggaaacttcgtgggaagaactgacgacagctatcgaaatcctaaaagcaccacatacacctcaataacaaacatcatgaaaaaaacatataacatcaatctcaacggtcagatattttgtatcgacgacgatgcttgtctgaaactccaatcttacatagacaccctggaaagtcattatctgaaagaagaagacggccgggaaatcatggccgatatcgaaagccggatcgccgaattactgaaagaagcgctcggtaaaggatacaaacaagtggttaccatggaagatatcgaccaaatcattcggatcatgggtagtcctgatgtaatcatcgacgaagatacggacaagagcacagaaccgataaaacggaaactataccgggataccgacgaatctgttctggggggcgtagcttcaggaatagcagcttatttcgatatttcggtggtatggataagaattgcttttgtcttgttagcgtttttctacggagtaacgatcctagtttatattatcctttggatcgccacacctgcagctgtgaccgccaggcaaaaaatggaaatgaaaggagaaaaaatcaatgtttccaatatcgagaaaaatatccgggatacctatgatgatctaaaaaaaaactccggtatccaaaaattcttcaccggaatagaaaacggtgctaaaacctgttttcagaaactgaacactattttaaggaaatgccttaagatcgtgttcagtgtgttgtctgtcgtgggattgctggcaggaacctttctgtttatcctggttttctggtgtctgctgtatcccgaaagcgttacaaatttcagcatttatcatattctatgcagctccatatcgtcagagctattactgactttgaaaatcatccttttactcaccctgaatatccctttattactgatcatctatatctcggcccgttatttattccagttcaactggaataagattttccttctaacggcaatcggttgctggtttcttgccggattcgcaggtatcatcatcacgatacagcaaagtctgagctatagtgatgtcacagaagaaacggagggacatccttttatcactaccgacacgacctcgcataaatacctgctgaagatcgatgatctgcctcaggtcagcgagaatagtaacatcatccatacgaacagatattttgcaaatatactggcattcgacagtattcctcccaaagaaatctatctcaaaacttttatccgtgcgactccaagtactttttcccggccttccctgacaattcagaaaaaaatcagaggtatccgtaccccggatcatttcaggccgttgaataccatccgataccattgggaacaaaatggaaacgaactgaccctggacaattatttcaaaatacacccccctcattggaaagggcaggaagtagaagtcactatccggattcctgaaggggataccctggtcatccagggaagtaataaaataagaaataatatcattcattcctgtattcctttccagggatataaaaaaaactataccactgtcatgaaaaacggactgttggagatagtgaaatgaaataaagataaaaaataatttttctcactgattttaaccgatgaatggggggatccaaaagtccggaaaccgactttcggcccctcatttataataaacgaaatttcgtcttgtttgtccaggttagcttcaataaatcggcaccttcccaaattcccactccctgatactcttttcctccccgacgatagatctcgtccaaccagggtaaaagcaaatctccttcttcgagtcttccctgataagccgccacataagccgccacaatcaatccaccataaaactccaatccttgtatttcacgaattcgtcctcctgtatcgactacatctttcacccgtccttgttcaagaatcacatatccatttttcaccaatggaaatcccggtaaacagatataattagcagcaatctttctcatcaaacggtgtttatcgtcttcgcaaactttgtttcagccttttctccgtttcccgggaaacataaggccgataaagataagtaccccaggcttcccctcccatttcgtccaattttaccaatttttcctttttagcaggaggagtttttttacctttcaccggtttgatatattttgccggaggcatcgtatccaggaaagtaatcaccagccggttatacaccgaatcggcatattgcgaccaattgtaactacgttttaacgtatcgaaatcgaccaccagatctctcacccgtaaagtatcgttaccgtcggcagaaagaaaatacgagcgaatccgccggttttgggtattctggagagaatcgaaatgaatcgtcgttccgaatttatataatcccggaacaatactatcgacggttatcgtgaaaacactatccaattttaaggtatccaccaacgggaaatagttgacagaatctttcgacttcaactcattgagcaccttttcaatagctgtcagttgccggtgtatactatcgataaccacgtcatacatcttcgaaaacaggaccgtctgagccgaataataatataaacaagagtcgaattccgctttgtcgatatggtatttccggaatacatcgttgtaatattcataatttttcagttcattgtatccctgccctattccccggtacaccgacaaggttccgtcgactttatgcaaatcgatcagcaggtttgtgaactgctctttattcaaaggtacctttttagattcacaacctccaatgattccccccacacacgccatgatgattagtattcctttccggataaatgatatcataaatctttttttataagcttaaacaactgagaagaaaaaataaattcattcagatacggattatccgtatgtgcaatttgctctttcgaaccttcccattccttgcgtccttcgtgaataaacacgattttttccccgatttcgaaaacagaattcatatcgtgtgtattgacgaccgtcgtcatattatattcatgggtaagctcgctgatcaaattatcgataacgatagaagtcaaagggtccaaacccgagttaggttcgtcacagaacaaaaatttcggctgcagaacaatagcccgggcgatagccacccgttttttcatacctccactgatctccgagggatacagatcttcggctttattcagttccacccgatgcaggcaaaagagtgcccgttctcttttctcctcgtaggaaagatcggaaaacaggttgaggggaaacatcacattttccaataccgtttgtgaatcgaacaaagcccctccctgaaacaccactccgatttcttcccgcaaagatttgagttgtttggaattcatcgtcgtcaaatcgcggtcaccgtaataaatatgaccggtcgtaaccgaatgcaagccgatcagggatttcagcaagaccgttttaccggacccacttttcccgatgatcagattcactttaccggcttcgaaagtgatatcgatgtccgataataccttcttattatcgaaagatttacccaaagcttcaacacgtatcattacagcataatttgagttaataccaggttagcggtcaatatagcgatactactatcgaccacagctttcgtcccggctttaccgacttcccgggctcccccctggacgtaatatccataaaaagcagggattgaggtaaatataaaagcaaagaacaaggtctttacgatcgaataggtcacatagtaaggattgaaggaaaaatgaaggccataaacaaaatcttcaaaattgacaactccactgatcaatccggaaatgattccccctaaaataccgataaaaacactgaagatataaaggatcggattaatcaccagagaagccaagatcttcggtcccaccaaataagaaaccgaattgactcccatggtttccaaagcttctatctgctcggtaatcctcatactcccgatctcggaagcgatattactaccgattttaccggctaaaatcaagctgacgatcgtcgatgaaaattccagcaacatcgtttcccgggtcaggtaaccgatcaaataccggggcaataatggactctgcatattataagcagtctgcaaagtcagcaccgctccgataaaaaaagaaataatcactactaagacaattgaattcaagcctaacttttcaaattcaactattacttctttagtatagacacttcttttttccggacgggaaaaggcttttctaataaaaataagatagctacccaacttatataaaaacttcatattcctgtcggttaagaaaaacaaggtaaaaatataaattattcatggatttacgcgttcctactctcataaagttcctaaatcggctcaaatccggtactgcggcagggaataaaagctatctcaaaggggaatcggcggaataatttcaggattctgaaaaaagtagtatatttggtatattatttgaaagctattttaaaaagaggaactttaaatatacaactacgaatgaatccaaattcctactgcttaattatggccgggggtatcggaaaccgtttctggccggtaagtaaccgccgttgtcccaaacaattttctgatatcctgcactgtggaaagagctttatccgtcaaacttacgaacgtatttcccagattttccccaatcatcgtatttttatcatcaccggagaagaatatgaagatatcatcaaaagacaactcccggaaataccggattccaatatattgaaggaaccttatgtcagaaacaccgccccttgtatcgcttatgccgcttataaaatcaaaggtctgaatccggatgcgtatatcgtcactatcccttccgaccattttatcagcaacgatcaggcttatttgaacgacatccaggaggggttatcttttatcgagaaacaaaagggactgctcacgatcggcatcactcctacacgtgccgagacagaatacggatacattcaggtgaaatcgaaagacaatacacaaaaaatatcacaggtcaagactttcaccgaaaagcccaaccaagaactggccaatatgtttttcgattccgatgagtttttgtggaatgcaggtatttttatctggagtgttcaggatatcatccaggaattcaagacccatatgttcgatctgcacgcccttttcaatacggaatgtaaactgaataccccggccgaacctgctttcatcaagagtgtatacgggcaatgccacaatgtatcgatcgatgtcggtattatggaaaaatcacaacatgtttatgtattaaaagggaatttcggctggtcggacgtcggtacctggcatgcttttcacgccctttgtgataaagacgaccacaacaatgtcaccaattcggataaagtggtgcttaacgattcgaacgactgtattgtgaacgttcctccccgaaaaaatgtcgtcgttcagggcgtcgataacctgatcattgctgaaaaagacaactacctgatgatttgtcaccgcaaagacgaagataaaatcaaacgcttcgaaaagtttttccgtcataaaaaatgagggtgaccacttaaactcagatcggtgaagccagcatccgatcctaatgaatcagcctatcagcttcaccgatctgagttcatttacctagggacattcagtaaatactataaaattagccaactaattcatacataaaatattgcgaattagttg

SEQ ID NO: 6086 - DNA, 1626 bp, Unknown
  gut microbiota DNA sequence
aaaaacggatgtcctggtcgaagatgtccggaatgctgattatgggaaattgagaatcggcgggtggtgtcaaatgaaggatgtgaatatttttatccccaaggatagtatcgttatgaatgttaagtcggcaggactggtttttgccgctaaccgcaagaatacgaagtctgtccagggaacggatttattgaacggagtggtcggttattccggattggatatccatgtccgcaataaggtacgtttgttgatggatacgacttatctggcgctgagaacttcgccattgaaagatacttctgtagtggcttccatgggggctaacctacatttgggacggatggtgtttatcgtccgtgatactttgctggtggggttgaaacaggcgaatgctaaagcttcgctgttgccctcgaagcgtaataaaaaagttcctcagatcaatgcagaactgcaggtggatagtttgcgcttgcgggctatgggcaaccgtttgaattttgccaaggcagaggtacaagtcgaggctgtccggagtaaacgtaatacgaagatctggcttccgacaggatacgtcgattttaccggtctaagggcttatacgccttattttccggtgcgtatgcggatgccgggtacccgattgagattcgaccggaatgaaattcagctggattcggccgtgctgcatctggggcgttcggatttgcggcttaccggaaatgtgactaatctggctaagtcgttctttaagaaagaagaactgaaagctcagttgttggttacttccgatagaatagattgcaatcagctgatgcgggcgatggaaagaggaacggcctatatggagaaggtgaaagccggtttccgggatacgatttctacagaagtggacgatatggatgaagttcctgttgtcagtgatactactgctttggaaggaagtaattgcttgtttgtggttcctcctggtatcgactttactttccagaccgatataaagaaagtattgtttggaaaattgcaaatggatagtattcatggagaagtagttatgcgcaatcaatgcatccagctatcggatctggaattacgttcttcggctgccaatatgagtaccacggctctgtatcgggcgacagataccaccaaggcttatgccggttttgctttgcagatgcacgacattcggatcgatagtctggttggactgatcccttctttagatacgcttttccctatgctgaggtcgttcgagggactggtggattttcacattgctgcagattcgtggctggattctgccatgaacatcgatttgccgactctaagggctgcggcttatctggacggccgcgatctggtgctgatggatggggagacttttgctgaaatttcgaaaatgctgatgtttaagaataaaaagcggaatatgatcgatagtatttcagtagatttaatggtgaaggatgggacgatcgagatattcccttttctggtagaaatcgaccgttataaggctgctgtcggcggacaacacaatatcgatatgacttttaaatatcatatctctatcctgaaatcacctttgcctttccgggccggtgtggatatttcagggaa

SEQ ID NO: 6087 - DNA, 10442 bp, Unknown
  gut microbiota DNA sequence
aaaaaaatcacggaataacatatggaaaagatatttgcagtatgtagccggtgttgtaatgttattgggtgttggagtggctttattattgttggtaggtaaatcagagaagccttcaacagttgttcaaaatcaaatgataacacccggaacagtaaaggctttgttgatttttcattcgggtagtcaggtctcattaacagattctactgtttttgaacaagtcgtagagcagcattcgatggcagaaaaaatggatgaagaaacccaaatggaatataatacgattattgttccgcgaggaggagaatatagtttggctttagcagatggtacaagaataaaaataaattcagattctaaattgacattccctcatagatttatgggagaggagcgtcgtgtccgtttggaaggcgaggctttgtttgatgtggtaaaagataaggagcatcctttcattgtggaaacagcaaaaggaaatgtacaagtgttaggaacactatttgatattaatgtttatccggaggaggatgttgtacagacaacattggtcgagggtcgggttgtctttaaggggagggggatgtcgcaacatgtggaattgtcaccaggagagcaagtgacatacaatatgaaaagcggagagtcgcatgtagagaaagtaaatactaaagtttatgtaggttgggctgaagggaagtggtttatagaaggggaacggctggaagatataacgaaacagttgtcgcgttggtatgatgtggagtttttttataaaaatcctgaagcaaaggaacttgtttttaccggcgatctggaaaagtatgatgattgtgaagtggccttggatataatatcaatgaccactaatgtgatgttcacaattagagatagagccataatcgtacaaatgaaatagtatgattatttttactataatgaccctaataatatgaatctaaacatcaaaactaagcaggcgtatgaaaaaaaatcgaaacaaaaattgtttgggtgtaattaaatactctaaaaggagtatgttagtgatgagatggatgtgtgtattcagttgtatgttgttgtttcagatttctgctgtcgcttattctcaaaagaaagtgacattggatgtaaatgggatggaaatggtggatgttatccaagagttaagaaaacagactggttacaaattctttttcaatcacaatgagttgaaaaaaactggtagggcttccggtaaattcttagagaaggatttgagtgttgtattggatgagatattggggaaaacaaatctgacctaccgtcaggaaagaggtatcattattattgttccccaagaaaaatctgtagaagaaaagaaggcaagagtggagattataggtaaggttacagatgagaaaggggagccgttgtcaggggtgacagttgtcattaaaggattgggttttggaactttaacggatgctaacggaaactataaattagtagttcccaatgctcctgaaaaattttctttaacgttttcttttgttggtatgaagacggtggagaaagcttatgcggggaaaaatgtcatcaatattgtgttgcaagaagaaacgatagcattggatgatgttgtcgtgaccggtatctacacccgtaataaagagagttttactggttcttcgcagacttatacggcagaagatttaaaaatgattggtaatcagaatattttgcagagcttgaaaacgctggaccctgcttttcatattttggaaagtaaagaatatggttcggaccccaaccgtttgccggatattgagattcgggggaaaagtagtattgtgggattaaaggaggaatatggtcaggaccccaatcagcctctattcattctggatggatttgagacgacattgcaggttattatggacttgaatatagatagagttgcatccgtaacaattttgaaggatgcggcttcaacggcaatatatggttcaaaggcagccaatggagttgtagttgtcgaaacaaaatctcctgctcgtggtcaattgcgtttgagttataatggcaatgtggacatctcatttgccgatttgactgattataatctgatgaatgccgaagaaaaacttgaattcgagcgattgtccggaacctttacaagtgtatctgctattgaacaggaacagttgacaggacgttacaaccgtttgttgcgtgatgtaaagagaggggtggattcttattggttgtccgagcctttgcgtttgggcttgactcataggcataacatttatatggaaggaggcgatagtcagatgcgttatggattgggcgctaactattccggtgttcaaggtgtgatgaaaagctctatacgtgatattatgggactgtctctggatttaatctaccgtaaaaagggattcaactttatgaataaagtgtcggtggattggaataggagtgataatcctatcgtttctttttcggaatatgccaaagcgaatccttattatgagaagaaatcaggaagtacagaccgttggctagaagattggcaggcagaaaatatagcaggcgttgtttatcgacaggttcaggtggcaaatccaagttataatgatgctcaaaacagttataataagggaaactctttcagtgtaagaaataatcttagtatagaggcgcgtccgattgatgcattgaatattcggggaagagtgggaataaccaaaagtattaccgaaacggaaacatttacatcaccgaataatacacaattcgccaaagttgagcctttacgcaagggaagttattttagttcaacaagtaattcattgacatggagtgcagatttcaccgtgacttatggtcaattattgggaggtaagcacatgataaatgttgctgtcggtgccaatatccgtgaaaatgatatgaaaacgaaaagtttttctgctcaaggattccctgaaggcaattttacaagacccagttttgccaatagctatccggaaggagggaagccaggctatgcggagaataaaaatcgcaatgccaatttctacttgaatggaggttatgtttatgatggacgctatttgctggatgtcaaccttcgttcggacgggacttctgtattcggagcaaacaaacgtttttctacaacgtggtctgttggtttggcttggaatgttcatagagaaaagtttatgaaagataaggcatcgtttataaatgttttgaagttaagaggatctgtcggtaatcccggaaaccagaatttcagttcttattcggcaattacaacctattatttcaacaactggatgttgaataattttggtacaggagttcttgtttcgaaatttggtgatccgaacttggcttggcagagaactttagacaaaaatataggtattaacttaagtatgttttccaatcgttttcatgtaacagttgatttctatcataagcgcactgatccgttgattgcagatatcgggattcccgtttctatgggagtagaaaaacgtaggactaatataggagtgcaagttgacaaaggagtcaatggaactatccgctatgcaatcttatacaagccacaagagagtatcaattataccatgagtgtgaatttcagatatgggacagcattttataagaatatagggcgtagcctcaatgcgtataatcaagaaaatatttccaaaaatctcacaagatattacgatggcgggagcccgactgcgctgtgggctgtaaggtccaggggtatagatccggcaacaggtcaggaaatatttgtaaaaaaggacggaactttgacctatacctttgattataaagacgaggttgaagtgggtgactctcgccctactttggagggtgtatggggcaacacgttctattataaaggatggtctgcgagcctgcaattgcgttatagcttcggcgctgatgtattcaattctactctgtttaacaaggttgagaacatatcttcaagaagtattacaacaaaccaagaccggcgggcattgtataatcgttggaaaaaaccgggcgataaggctaaattcaagagtatttctttgacagagtcaactccgatgtcttcgcgttttgtcatgaaggaaaattatctttcaattgaatcagttcgtctgggatatcaattcgatagcaagtggttgaagaaggcacttagaatttcttctctgaatatcaatatgtatatgaattctattgctcgtttttcaacgttagaagatgagaggggattgtattatccgtttgcaagaagcatctcattctctttgggtgcgatactataaggattgacaattaataaaagatagaagtatgaagaatttatttttattgttcacgatattactgggattgaatagctgtaattcctggttggatgtccagccttacgacagagtcgctgaagatgtggtgttcgaatctgtcaaaggttttgaaaatgcattgaacggtatttacatagagctaaatactaattctctttatggccagtatttgtcttgtgaaatgattgagataatggctcagcgctatagtgtgaataagtcaaatgcgtttaattatgatttgatgctccacaaatataccgagcaaggttgtaaggctcgttttgcaagtatatggaaggatgcatatagtttgattgctaatattaatcttctcttgaaaaattgtgaatcccacagaaatgtattgacagatgagtattacaatttattgaagggtgagtgttatgctttgagagcttttttgcatttcgatattttccggttgttcggtcctgtatatgatttggatgtcatgacggtaaatttgccctattataaggaattttctttggacaaacgtccgtcttgcaaaccggacgaattcatgaattgcgttatcgaggatttgcatcgagccgactctttactgcaggacgatccggtgctgcaagaaggaacggatatggttcatgacaatgcatttgtatcttacagaaaatatagactgaacaaatatggagtccaattgttgttggctcgtgctgagctgtaccgtggcaataaagaggctgcattggtggctgctcgtaaagttatagatgctcaagaacagtggttcccctgggtaacccgcgaagcggtatcatctgggcgttcagaccctgacagagtcttttatccggagattctttgggggttgcagaatttcaaactgtctaatttacatatctcattatttggtggagagaatctgtcgccgttggtgatgttggctccgttgggaggtcagattgacaaaatatttgaaaacaatagagatgactatagatatgaggcttactttagaaacaggcaaattataaatggagcaagctataatatgtttgaaaagttcaaagcaacacaggatactattgctgggacaattatccctttgttgcgaatgtccgaagcgttttatattgcagccgaatgtgagccgaatgcgagcgatggactggtgtggttaaatcaagtgttgacacatcggggtgttcggaatgtgacaaacgaaagatacctagcctccacccttgagaaggaatatattcgagagttttggggagaaggacaattattcttttattacaagcgcttgaaatatccgtcaattcacagagcggatgacgccacttacaatgtaatgaagcaaatgacactgtcggattatcaacttctgattccggaagaagaatctaaatacaattgaattgttgatttatgaaaaaaagatggtttatgaaacatttgattttaattataggtattataagctccatattgcaggcatgtcagcttacagaggttgatgggtatgtaggtggaagttctatttatttttcaattcaacgcgataccatgacctattcatggggaactgtggatagtgatattcaggagcgggtattagaattgccgatttatctttttggtgaggtgaaagattacgaccgtaaaatacaggttcgcactgaattatgcaagaccgattctgtacgggcagttgaaggtgtggactttcgggctataaccaaggaagtgattttaccggctaattgcgagaaaacctccttgcaaattacgatgttgaggactgaggctttgagaaaatataacagaatactgaccgtagtaatagaggaaagcgaagagtttgattctgagtttaattggcgtaaggatagtgatggaaatccttatttcatcggtcatagtatgacaattatatcgaacgaagattttccaaagccttggtggtggagagatgaaaatgatttcttcggagtatggagttttaagaaagccgatttgatttgcactttgtgtgatgtttcccgtaaggaatttataagcagcaatgttattcctgattttaaattgaaatactatgcgaagaaggtacagcgttggctcgacgagcaagaggaaccgtatcttgatgaaaatctggaaccgatgacaatggggccggaggcacagtgattatttggtagaatataaaattggaacatgttatgaaaaaatggtatttatttttcttgacgatagtattgattgcctgctatgatgatgaagggagttactcttataaagagttgaatgatgttacgatagggggaatcattgataatgactggtataacaagtttacttatgtcgatacattgagaataaatcctaagttgaccttagctttggggggcacggaagatcatttgaaatttgagtggcgtttgatgccgattaaagcttcttacaacaatgattctattccgagcgaggagcagttgaagaagtatatcatcggcaatgagaagaacctggcgtatcctttgagagaacaggctggcgattatctgggctttttctgggtgactgacacgctgaccaatgtatcgtacaaaaaagatttttttgtacgtctgcgtacagcggtgactgatggctggatgttgctttgtgaggaaaacggtaaggccagcttggatatggtatctcatatctcagctaccgaaaatatagtgtctcgtggtatttggtcggagtgtgactttgaattcggcaaaccttataagttgatatataattataacagagctaagagcagccgtttgttatggtgcgaagccggaacgttcgatttggacaaggaaaagctccaaccgagtgaagaatctgatttaatttatcagttcggagacaatccggagaaggttaagattgctggtggcggattgtctaggtgtaccgaccctgctcgtgagatgcttattacagcggatggcgatctttattttagagatgccagatatatttctcttggaagtatttttgattttccgagaaacaaactgaagaaaacgtcagaatattttaaagtgtctccttttgttggttataagggcttctgggaatggccgacaacaactgctgccattctgtatgatgaaacgaaccgtcgttttgtaatgctggaaagtaaggaagagtatttgaccgaactgttttttattggaggggatatggattataaagccgagacaggcagagatatggtgcacatggaagggaataacgaaggatatgtttttgccgtgctaaaggaaccggggcgggatgaatactatgtatatgggatggtattgaatggtgactgtaaagttgaacgcagccattacatgcgtctgaatctggcaaattccgacaagataaccaaatttgcgttccatccgttttacaggttgttgttctatgcgacagagcagggggatatctatcagtttaacatgaacactcccgacgaaaaggcgaaaaagatactttcttttcccaatgagcatatttcagtattgaaattcaatttgctcgtgccttacatccaatatgcggattgggagcgggaaagggaaaaatggttaattatagccggttatgacaagacaaaggaagaaactgtttcgggagcactgagaatgtacgaattccaggaagttacatctgctccgaagttgaaaatggaatttacggatttaggaaaaatagtggatgctgcatatcggtttagaaatgacgaatccaagtagtaatataaaatttaaattgtagaattatgaaaaaattattgttattattatcgttgtcattaggatgctttgtattgagtagctgttcatcagaagtcaagaagtatgtcataaaagggcatgttgataaatatgagtcggatttgcttatgacaatggttaatgaaacggggaaagtggacaccatacacgaagtgcgttctgtgaacggcgattttgaaatggagggtgttattaacggaccgaaattggcttttcttacaatcaaaggtgtcaatgggagaatcccgttgttgcttgaagatactctttttacgcttaatataagagcgaaagatttggcggacgtccggaattacgatattcagggcggacgtctgcaagctgggaaaaatgcgttggatgatgttgaaatagaggttttcagtgatagggattctattcttgcctgttattttgaggcagaaaaaaatcatgacattgccggtaaaatgcacgaaagagcgatgttggatcgtatgactattgcctatgataaggaggagaacaagtttattgaagcgaataaggataatattttaggtttggctatcgtatattatcgttataattacttgaacttcgaccgtttgaaagtgaaatttgagctgctgagtgatgcaatgaaaaacacaccggaaggtcgtctgatacaagcccgatatgataaattgggggtagtaaaggttggaagacaggctcctgatttcactttgccgacactggatggttcaaccgtcactctatatgatgtgaaagctccggtaaagattcttgatttttgggcgtcttggtgtgctccttgtagaaaagagaatccgaatatggtgaaaacatacgagaagtttaaagacaaaggattggttattatcggaatttcaatggatgctcgtgagggggattggaaaaaagcagttgaaactgatgggctgacatggattcaggcatgcgattataagaacacggcaggtgaagttgccagggcttataatatcacggcaatccctcgtgttttggtgttggataaaaacaatcgtgtcatcgccgacggtttgaccggggagatgttggatgaatttttggcaaaacggttgaattgaaatttttgagataatgaagatcgtgaatactggccgctgtcatatcgtaagaatgtataacaccatgtattccgcagacagcatggagcttatatccatagtagtgtataccttgggatgcgcaatagccccagtcgggcgcagcctcacgattatcccgtcccatggtgcagcgcttggctcttgcgttttgacaaactttgaccggtttggagtcgatgcaaaagacatcctcggatccgtcaatggcaactgccacatttttgcggatttcttctgcaagccgggccggcaacttgtgccgggcattgaactgccttcggctgatcaagtttggcaaatctgccttgcattcattatgcaggcgatgaaacaaaagattttcgctatcgaagccgaacgcttcggccgtaatgccaagagctataacctcaaggtcggaaaatttgggaacaacaccacatcgaggtatatttccgagttcattaacacgatttccggcgaaatccttgcagataccgagaattctaacgaaattcgctatgaagttgcgcataagcgatgaattagtagttagggatattcagtaaatgtcttaaaaaagtaagatggcatatgcagatgatttactactatcctctcatatgccatttttattgtattttttttctctctgacctaatgagcagactgaggaagcatataaagaagtgagctgcgatgcgctttggagagcgcacgtatacggggcgcatgttgaggtcggatttctcaacccggaagcagtcttcaatttcccaacggtatgagttgacgcggattatctggcaggggtcgtcgccgaggcctgttgcaagggcgttgaagccatcgtagcgtgcttcttcggcgatttgttcataatcgaggattgctgatgtgatggtttcgatagggttgcctttggcatcgaagtaggttggcttcataaagcgccggcagtcgttgggcgatttgggccggttaatttcgcctcgatttagttttgtgatggcgcgctcgatctgtctcccgcggatatctgcataatttttccactttgtacaggtaattccgcaattgcattagagatcaagcgatatgtttcttcc

SEQ ID NO: 6088 - DNA, 857 bp, Unknown
  gut microbiota DNA sequence
gaaatgaatgacgagggacattgcccggtcatggcgaaacttgccgtcggcaaattttcagaagcggcttttagtgcgaaaatgtccgtacccgttgcactgtgggcatccggacgtgccacgggtaaaagtaacgccgcgcgggaaatcaaccggcaactggacgatttgcgagcttcagccatttccatttatgacgaactgtcagccacccgtgagaatgtaacggctgaagaaataaggaatctgttgttggggacggctttcgggcaggaaaccctgttgggttatttccggacgttcatcgaacatttcgaaaaacgtgtcggcgtgaaccgggaaaagggaacagcacaatcttaccgctatgcttgtaactgtgtggctgctttcatccaggagaaatacaagttgtcggatgttcctttcacggccctgaaccgttcattcatcgacaactatgacctctacctacgcacggagcgccgctttgccctgggaactatcgtgttgcttgtcacacggttgaacacgattgtcggggaagccatcgcggaagggattatcactgccgacccgttcgcggggtatgaagccgaacatcccgagcgggaacagaaataccttaccgccgcagagttacaacggctgatgaccacacccctgcacgacccgaaactctaccatatccgcgacctgttcctcttctcctgctacacgggtatcccttacggggacatgtgccgcctgacgacggaggatctggaagtggccgaggacggtgaggtatggatcaagaccgcccgcaagaagacgaaaatcgactatgaagtgccgttgctcgacataccgttgct

SEQ ID NO: 6089 - DNA, 191 bp, Unknown
  gut microbiota DNA sequence
aaaaagatggggaaaagatgttcccatattgaaagacaagcgttttgatgaaatcataacccaatattactgtctttcgcatgaagcgggcatagctgccttggggcaggaacttaccgcctacggatacgctctctatgacttggacggtgatgagatttacctattggagttgcttccacaaacggaaa

SEQ ID NO: 6090 - DNA, 6114 bp, Unknown
  gut microbiota DNA sequence
ttgttcaatagtcttggttttaggaagcacatctttgagataatcaaatatagcatcgcgtttggctccagcagaaccagcattttgaagatactgcaaaatcatttgttggagttttgctttatccaaacctctgttgcgggtataatccggcaactgctttgtttttttagcaagatccaatgatatgctatactcggatgtatccccctctaatagtcctctgttcaataaagcgagtacattctcctcggaaatgcgatgtcctttctgcaccgcatccaaaaggatacaatcttctaatgtcaatgtatcgttatccttgagcaactgagtatatttttcattgatggtatttccatatatcgttacgccaacctctttgttcaacatgtcaatttcatagtcaggcatcgggaaatgacgacgcctttgctcgttgaacatcttcttgataccacgacttacggtgtctatcatattgaagtttaccattgcacggcaaagacattcatttcggaaatgccgttgcggacctttggtctccaatgccttttgcaaagtgcctggaatgaaactacctccgttggcataatacagccatccgggattctccacaaaattgatgcgttgctgtaatgtataatcctgatgagcgattgcattgtgcagtgcctcacgaatggtgtagtcatcgtattgcttcattgtctcaggaaacaatgttcctccgggcaattctctcattgtaagattgtgtatcttactcaatatcttatcaactgtattttttagttaaaaccttccctctatcttattccgtactcctcgatcttacggtaaagggttgtcaggccgatgtgcatcaaacgggcagcctcggtcttgtttcctccggtatattgcaatactttccgtatatgtgctttttccacctgggccaggtcgaattcagagtatccttttccgccttcactttccaaaaccgactgctgaatatcgaagggcaaatcacttacggtcaataccgcaccgtcggcaatgatcatacttcgttcgatcacattacgtaattccctgacatttcctttccagacatgttttttcaaggttcccaaatattcaggtgtaatctcttctatctttttccccacacccggtccgaacattttcacgaaagcccggacatacaattcgatatcttctatccgttcacgcagaggagggagttgaatccgaaaaacagacaagcggtaatacaaatcttcacggaaatgcccggcctcgatctctttctgaaggtctcggttcgtagcggctataattctgacatttactttaataggacgggtatcccccacttttatgaactcgccactttccagtacccgtagtagtttcgcctgcaaatcgaaagccatttcaccgatctcatccagaaagatcgttccctgatcggcttcctcgaacagtcctttcttttccttcaaagccccggtaaaggcccccgctttatggccgaagatctcactctcgagcagttctttgctaaaagccgaacaattgaccgccacaaacgccttgcccgcccggctactatgctgatgtatggcctgagcaaagacttctttgccggtacctgtctcaccggtcaataatacaggtacatccgtcacagaaacttttctggccaactctacagccatccggataggcttcgatttcccgagaatcgactcaaaggaatacttttgtccgacctgtttctccaattgttgcaaacgcctggccatctctactttttccatagcacggctgagcaaaggaataattttgttattgtcgtctcctttggttatataatcgaatgcaccgttttttatcgcttgtactccatccgggatattcccatgggcggtcagcaggataatctcggtcaaaggtccgagccgcttcatttctgttataagatcgacaccgcttccatccggtaagcggacatcacagatgatcacatcgggattttgctgttccacttgtttcaacccagccttacaactgtcggcctgaatgacttcataaccttccaatccaataatacgggccaatagtccccgtaactgattttcatcatcgatgattaacaccttacccattatacccagaattaaatcggtctacaaactttatgaacttaaattaattatacctacttctgttcgtaaaagtaaaaagtaaaagacaaatgcccaaaggtttgaccggaaaatcctaaatttgccgcatggattcattgatcgatttaggatattggggattatttatcggttcttttctggcttctaccctcattccgatgagtgcggatgtattactggtgggtatcctggctctaggcggaaatgtatgggcctgcctggttatcgccacaaccggtaattggctgggaggactcacttcatactggatcggttggctgggccgctgggaatggatcgaacgctggctgaaggtgaaggaagaaaagctcctccgtcagaaaaaaaacatagaccgttatggagtatggctggccctgtttacctggcttccgcttatcggtgacttattggccgtcgccctgggattttacaaaatcaaaccttatgcctcggccatctacatgttaatcggccgtttcgcccgcttcctgctttggacctggctctacctgcaatacggagaacgatttttttaaactttctctctttaccgccccctctcaccatttccactatttttttctgttctcttgcctctcgccgttttatctgtcgtcaccgttttatccgtttccaccgtcccaacaactttccttccccctttacgtatttgtaagagcacgatcaaacctctgcaaatgggacatgactttatcatattagcgaccaccgaattttgggagcattatggctatttaggattgtttgccggttcgtttttgtctgcactttttattcctttaggtgcagacctattatatgtaagtatgttagctatgggattcaacccctggctctgtcttttcgtagcgacaaccggtggttggatcggaggattggtgatttatggagtcggttatgccggcaatgccacccggatacggaaattattccatatcaaagaagaacaattgctgaaacagaaaaataaaatcgaaaaatacgggggcctgatggcactcctggtctggattcccgttatcggcgatatttcgaatgtagcactcggcttctataagacgaaacgaacccatacttttatcctgatgtttatcggcagaatgtgccgctttctgctatggacgctattgttcctgatcttttcaagccgttttatcaaatttttcgataaactctgatttccaatcaaaaactaccgatcaaagaagtcagattagaggtaaataagcgaacggctattgccaacaagataataccgaataatttacgcattacgtacactccgcttttaccgaacagacgttctacataatacacatagcgcaataccagatacaccaatgccatattcatcgcgacagcgatgatgatattgagaatattatattccgcccgcaacgacaacaaagtggtaaacgaagccgccccggcaatcaaaggaaataccagcggaacgatcgtagccgacccgcaaggactatcgtttttaaatatctcgacaccgaagatcatctctaccgctaaaaccagcaacaccaaagcaccggcaacggcaaaagaagaaatatcgacattgaataatcccaataatgcctgcccgataaacaaaaaggctactaatataacaaaagaaataatagctgcctttccagcctctattttctgattcttttcacgcaaactaatgataatcggaatggctcccagaatatcgattacagcaaacagtaccataaaagcactgataatttctttaaagctaaaataaatgtccatcgtgtgtatttttatcaacaaaagagccgttttgtttaaaataaaacaatcaaacccttcgcagttaaatttaagacaacaaaaatactactttctaaagaaaaaacaggtacttttccgataaattttaattccggattccgggacggacctttcatcccgttttcggtccgtttctcttttttcttcctacagcaagttaatttttatccgctacaacagcctccatttctgctttactccggctattggttaccagatagacccctccgaatatcaaagcgactgaaatgattttcacaaaattaaaagtatccatcccccaacacacagcaacaatactagccaccaaaggctgaacataattatacataccggcaacagtcgggcgtagatttttttgcccgatgactatcaacacataactaataaaagtactccccaccacgataaataccaatgctccgatttcagtgttttgtaaactcttccactccgtatggagcaaatcattataagagaagggtaaagcacaaataaaagcataggtaaacatccatttcataatggtaatcaaggaatatttattcacaaaatttttaaacaacacaaaataaagagcataactaaattgtgccaacagcaccaataaatctccccagatataatgatttccagccgctttagcctccgaaacctgatggctccctaaaatcagcaacaacgccccggtagctccgactgcaatccccagtactttttttcctgttatcggttctttcaaataaatcgccgctaaaaccatggcgagcaaaggcatactggtggtgatgatggaagcatccaccggagaagtcagtcctaccccgaaaataaaacatccctgattaaaaacaatagccaggagagatgcccccaacaattttaataaatctttaggagccacccgttcaggtttctgaaagaatgaagcgatccaaaacagcaccatagcccccgtaatccttagatcagttacaacgagaggagtaaccgcacctcctaccatcacaaattttgccacgggagacatcaatccccacatcacattagcccccaacatcgagctatggcctttcaatttcatcagattcatatcggaataaattaaatacaaaaaagaaccgacttcagtcagttcttttgagcgtagcgctaaggggaatcgaacccctgttttaagaatgagaatcttacgtcctaacccctagacgatagcgccatttcgagtattttaaaaaagcctgcttttgcagactttccccagagctgttagtgagatttgaactcacgacctcttccttaccaaggacaattccatcacgccagacacccactaatatgctatataacaacacattagtttcagaacaaacaataacggttacaaattggtaacaaaattagtatttatgccaatatgtcagtgcaaattaaacaaattaattatctaaaaatctatgtcgcacttcaccctatttatttcttaatataaattccctgaaatgcgattggtaaaattctcttctaaagagggcttttccgacggttttaactggtgtccataatgcttgatttaaattgaaaacttttaatccaagatgtattgttgaactcgattcagcttaaaggtttatttttaagtggtatttatatctgcttaaaaatacctccactaaacacgtagcgtattacttttagtatactccgttttaaagtaaaataataatagataaacatcacagcaaagaaacaaagtccacctaagggtattagccaacccaacagcatgtaataatctattgttacaatagagaaatcccaatcattctcagaaacgatatataaatatactcctatcatgtataataggtatggaatccaaaaccgtttaagttttttacgaggaaataccttgtaatatgtgcaaaatatcaacagataagcaacaatacaaacatctacggataatcttagaaggctaaatcgagaagaaggaactaaaggtgttactaataaccattgtattattatcatttgtattagggatattcagtaaatgtccctaaaaagtaag

SEQ ID NO: 6091 - DNA, 524 bp, Unknown
  gut microbiota DNA sequence
gtcttgcctctcctactaggagaggtggcatcccgaagagatgacggagaggttttatctatagggatctgtaagagagaaagggaaagtcaatgtctattacgattgcaatgccgcgcatggtgccgaaccagctgttggcggaggcccacgcaaaatatcccgaaagccttgcccgggccggggcagaaatgcgctggatcgagctggacgaccccgaaaaagccgtgcaggatgcgctggcctgtgacggcctgctgctgccgggcggcggcgatatcgacccgaaattctacgggcaggagcgcatccccgcctgcggtgagcccaacgttctgcgggataccgccgaaccgctgctgctgcgcgccttccttgccgccgacaagccggtgctggccatctgccggggcatccagctgatgaacgttgcgctgggcggcgatctgtatcaggacatcaagccctttgagcacgtcccccacaacgaccattggggcaagatccacaccgtcaccgtgcgg

SEQ ID NO: 6092 - DNA, 719 bp, Unknown
  gut microbiota DNA sequence
tccgataatgaattggatgaggttgtggttattggttacggtactcaaagaaagagtgaccttaccggtgctttggcttctataagtagtaaggatattaagaactatgcagtatctaatgcatccgaactactaacaggtaaggcagccggcgtatttgttgccgccagttccggccagccgggatcggatgcagtgatccgcgtgagaggtttagggaccgtcaatgacaacaatccattgtacgtggttgatggacagttcatggataacatcagcagcctgaatccatctgatattgaacgtatggaagtattaaaagatgcttcagcctgcgctatctatggttcgagaggttctaatggagtaatcctcattactaccaagggaggagtgaaaggtgaaacgactgtaacattggatgcttatgtaggtgtaaaaaacagttataaagcattgaacatgatgaacagcgaccaatactacaacttcatcatgaaagcgtatgaaaatgatgcaagctttcaaaactcaatgaaggataagtttaccaatcagtatcagaaaggttataataccaactggtggaatgaagtaacccgtacagctttcaaccagaactataatctaagcatccgtaaggggacagataattcgagatcttctttaagtttaggatatgtagacgatcagggtgcaatcatcactactgaattcaa

SEQ ID NO: 6093 - DNA, 194 bp, Unknown
  gut microbiota DNA sequence
ttctccgtataaaacacgacaggatcgatccccggttgcgacaacaaccgctcctcatcccggaaaacaatcgagccgagccccgtgattcccggccgcacattataaatcacccgttgtacatgttccggaaaacgttcgaaatccaccttcatctgcggacgcggccctacgatactcatcgttccactgag

SEQ ID NO: 6094 - DNA, 804 bp, Unknown
  gut microbiota DNA sequence
gtcatatcggacaccatcgtctgtatctcccggatatgataggaaatcgtgcggatagcctcgatttgcacgtcggccacggactcgtagtccggcaggatattcttcaaagcggtcacattcgtcaacagcgtgttctgataggtgatcgccgtcgggataatatgattcaacacgagatcccccaaaacacgggattcaatctgcaacttcttcaaataaatttcattcttgatctcgaaacgcgcttctagctcccgttcactcaatatcccgttgtccacgaacaatcgcttggccttctccgagcaataagcctttaaagccgggatacaatccacctccgtggacaatccccgacgggcagcctcttccctccattccttgctgtaaccgttcccctcgaaacgtacgggtttggactcgatgatgtatttacgcaatatctggaaaattgcctcatctttcttaacgcctttctcgattaaagcatccgtttcctttttaaaagcgatcaactgctcggcaacagcggcatttaacgcaatcatcggtcctccacaattggctgacgaccccactgcacgaaattcaaaacgatttccggtaaacgcgaaaggagacgtacgatttcggtccgtgttatccagcatgatctccggaattttacccacgttcaacttcaactcggtcttctcgtccgggctcatcttccgatcgctcaccttctccaccaactcatcaagcattcccgacaagtaattccccaaaaacaccgacatgattaccggaggagcctcgtct

SEQ ID NO: 6095 - DNA, 343 bp, Unknown
  gut microbiota DNA sequence
cagtgtgcctcggaggaggaagcccggcggtttgccgcggagatgccggtggatagtaaagtatatccggtgtattatttcgcctcggatacgacaggagaaaaagggtttgaggaattttacgtgaagggggaaaaaattaatccggaacgcttcggatcgctgggggtgattgaggacctggaggcccgccggatggaagaactggatactttcctggaaagattgcaggcggtattgaatgaccagaaaacagaaaaagaagatattgtcagaacaatgaaagaatttatccccaattttgaacatatagagaaagggaaaaatttggatcagaagatgt

SEQ ID NO: 6096 - DNA, 2266 bp, Unknown
  gut microbiota DNA sequence
aaccggaatattgagtggttcggctgccaatctgcctttgcaaaaaaacgatgaattgtatattccttcgatattcgatttgcaggaagaatatacgttgtctgtaaaaggggctgtaagggtaccgggagtatacaaatatgccgataatgccacaattgaagacctgatcattcaggccggcggtttattggaatccgcttcgacagtgaaagtcgatgtagctcgccggattaaaaatccgaagagcttgaccggagcgactaaattggctgaaaactttacttttactttaaaggatggattgattgtggatggtaaaccggactttactttggaaccctatgatgaagtatttgtccgtaattctccgggatatcaggtacagcaaaatgtaacagttaccggcgaggtattgtttgaaggaaattatgtcttatcccagaaaggggaacggctttcggatttggtgaaaagagcaggtggattgatgccggaggcatatgcaaaaggggcccgtttgctcagacagatgacaccggatgaaaaggctcgggtggaatctgtattgaaactttccaaacaaacggataaagattcgatcgccattaaccgtctggatatcggtaatacctattatgtcggtatcgagctaaagaaagcgatcgaaaatcccgggtcggattatgatgtcgtattacgggaaggggaccagctcgttgtccctcagtatacaggaacggtgaagatcagtggggcggtgatgtatccgaatactgtcgtatacaaaaagaatgcgaagttgaattattatatagaacagggcggaggattcgcttcacgggcgaagaaacgcagggtgtttatcgtgtatatgaacggtacggtgcagaaatccaagactttctctaaggccaaggctgctcccggttgtgaaatcattgtaccggtaaaaccgcctagaaaaggtgtcggtttggctgaaatcatgagtatcgcttcctctaccacgtctatggctgcattagttacatcaattattaatagcacgaagtaatggctacaaattcgacgagtaatcaaccggttcaaccggaaaatgaaatagacctgatcgaggttgtaaagaaattatgggcaaagcggaaattcattctcaaggtgactgtcgtttgtgcatgtctcggggtattggtcgctttgttcagtgctaaagtttttaccgcttcctgtacgattgttcctcagacaggtgaaaaaacgactgggggaagtttaagtggcttagctgctatagcaggtataaacatcggatctttaggtgccggagatgtgttgtcgccgaagatttatcctaaaatattggctagtgtacctttccaaaaggaaattatgcagacggcgatcaaatttgaggaatacgatcagccggtgaaattgctggattactatactgccgatgaatatgcccaattttctttaggaggaacaatactgaaatatacgatcggtttgcccggagtgattatcggggctattcgtggggaagaaccggaacctcaatatggagaaggggctgttgctactttggaatccctgtctaaagacgaggcagaatgtatcaagaccttgaaagataagatcaatatgaacctcaacgataaagacgggtatattactttatctgtcgatatgcctgaacctttggctgcagctcaattggctgccaaagtacaggaattattgcagcgttatgtaaccgactttaaaattcagaaggtgaaggcgaatctggagtttgtggaaggtcgctatgaagaggctaaaaaagaatatgaaaagaaacaggaagagctggctatttttaacgatgccaatcgtaatctggtttccaatgtagctaaaactacccaggagcgtttgaataacgaatatacgctattgttcggtgtatacagtgaactggccaaacagcgcgagcaagccaatattcaggtaaaagaaacgactccggtatttactgttgtagaaccggtaactataccgaccgaacgttcaaaacccaaaagaggattgatttgtatcgcctttacttttttaggtggttttatcggtatcggtttggtattgactttacctttcctggctcaggtttccggttgtaagcgtttaaagggatggttgcctgaagaaaaagaataatttcccataaaattttataaaaaaaaactatcgaatgataaatttcgatggcttttttctttat

SEQ ID NO: 6097 - DNA, 1838 bp, Unknown
  gut microbiota DNA sequence
tttgtggtatcctttaaagcgggaaaacttaaaggattgaacgactaagtaaatataacgatggaaaatgaagaaatcgatttaatcgaagtcatggcgaagctgtggcatcgtaaaaagacaataatgtatattgccttgttttttctggtgggtggtctggttttagctttctttttaccaaggaaatataccgctcaatgtaccttaggtttggaaatggaagaccggactacgcgaatcagtgtagaaggaatgtcgcctttccagagtatgccgatgggggatatgcggaatacgcgtattgtttcgccggctatgtatccggatatttttttcagtgtaccttttcagaaagagttgatctattctcctttatacatcgatgagagaggagatacggttactttctataactatctggtgtccggtccggaacgtttggctttggtaaccgatccttcacaggtagaacagctgacagaagaagaaagtaaatgtctggcttatttaaaagatgctttttctgtaaaagtaaataacaaagacggtaatctgaaaattactctggatctgcccgatccgaaactttcggcttatctgacgaatcgggcacaggctatgctgcagacatacattgcgcggtttcgtatcgccaaagctcaggctgctctcgattttgtagaggaacgttatacggaggtgaaaaacgaactggagaaaaagcaacaggctttagtacaattccgcgaaaaacatccggaccggacatccgtgcaattagaaacggaagagaaaatactgaccaacgattacgagttgtttttcggactttattccgatattgtaaagcaacgggagaaggcgaaaatccaggtgaaagaagatatgccggtactgacggtaatcgaacctgtcgtagaaccgaccgttccttctaaaccacagcgtgcattgattgtgttggcttctttattgctgggattattcgtcggttgtggttttgtgctgattcaacctatcttttctcagatcgtatcttcaaaaaagcaggcgcataccatcccgattaagcgaatgaaaaaaatctcctgaactgtaggtttagtttttttctttctgtttcggtttttatgccgtcagcactacgggccaaaggaaagggaaaaaaatactgatttctaaattgattcctaaggtaaggaatcagaagacctctgttttatggtgttcctgttttccagatcgaggttagcttgccatgcagtgataacgggagtcgaaggtgatcgtattcggggaccatgggagctctgtcgagtgtcgtcttgctttttctgaatgcccgaccgatggtgtctgacggaaacgtaacgtaaagttttttgtgcagtgaggagttccgccggtcagtgaaagaaaaagcaagatgaccgacagaagcgaccggggcaccggacacgaacaactaccggaataagtctaccataaattccaatccatccacatatccttgtcatatctccagctgtcatgtaccgcatccgacagtattttatccgaatacacgggcagtcttttgatgaataatataaaaacgcttgatttcttgcatgtcgaggtcattcacatgagaaatctgcccccggtaatcggtaaaaatacctccttcgatgaatttaatgtcggacatagatgaatgttttaatcgttaagcaatttccagatttctctaaacaattgcggagtaattcccatcaagaaaagattacatcttctgatccaaatttttccctttctctatatgttcaaaattggggataaattctttcattgtt

SEQ ID NO: 6098 - DNA, 545 bp, Unknown
  gut microbiota DNA sequence
ccccatttgcaggagagcgtcatacagcagcggtttcaggcagccgttcaggaattgctgcaaaagcgaaaagcagttctggaaaactgtcaggtgatgctggaactgcttacggactgtacagatttagagcgtcaattgcaggaactggaaacgcagaaaatgcggatttcggaacaggtgcagggatatgttcgggagaatagtgaaatcgtgcaggatcaggaaaagtatgaggaacggtatcaggcactggtgggacagtatgaaccgctgcagaaacaagaaaccgccctgcaggaacggcgagcagagcggttggcaagacgggaacagattcagggatttcaaagagcattgaacggacaaaatgggatgctgccggaatttgacacgcagttgtggctggctgctgtagaaaaagcagtggtgcatcgagatggaaaaatcgtgtttgttttgaaagatgggacggagttggtgcagaaaatttgaggggagtggggtgcagaacgcactccctttgcttttcgggtgtgcattgt

SEQ ID NO: 6099 - DNA, 2195 bp, Unknown
  gut microbiota DNA sequence
aattagtaattgatctatcaattattatcaggaggaacagctcacaaccaatggatgctcctcctgtttttatttttcatatacaatgacctccttcccttgtgtagtaaaacccaattttccagtttctgtcaagatcctgaatatccggtcgacacgatcgaacttcttcaatttagctgtcaacaccaggtctttcagctcattattccggtaagaaaaagtgaagtcataccaacgggccaactcgtttagtatgtcatccaattttttatcctgatatacaaagaaaccatccttccaagccacaaaatgaatcggttccacttcccggacagtaatcccgcctttttccaacaccgcttgttgtcccggtcgtaaccgacattcggaaatattcgagttgtccgttaccgacaccgatcctttcaccaaagtagtcgcgatagcttcattttcataattccgaacattgaattctgttcccaatacggtaatttctgcctgatccaaacatacgataaagggtttggttacctgtttggttaccgcaaaataagcttctcccttcaagtacacttttcgttctgtcccggaaaattgcaccggatacctcaattccgactccgcattcacccacaccttggtaccgtctgccagtactacagcatattctcctccccggggggtaatcagccgattgtactcttcttccccctctccatttttttgtctatcgtatactagtgtattcccttcttttttcactgtcgtatttccagccaacaaggtctcttccgcttcatctcccaacaccactttttcatcggaacccaacaccagaatggcttttttccctccgggctcgatatttccttccacaacatacgcctgatctttgtcctgatcacgacgcataaaaacataaccgacagcaatcatcaataccaccaaagcagcatatccggctatccgggtccataaaaacaaatgtttgaccgacattcggtgaaacagacgatgttctactttcttccaagcctcctcggtctggtaacgctgtacacatccggcttgtatccaatcttgtctgtatgcatgaaatagaagaaaatgctgctctgattcttccagccatttttgcaggaccaacaactcctcttcagaagctgtaccttccagagaactgatgatcaagtgttgtatatcggtttcgttatctttaaaattgtccataaatactgaaatttgtatctaagacaactctatttttaaaactacttacagatttttgaaaaaatatgactttttcagttagaacagtgacaacagtcagacttacccccttcatctcacggcagagttaaccgacaaagaaaatacaagtggaaatttgcagcaatagaaagccggactctccggattatttccaggaagaatgatctttctcaaatcaagactagtctgcaattcagtgataacgtaagtcggaggtgttcgtgttcggggaccattggagctttggcgagtgtcatcttgctttttctgaacgcccgaccggtggtgtctgagcgaagcgagttccgccggtcagtgatagacaaagctagacgaccgacagaagcgaccgggtcgacaattccgatcaccggagacgaattggtaacgaaataaacctacgataagtttacgaactttatcccctggtctaaaccttttctcctctaagaaggaacaaccaaaatattgcgctacctctcaaatgggctaattcttcccgcagacgtttcatagcccggtaaagctgagcttccaccgtacgtacagagattcctaattcaaccgcgatttcctggctttttttaccggaaaaccggctgagaagaaatatttgacgacattggaaaggcaaaccatcgattgcccgatttatttctttaaacacgatttcctgattttctttatctataaaatactctatgttgttttcatctttagaaccctgtttttgaataaattcccagaaagccaattttactttttcatgttttaacgaattgagagcagcgtgatagacagagcgatacaaataagccttcatcgattcccggatatcgatctcttcccttttttcccacagcatacaaaataaattctgtacaaggtcctccgccatatcccgatccctgacaata

SEQ ID NO: 6100 - DNA, 676 bp, Unknown
  gut microbiota DNA sequence
ataattttgctgcattatctagttttctccaacgtgcttttttcttactcacagtgtttcctctttcagaaattcattgatataggtaaaactttcctgtacatgaagctgcttgatccccaacgcaaaatatccatgtaatgcatctttgatccgatgtatctccacataatttccagcctcttttaagcgcttcccatatgcttccccttcatctcgaagtggatcaaattcacatgtaagaatcaatgtatcaggttgattcgctaaatcttctgctatgtatggtgcaaaataaggattcttcttatcctctttatttctcgcataaagatcaatataatcctgcatcttcccagctgtcaaaagataatctgttccattttccttaacagatggaaatggtgaattttctgtataatcattatatgtagccggatagatcagtatctgtctttttggcataaattctccataatctctagccatcaaagataatgctgcacaaagattccctccggcactatctccgatcaatgtaatattttcgggttttatgttgagcataaaatctccggaatataatgttttcgcaacggcataacaatcttccagacctgccgggaatttatcttccggtgccagtcgatattcaactgcaactacatattgtccg

SEQ ID NO: 6101 - DNA, 829 bp, Unknown
  gut microbiota DNA sequence
cgggaagttccacaattactcttgcgtcgttggccgggatctcaacggagccatttgtctttatattttttgctatatattctttggcaacaatatcaaacaaatcgcatggctgggtagcttgataagtaatgtttttggtctctttatgagggttataatagagatagaccggataaggtttctctgtatagaagtctgtgacattgcaatccaatcggagaataccctccacattcgtttgacaaacaatggcccccaaaataccaacaggagaagagctgtaaacgctgaacatgctttccgtcggattaccttttatccatttgggaccatcgccgattgcaaccggactaaccccttttaatgatgcttttccatagtcatccgtttttcgtaaaccttcataagaaacattatcataagtaatgtccttcaattccggagcccattgatgtgtttcatctatttcccccggatagaacaaacgacatgcacttgcattgttcaacatccacttgccgatagcttttgcatattgaggctgatatttcaccatcggaatgaaaggccaggcaggtttgatactgttcatgaggaatgcatatcctccgccgtctgtgatacttccttgcagaccacttacatcataatcaccccattttcctacaataatcccccaaccggttcttcctgcagggcttttacatccgtcaaatacccaatcaagaagtttggctacatcatagttggctccctctactgcattcaaataggctgccgtataaactccgagtggtaaaagggcctcgtaaaaacggctttcttt

SEQ ID NO: 6102 - DNA, 40709 bp, Unknown
  gut microbiota DNA sequence
accttgttttgtcatatggaaaattataactatgcaaatataataattatcgaccggcctgacttccctaaaagaataaagataatgaattccggaagtttttcctgttctcccggaggttgtttatagaaagggccgttgctttaatctttcacaccacaagtttcggtgacgatctgcccgtcgaaaagattgattacccgatgagcataggaggcatcgtgctgggagtgagtcaccattatgatggtcgtaccttcctgattcaattcggtcagtaggttcatcacttccgtaccgttacgtgaatccaggttacccgtcggttcgtcggccaggattaatttgggacttgctactacggcacgggcaatggctacacgttgttgctgtccgccggataattgctgcggaaagtgcttggcccggtggctgatgttcatccggtcgagaatatgggatacgatttctttcttttcactggctttcttcttcagatagatcaaaggcagttcgacattttcatatacattcagttcgtcgatcagattgaaactctggaatacgaaaccgatatttcctttacgtacctgagtacgctgtttctctttaaggtgtcctacctcttcgccgtcgaaataatacttcccgtctgtcggattatccagcaggccgatgatattcagtaaggttgatttaccgcaaccggaagggcccatgatcgctacgaattctcctttttttacttccagcgagacgttatttaatgcagtagtctccacttcttccgtgcggaacactttacttaaattttctatttttatcataagattgaagattgaattttgtatttctctatactattattgtgccaaataattaagtcgcttatattcaatatgttaattgttttgctcttgaatcggattgtctattttttttacattgttgtctcgtttttttacatattcaaaatagaaatcgggattatctatttgattaacagatgattaataaattggcatataattggttattatccggttaaaaagatatgaattttttatgttttctatttcattaaaaatgatttttcgttcctgggcgagaaataaaatttattttgtaatttcgatgttgagcttgattattggcttgacatgttgtgttttattgattggttttgtagctaacgagtataatatagctcatgtggtgaaaggaggagggcaatggtatttattacaagagcagaacgtatattatagtaatgaagaggttatggccaaccatacccttaatggagggcgtgccgtcgctattcagcgttctttccctgaagtcgaagatatctgtgtgtgccatgacgatcacaaacagattaaaaagaatagtggtgaaacaataccttatgctgctatttatgcagttacccctaatttcgccgatttgtttcagcctgaacttttggctggagatctgaaagagactttacgggatccttcgggtgtagctgttacccgctcttttgcccggaagaatttcggacgcgaaaatattttaggagagacgttgttgttagtgggctatagccagtacctcaaagatggacgattacaaaatgtggaggaagaaaaggtctatatggtaaaagcgattgtggacgacaaaagcaaaagttatctgcaatatgatttattgatccatttaccggaatccgattatgcacttacccgtgtatcctggatgaatagctattatagcttcctgaaactggggaaagagggccggaaagataaactggaaaaaaaactgaatcaggacgagacctatcggaaacaatacgatattcagggaaaacaacagttaagaccgttgagtcaggtgtatttttcgggtgatcagcaaatcggttttattaaatcgcgcgatcgggttgccctgtatttagccggaagtatcgctatcgctattctggtgattgcttgcttcaactatatcaacatcagtatgacgaaatcattgcaacgccttaaaaataccaaccagcaaatgattttcggagcgaccggacaggaaatacgtggccaattgatagcagaaacttcgatacaggccgctattgctttggttatcgctgttttactgatcaaggggtgcttgcccgctttcaatcgatttatgaaagcagacctggttttgagcgatttggtagaagggatttcgggaggattgatgttgattttactggttatagttattttgggaccttctttgtatattttttcaaggatcggcaaaaattcactgaacgatatgatgaaaaccggattggtgcaacgtcctaaattggttacgggaatggtggtggcacaattcgttatttcggtcgtattggttgttatggtgttgggaatcgcacaacaaatggattacgtgggacatgtccgtccggatagtgaccggatcctgagtttatatgcaaaccatccggagggcggacaatggaaacaatttaccggacagttgcaggtgattcctgaagttgaagattatacttccagcgatatattgagttgcggggctttctctgccagaggaataagtgcgatgcttatggggggagatgagcgttttctaccgttcttcggactgaaattagtgaagggaaaaggattctctccctcggcgcctaacgatgctgtattggtgaacgaagcatttgtaaaaaaaatggcgattcaggaaccggtgaattatcggttggtatgtaatggtgagcatttaattgtcggggttgtcgaggattttgttatcgataacctgagtcgacagattcaaccccttttaatcgaatataattccacttcatacaacactttggtaaagataaaggaaggaagtatgtcggtggctattcaaaaaataaaggagttatggaaaaaaatttcgggagatgaggaaggattaaaatttcggactatggccggaatgtatgaggatctgcaccaagaggagcagagggtattgcaaatggtcgtacttttttcatggatcagtttgttcctgactgctttgggattattcggtttagcctggtattcggtggaaagccggatgaaggaaatcggtttgcgtaagatcaatggggctacacaaagacaagttgtcggattgttgtgtatccgctttatcaagtggatcgctatcgcgttggcgatcggattaccgatggcgttatacctgatcgaacaatggagaatgcagtatgcattccggccacaactgactgtctggatatttatcgcagcagcttttatcgtgctggccgtggggatacttacggtaatctggcaatcctggaaagcggcccgggtaaatcccgcaaaaattataaaaacggattgagttgtaatattataagttttcaatcgtcttagagattagaggcgggaaattgaacagacttttgggatgcctttgatgcgaagttttggactaaccatttaaatagaaaactatgcgtaaaattttattctttttattcgtatgctgggggacgatcggtatgggcgtagcccaggaacaagtgaaaatttcccgtttccagggagagcgggttacgggattggatatttccggggcattcgatattacaatccggcaaggagaggatacaggtgtcacattgagtattccgtctcattatgaagataatctggtgtttgaaaattggggaggaacggtaaaggttggctttaaaggccggattaagaaacattctaaaaatgaaaaatttacagctgaaatcgtctgttcctccctggaagaagtgctgctcagtggggcatgtaaattgaaaggaacgggtgattttacggctcaaacggtaaaatttgacttgaacggagcagctacggctgtttgggatggtaatttcaaggtggtaaagatcggaaagatcgatttgtcaggggcttcacaactacagttgaatgttgaggttcctgaggttgaggtagaaattagcggggctgcaaagctggccttgacaggagaggcagacagcggggagatcgaattatcgggggcgtcgaaagcgaatctggaaaatttcgttttgaaaaatctggctttggctacttcaggggcttcaaatgcgtcggtaaatgtaaccgaaacgctcgaagtagaagcttcgggagctgctcatgtcagttattcgggcaatcccaaggtgacctctcacgtttcgggtgctgcttcattgaaacaacggtaagacgataaatgaaaaagaaaccctctgatcggtctgtataaaatcgaaagtttaccgatgagagggttttgttttaccgtcggggggatgttgcttatctgcaataccggcgtacgtaagttccggcactctgaatccctaagctttgggcctttcgccagtctttacaggcttctgttttctttcctgttttataataagctatgccccggtttgcataaatagccccgttatcagggttcaattttaaggcataagtgaaatccgggatagatttactacattcgttgatcttcagataacaactggctctgttttggtagtaagcatagaccaatccgaaatcttctccgtttttctgagcatatttgatagccaggctatattcagcgatcgctttttgaaaattgttttcgttttgataaatgttacctagataataacagatttcatcgtcttcttcgaatatagctttagccttaattaaatactgttttaagatagagatttgattggtatgggaacaggctgtgttcagggacaaatacatttcccggattttgggctctaaacgaatggctgccaaaagtttctgtacagcatcggtataattaccgttttcaatgtcttcattagctgaatttaagagttcgacgggtttgtttaccgcattaatatccatttgtccaagtaccagcctacttgtggtcataaaaaagataaggaagagattgaatttcttcatatacaaatgtaaatttagttagtagtggttattgttcattcacgctttcaaaaataataaaattcgccaagaaagtcataattttcctaaaaatatctagtttatttgttaagaatgtaacaaataaatacactggaagttttttttataccagggaaatcgttcggaaaggaaagatttgtgttctttctgatcgctatttcgtttataaaatcgcccctgcaacactttttacagttgcaggggcgaccggtcggaagttccacgaaaggggaattttgcagggaactataaacttaataaattttcagcgacgaagggagtgactttacaaactgccttacaggccgagtgtctgaagcccttgctggaaataaatatctttgggtattcctgcctgggcgatacgatccagatctttttgaaggataggggaaactattcctttggttgcaattagctggctggctttgtcgtagtcgccgtctccttcgagggtgatgtattcaccggcgatgatttcgatgtcttttttcattttttcaaaatctatcgtataatatcccttgtctgtatcccgggtaatagccccgctttcaataaaatgggcaaattgcatcatattggcttttccatgggcactggcagcgccgaaacggcaggaacggaaaataccggcgataaaggttacatagttatccatcaggtctttattctgaatcactccccactccgcgagtttggtgatgcagaataaccccaggatatctgcctttccttcttcgatagaagtataattatcctttagagcaccccggacatcctggttgccttgcaaggtatactttacgccgaggccatgggctacttcatgaaacatcgtattttcaaaaaaagcgtcgaaacgaatgtgtttttgttgttccgggtcgatgacgagtcgggcgataggcactaccattttgtcgaatttggcttgcatggaattttttagttgcagtttccggcttcctttggctgcatgtacacggggatcgttaggtaggtttatggcgatatttttactaccggcattgcaatcaccggcataataaatgacgtcgtaagcgttcatatccggatttgcgttggctttctcttttttgtaagctgcgggtacagggagattctcctgtagtttaggaagatattgggcatataaagagagttttttactccaatctttatcttttaccaggatctgtcccgagtgagaggctttgtatccgaacagagcgtcttcataggtttcgataggaccgataacaatgtctaacgtattgtctttcatatccatccacgccaggtcacttttcagataatcatcggtcagcaaggcttcggaacggagagtcagatagttgcgcagaccttcgtcttcagctagctgcgctgcctgttttaaaagagaagcggcttttctgatttgttcgggataagcttcgtggtaagggattactttcaatgctcctttatcatccctgcgaacgatgctgtaccagtcgtttttacgcgggtcctgaagagcttcgaattctgatttggtcatatcctgagggtagaaattggcaccgagaggtttaggaccggcagtttcgagaaagggccggttggcgtcgagcctatcccagggaccgtagttgatggaaaggtatttgagcagggcagggtctgtaataccctcgaaaagttgttctttatctccgtaggctgtctgccagtagatcgcttccatctgatcggcagcttcgataagcagagggagcatttgcttttctttttccgttagtttactcaaatcggtagtcaggggaaattcagcatattgatctgctaattcctgatagggggaggcggtccgatcggaagcttttttagcttctttgcaggctcctagaaggaggagggtagctaataagaaagttattcttctcatattttctctatatttaatggtttattatatttctgttcaattctccgatcaatagagctttatcgaataagagaattccttcggaagcaacgacgatataccggctaccgactacgtatagggcagaaccgaacaaactggaatcgatggtttcaagcgttaccaatctaaggttttccccgaactcggaaagcgtgagagcaacggaatctattggctgattcaggtcggtgcgggtgactggatagccttgttctgttttcatcggttcggttgttagccgaagaggctacttggccgaaaatcttccggttgatagcctcttcaaattgattatttttacttcagccatttatccagccatgctttaaaggtccgctgccagagaatgccgtcctgacagccggttacccagtgacattcgttggggaaatagaggaattgagccggaactccgcgcatgcgtgcagcattgaaagccgccattccttgagatacgtcgatccggaaatctttctgcccatggatgactaaaataggagtatcccaattaccgacgaacaaatccggcgaattggcgaaggtacgctgagctattttgttatccttttcccagggagcaccacccatatcccagttggcgaaccacatttcctcggtcgtattgtattgcatttttaagtcgaaaatcccacagtgtgcaataaatgctttgaaacgtttatcgtgatggccggctaaataatataccgaatatcccccgtaagaggcccctacacatccgagccggttttcatcgatataaggttcttttttagcttcgtcgatagcggaaaggtaatccttgatgttctgaccggaataatccccgctgatttgttccagccattcctggccgaatcccggcagaccacggcggttgggagctacaataatataaccgttcgcagccatctgctggaagttccagcgataactccagaattgactgactgtactctgaggaccgccttcacaatacaggatggccggatatttccgattaggatcgaaatgcggaggatatatcatccataccaacatgtctttattatccgttgttttgatccaccgtttttctacttttcccatagtcaattggtccagaataggtttattgacaaatgataattcctcgtctttgcctgtagccggatccactttgtagatttcggccggtttactcatagacactttggtggcaagtaacatttttccggtcggaatcacggaagtataattgtggactccatcggtatgtttggtgattcttccggtcggaatatccagagagtaaatttcatcggtagcatgccagtcggagataaaccagatggtattatcgtctccccatttcaggccttctgcgttctggtcgaaaccttcgctgaaatcatttttttctccggtggtcagatccatgacatagagacggattttatccgcttcatagccttcccgttccatactttcccaagccatgtaccggccattgggagagatgaccggattcttgtcatatcccatcatgccttcggtcaggttgacagtttccccgttctccgtattataggcatacagatcggtattcgtagattcggcatagtcgataccgatctttttgcgacaggtataaattagttttttcccgtctttcgtccaggccaattgttctacacctccccagggacgcaccggagattcccaacgttcaccttccatgatgtcttttccggtagtaatcggttgtgccggcacgtaatcggctataaaaagatgggtgtaagcatctacccaatcgttccaatggcggtaaaattgatcgtcgacgatgcgggctttcgctttgggtagatcaggatacaggtcctgtaccgtgggttcgagctgtacatctttcagataaacgatcttagacatatcgggtgcatagacgtatccgttgattccgtccggtatatcggttacctggcggggattactgccgtcgggattcatttcccaaagctgccctttggccaggtaagtaatgaatttaccatccggtgtccatcccgcgtccgattcgttgtagtcggtatcggtgagacgggtggtctggccctccggcagattcatcaggtataaatcgctatacccccggtcttcttctttattgaaataagtaatatcgtatacggctttactaccgtccggcgatacgctaacgtttccgattcttccgaaagaccaaagtacttccggagtcatgacgtcggaggaaagttttattgcggggggagtataccctttttgattttgagaattgtcgtttggtacatgacaagccatacaagacaataaaataagtgatggaatgatcgattttttcatagttataaataatgaaatatacaaggaccgatcttgattttgtttataaagtcattgcacaccctacgcgcccttttttcagggctacagcggtcattcgttttcataacttttgtaacctctgtaacccttgtaacttctataactttagtaatccgaccggcacacacgcttaattgtctgtctcttcgtttgcagattccgctaattccggttcatctgttttaccattgaaggtggcgacaattttttgtttcagctcttcagccagttccggattgtccatgatcaattgtttcaccgtttcccgtccttggcccagtttgttttcaccatacgagaaccagctaccgctttttttgattacgttgcattctacccccagatcgacaatttctccggagagagagatgccttcaccgtacatgatgtcgaattctgctttccggaatggaggcgcaactttgtttttcacgactttcacccgggtatggttgcccagaatttcttcgccgtctttgatcgggccgattttacgaatatccaaacgtacggaagaatagaatttcagggcatttccaccggtcgtggtttcgggatttccgaacatcactccgattttatcccgcaactggttgataaaaatacaacaagtattggttttactgatcgtgctggtcagtttgcgtaatgcctgtgacatcaggcgggcctgtaagcccatgacactgtctcccatattaccttctatctcggctttaggggtcagagcagcgacagagtcgatcacgatgatatctatggctgccgagcggatcagctgatctgcaatttccagggcttgttcaccgttatccggctgtgaaataaacaaattttcgacgtctacacctaatttctccgcataagaacggtcgaaagcatgttcggcatcgatgattgccgctatacctccctgtttttgggcttcggcaatagcatgaatagctaatgtcgttttaccggaagattccggtccgtaaatttcgatgacccggcctttgggatatccaccaacacctaatgctttatcgagtgcaatggaacccgaaggaattaccggaatgttctctacctgattgtcgccaagcttcatgatacttccttttccgaagtttttttcaatcttgtcgagagtcagttggagcgctttcagtttttcaagattcgtttcttttaatgccataatatttgtttagttactgagtttctgagtttctaagtttctaagtttctgagtttctgagtttctaagtttctgagtttctgagtttctaagtttctaagtttctgagtttctaagttactgagtttctgagtttctgagttgaattttgattcatttctttaatatctgttctgctgcatttttggtatttaccttagtgatgactctttcgatgattccttgctcatcgatgataaaagtggtccgaaggacgcccatatattttcgtccgtacatggatttttcagcccatactccatagtcttctaagatttttttatccgtatcggctatcagattgaaagctaaattgtatttggcgatgaacttttggtgtgaaccggcggagtccgggctaatcccgaccacttcatatccttgtgcagtcagcgtgtcataattgtcgttcaggctgcaagcttcggccgtacatccggaagtgttatccttcggataaaaataaaggactaattttttacctttgaaatcttctgaggtgatttctttaccatcctggtttatgcctttgaaaaaaggcgctttatctccttcttttagcgatgtcatgatatcttgggattttaatgctatattacaaaagtagcgattttttgctgaattccgatattttttattcaataatgtgattctgttttagccatagaaatagaacaaatgttacggctactgaaataaattgcaagccagtacaatacgaaaaataatatggacccggaaaaagaagaaaaagaaggtttctatgtccgaagaagaactgtttttgacgagaaagctttatctttggaagatgaatgaaaaaccattttaaaacttatttaatctgtcatgatggagtttatcgattcttataatttaaccggacttgtgatcggaatcagtacttttttaatcataggcttgtttcatccggttgtaatcaaatgtgaatattatttcggaacgcgttgttggtggatattcctgattttcggtgttttaggcatcatttcgtctttgtatgtccggcaagtcttgtggtcgtctttattgggggttttcgccttttcttctttttggacgatcctggagatcttcgaacaaaaaggaagggtaaagaagggatggtttccgatgaatccgaaacggaaaaaggaatatgaatcatgaaaaaaataattcggtgtttttatggaagaggttttaaaacaattgaatgagctgtgccgggatacgctggttgacaatttgggtatggtatttactgcggccggggaaggatggctggaagccaggatgcctatcgaccggcgtacctgtcgtccggacggagctttacacggtggtgctaatatggctttggccgagacggtcggaggagctttgagttctatgtcggttccgcccgaaaaccgtttccacgtattcggtatcgaggtgaatggaaaccatatgaaacaggcacaaggaggatatgtcgtcgctaagggtacttttatccatcaggggaaacgtacccacgtcgttcaggtcgaaatacgggacgaatacggaacactggtaacggtcaaccgggtgacgaatatgattgtctgaggagtgatttgcacaatatgatttctttttacatccattaaaaaaacatggcataaaagttgataatttttttacgggaaaataaaaattagtgttccattaaaaacaatttaagtatgaaaagattatttattttcggggtatgcgtcctcgtggtgctgtgcatggcctcttgttatccggaaggaccggattatgtccatgaaaaggacattgctttgactcattatgatgaaaaagcggatttttctactttaaaaacattcgttattccggattctgtcgtgtatgttcagggagattctaatgcgacgggattggctaacgaattgaaggaggagatactttctctggtaaagcaaaatttcgaagcgtataattaccagctgctgacagacgaggaagctgaagctcagacgcctgattttgtcgtaacggtaactgcttttgcaactccgactttcagctacaattcctggggaaactattggggctggtatcccggttgggattggttcggctggggaggagtctggggtggttggtatccttggtatccctggtatagcggaggatattattatgcttatgacaaaggtacggtggttatcgatatgctggatgcgaaaaaggccgataaagaaaccaaacgggtaccggtattgtggacagggatggtcgatggtatcctggccggaaatcagaactatcttgccgaacgcctggagaaaaatatcaaccagtgttttattcaatccccttatctgaaaacgactaaataaagaaagcgatgaaaaagattataatgatactattggttgtgttcggcctgggtgttggaagccgggcacaggctcagatgctgaatctaaattatcagatgtccttacctttgggcgatcagcatgattttatctctaaaatgagttttcgtgggttttccatggattatcactatttcctgagcgagcgtctggcggtcggtgccagcctgggatggaatactttgtataagcatctggattatgcaaccggtcattttaccatgaacggggagaaagtgaccatctccggggaccagttcagatacctgaacgttgtacccctgatggccagtgtccgttatttttttacggatggagatgctgtcctgctaccatatgccggtatcggtatcggaaccaactgggctgaaatgcggctggaagtgggagacctgctggctaaagaaaaaggctggcagttcgcttttgcccctgaagtcggagtagtggtacctttctccgaatcggtcggattgaatgtgggggcacaataccgctacagtgtaaaagccagtggcttacccacgcttcaggatctcgggattaaagtcgggttatcttttaactggtaaataaatggttgtccataaagtcaagtactttaatggacaacctctctttttattccagcttatagtcccattgtttcaaggcataatcccaatgtttttcgactaattcgacggttcgggtttcgtatttataagcgtttttcttgtagccttttttcttgtctaaataagccgcaatgtctgctttggcggcttcaaaacccggaatggcaagtgtccggtaaatcttttcggtcatcgccagggcatccgcctcgaaatcttcgaattttatttcgatcagattacctgccgggatcagctttttatcttcttcatatttccgatacaaacgggtatatacttcgaggatgtttttttccagttcctccggagaaattttctgcaattgcaaagggatgatggtattcgtgaaaaaactccgggtagattcgaataccgtataaggattccgcatcaaatagataaatttggcattggggaacatttccaggatttctttcaccttgccggtatgcgggggattcttgctgagaaattggctgccctgggtattccagagggagattttaatcagtttcaggaatgtctccctgaacatccggtgttcttcgggagtagctgttttcatggtcagaaaccggtcacaatattccagcatattctgaggcaaaaaccagaaatcataataggagcaaggcatcatattggataaggcaaactcttcctcctgaggcaagtcgacgttgagctccatgttatcggtagggcgtttgtccggcattaaccacgccatcgttttcttaaacatcggctgtccccacatcatcatatggggaaaaacggtttgataggtcgtcgtataaccgaaatgtttatcatgagccaatacattgtgaacaaaggtggtaccactacgccagtgccctagaataaaaaccggctccatgttgatcgcctgatctttcaggcgtttgtcgtatctccggtcctgtatcggtttcaggcaactcaataaccgacagatggctttggtcaattgatatttcgttttatatcctttcccgatcgtttgtccttgtgtgattcctttaaaagttttccagtctgcacccaccaaagtatttaccggaagtttttgaaattctagtacacccatttcgataaaatatatgctcttttatatcgcctaactgatttatttattgaattattttcaccgtaatcccttgacggtcgagttccttgaccactttttcgatggctgtaaagtgttcgctgccgatgtccagtttcgaaagactgatttccggaatttccagttcctgcatgtctttcatttctactttgtcgataatcataccgactgcacaggtattgttggtaatcggatcgatcaggataaaagcgcctgtatttttgtttttagaataaggatcgaaaaataagggtttacccgtcgtgaaaatgacacgtgcaatttcattcaattccaaggcgtctgcggcagactgttctaacgtattgacgtttactttataccggattttatcgatcttggcccgggtcagattcgtagtatgtttaataaagaattgttcttccggatccattttcttctcatccatccataccagcatggcttcgaaattgcgggaaataatcgggagattgtccggatgtacgagcatttctccccgggagatatcgatttcgtcttcgagggtcaccgttatggcctgcggcggaaaagcgaaatccagttctccgtcgtaagtgacgatcgatttgacccgtgaacgcttcatagaaggcagtgcgaccacttcatctcctttacgaatgatacctgaagcaaccgtactgctgaatccccggaagtcgaggttgggacgcatgacatattgtacgggataacggagatctgcaaagtttttatcgcttcctatatgtaccgtttccagatattccagtaatggttttccggtataccacgacatattctccgatgcttctacgacattgtctccttttaatgccgagagtgggatacaggtaatgtcgggtattcccaggggttctgcaaactgacggtattccgttacgatccggtcgaatacctgccggtcgtatccaacgaggtccattttattcacagccagaacaacatgtttgattcccagcaaggaaactaaataagtgtgccggcgtgtttgggtgataacgcctgagcgggcgtctaccagaatgatggccagattggccgtcgaacctcctgtaatcatgttacgggtatactgttcgtgtcccggcgtgtcggcaatgatgaatttccgcttgttcgtagaaaaataacggtaagccacgtctatcgttataccttgttcacgttcagccttcaggccgtcgagcaggagggcataatcgatatcgtctcctgcattaccgtaacgtttggtatccctttcgagggcatccagctgatcttcgtataattttttactgtcgaaaagcaaacgaccgatcagggtcgatttgccgtcatctaccgatccggctgtcaataatctcaacagatctttcttttcgtcctgatccaggaactcttttatatttagtttctccatgattttaatctttatcgcttttcgccttaaaagtatccctctcttttcttttgttccatactggcatcctggtcgaaatcgattacccgggtggtccgttcggatttggtggtggtcatcatttcttctacgattttttcaatcgtgtcggcttccgattcgacagctccggtcaatggccagcatcctaaggtacggaaacgtactttccgcatccggatcttatcccggtattgttccggtaagcgttcgtcgtcgggcatgatcaggttaccgtcgatttcgacgatgggacgttctttggcaaaatacaaaggtacgataggaatattttccatgcggatgtattgccagatatccaattccgtccaattagacagcgggaatacccggatcgattcgcctttatgaacccgggcattgtataaattccataattcaggacgctggtttttaggatcccattgatgaaatttatcccggaaggaataaatacgttctttggcccgtgatttctcttcatcgcggcgtgcaccaccgaaagcggcatcgaacttgtatttactgagcgcctgcaataaagcctgggtcttcatcagatcggtgtgtactttactaccgtgtgtgaaaggacctaccccttcctggaaacctttcatattggattcgacgatcaggtcccagttgttttcccgggcatatttatcgcgaaattcgatcatttctttgaatttccacttcgaatcgatatgcatcaaggggaaaggtactttccccggataaaaagctttttcagctaaacggaccatgacggaagagtctttaccgatagaatagagcataaccggattttcaaactcagcgacaacctcacggataatatggatagactcggcttccagttctttcaaatgacttaatttatattctgacattgttttatgtgctaatgctaataggcggatttactccagccgttggcaaagtttattcattttgcaaaaatagtcgtatcctgattcaaaagcatcagtatttttaccgaaattcatttccggttattttcggagaaacggcttccaataaaactttcaccgaatcggctaaggattgccgtgaggtgtcgatcgaaataaacggatgttccggggcttcgaaaggcgatgaaataccggtgaattccttgatttcaccccgacgagccttggcatacaaacctttgacatcccgtcgctcacattcttcgatgggcgtactgacatatacttccagaaaatcatcctcaccgataatttcagaagccatccggcggatagcatgggtaggactgataaaagcagcgatggtcacgataccgcaatcgacgaataatttggaaacttctgctatgcgacgaatattttccgttcggtcggcttccgaaaaacccaggttattattgatgccactgcggatattgtctccatccaggatacggcagagtataccttgtttatataattccctttccagggcaatggctaatgtgcttttaccggaaccggacaatccggtaaaccagatcataatgcctttttgtttcaataaagcttcgcggtctttccgctgtaacattttttcaaaaatcggataaatattttctgccatataaacttagttactgatttacaccacaatttcagtatttcatatttcctgtttgttttattttacaataaaccagggatttaataaatcttctttgttgtaggccaagggagtgcacccatcctggtgatataattctttcccggcagcctttgcgatagcatgacctgcagcggtatcccattccatggtcggagcaaaacgggggtaaatgtcagcagttccttctgctaccaggcatattttaatcgaactaccgatagaagtcagtttgacttctccgtgttctttttttaattcatcgataaaattctctgtatcggaactcatgtgcgatcttgaagccacaacggtataaaccggatcttcgcggtccagaggcagacgccgggcttgattttccagtgcgtcgaaatccatatccggggaatattccggatgatcggcccgataagctccgtttcggatcgttccgtagtacaggattttttttaccggaatataaattacccctaaggcaggacgtccgccgtaaacgagagctatattgacagtgaactcgccgttccgtttgataaattcttttgtaccgtccaaagggtcgacgatccataccgtttgccattgtttacgaatagcataggctgtggccttgttttcttcgctgataaccggataaggcgtatttttcaactgtttcaggataatctcgttggatacccggtcggcaatagtcagcggagaatgatccgctttgtgttcgatttcgaaatccgaagccggatcgtcgtatatgtctaatatagccttaccagcttgcaacgctgctgttatagccgtctgtagtaatgaattcatagtattttctgcatgcctggcaaaggtatcaaatttttttatatttgcagtatttgccggatattatctggtccggccgttccgtcccgtttcgggaatcgttattttaatttttcctgtctattctttatttcccggttatggtatttcaataagaaatagttatctttgtgtgcttttgatcacgtgaaaataaattattatattaaagcatgactatagttttctatcagaaagacgccacggtatatgccgtacagtatcagacgtctgaaaattctcttgatgtcagtaaattagaatggttgttcagtggtgcgcacaaaatacaaggtgatgccctgaaaggttattttatcggtcctcgcagggaaatgattacgccgtggagtacgaatgcagtcgagattacgcagaatatggggatcggggggattctccggatagaggaatttacacagacggcttgtgacaatataccttacgacccgatgttgcaggcattttataaaggtttggaccaacatatctttacaatcgataaacaaccggatccgatcatttacatcgatgatattcgtgcctataatgtgaaggaaggattggctttgaatcccgatgaaattgcttatctggaaggattggctgaaaaattaggacggaaattgaccgattccgaagtattcggtttttcgcaggtcaattcggaacactgccgtcataaaatttttaacggtacctttattatcgacggagaagagaaagaaagtacactctttaaactgattaagaaaacttctcaggaaaatccgaatcggattgtttccgcttataaagacaattgtgcgtttatcgatgggccgcaggcggtgcaattcgctccgcatacccatgataagccggatgtttatgagacgagagaaatagatacggtcatttcgctgaaagccgaaacgcacaatttcccgacaaccgtagagcccttcaatggagcggcaacaggtagcggtggagaaattcgtgaccgtattgccggagggcaagcagcccttccgttggccggtacagctgtgtatatgacctcttatccccgtttggatgcttcccggatttgggaacagcatatcgatcccagaaaatggctttaccagactccggaggatattttgatcaaagcttccaatggtgcttctgattttggaaataagttcggtcagccgttgatctgtggctccttattgactttcgaacacgaagaagacggacgtacctatgggtatgataaagtgattatgcaggccggtggtgtgggcttcggtaatcgtcagcaagccatgaagaaaacacctggagtaggagataaagtggtgttgttgggaggtgacaattatcggatcggtatgggaggtggtgccgtttcttctgtcgataccggggtttatgccggggctatcgagttgaacgcggtacaacggtctaatcctgaaatgcagaaacgggtttgtaatgcgatccgggcaatggccgagagcgaagtgaatccgattgtttctatccacgatcacggtgccggaggacatttgaattgtttatccgagctggtggaagaaaccggaggtaaaatacatatggaaaatctccctgtcggcgatccgaccttatctgcaaaagaaatcgtggggaatgaatcacaggaacggatgggattggtgatgaaggagaaggatgtggccgaactgaaacgtatcgcagaccgtgaacgggctccgatgtacgtcatcggtgaaaccaccggagatatgaagtttacttttgagaatgcaaaaactcatgagactccgatcgatctggaactgaaagatatgttcggtaatcctcctaagacgattatggaggataagaccgttaaagaaaaatatgccggtctggaatactccgccgataaattggaagaatatttggagcaagtgttacaaatagaggcggttgcttctaaggattggttgacgaataaggtagaccgttcagtatcgggccgtatcgtgcgtcagcagtgtgtcggtcctttgcatttgcctttgagcgatgttgctgccgtctctttggattatagcggacaccgtgggatagcaacctccatcggacatgctcctgtagctgccatggccgatgctcctgcgggttcacgtttggctattgccgaagcgctgactaatctggtatgggcgccgatcgaacagggattgaaaggaatctcactttctgccaactggatgtggccctgccgcaatgaaggagaagatgcccggttgtatcaggcggtacaggctgccagcgactttgctatcgagttgggagtaaacattcctaccgggaaagactcactttctatgacccagaaatatggggacaaaaaagtgtatgctccgggaacggttatcatttctactgtcggcgaagtaaccgatttccgtaaaattgtcattcctgtattgaaaaatgatccggctaccgagatcgtctatgtcgatttctcattcgataaattgaaattgggtggttccagctttgcccagattctgaataaagtaggcaaagaagtgcccgacgttagggatagcgagtattttgcccgtgcatttacagctattcagcaattggtggatgaaggtatcgttttggccggacatgatatttctgccggaggtatggtaacggcactgctcgaaatgtgttttgcagataatcgtttgggtttggatatcgatttttcattcctggctgaaaaagatatgattaagatcttattcgctgaaaatcccggcgtactgattcagatagcggataaggatgctaaaaaggtttccgctctgatggataaagccggtgttgcttacgctttcttaggaaagccgggtaaggcgggattactgaacatcaagaaggatgcggatagctggtcgttggatatcccttctttacgtgatctttggtttaagacttcttatttactcgaccggcgtcagagtggcgaagagaaggcattggagagatacaagagctataaacacaatgagttgaaatataaattcccacaaggttttaccggcaaattggctgatttgggcttgcagttgaaccgtactgctaaatcgggtatccgggctgctgtgatccgggagaaagggtgccagtgtgagcgtgaaacggcctgggctttgcatttggccggttttgacgtgaaggatgtacacatgaccgatttgatcagcggacgtgaaactctcgaagaggtaaatatgattgtctttgtcggaggattctcgaattctgacgtgttgggttctgccaaggggtgggccggcgctttcaaattcaatgaaaaagcacgacaggctttggagaatttctataaacgcgaagacaccttgagtttgggtatttgtaacggatgccagttggctgttgaactgggacttatttatcccgagcatgctgaaatgcctaagatgttgcataatgactcccataagtttgaatccggttttgtcaatgtaacgattcagccgaatcattctgtaatgttaaagtctttggcaggtagtcggttaggtatctggatcgctcatggagaaggtaaattcagtttgccttatgccgagagtgaataccatattccgatcaaatacagttacgatgcctatccgggtaatccgaacggttcaccgttcgctacagcggcgatctgtagtaaagatggccgtcacctggcgatgatgcctcacttggaacggtctatctatccatggaattgggcatattatgctgaaggacgcagtgaggatgaagtgagtccgtggatcgaggcttttgtcaatgcccggaaatggatagaggaaaaagtgaaggcataagctgaatgtagtaagatcgtgttcataaacgacgaagattatatcgatttataacaggaaggttcgatcgccttcctgttttttttacttggacgagatgtcggaaaaaaggtgatggataaagagtaccgaattatgaaaacgatctacagatatgcagcaggaccgggagaggagattcgggaaacagtgcggtaaactgatttgtatgaatactacaaaatggtaaatgccttcctgggggatgtgattatcgaaaaagcttttcaaaaagaagggaactttggaggggagaggttatacatgtcggatcactcgctattatcggcagtctggaaaatgaacgtattcagatcagataaggaagaagtatcaacggttgcaagagttggccttggtcagtctgatcgttgtcactcttgtaaccgttgaatttttaaatttacattgtcgttccgataatcccctttttagattgttcgataaaatctaccaggtaagtgatttccggactgagaggaataatatctttgattcttcgcagggcattttccagactggtaccgcattgataaatttgccggtaacatttagctatattatcgatcacattttcggtgagatggccttctttagccaggatcaaagcattgattccatagtaactgatcggattgtgggccgccacgatataaggcggaacatctttgttggcgcggcagccgtcacgcaatagtgcccagcttccgatacggcaaccgtgtttgacgatcacttcactacctaaaatcgccttgtcgtcgataatacagtttcctgctgttttggcaccgtttcccaatacacaatggctgcctaaatgggtgtcgtgtgccagatgtacgccttccagcagaaagttaccgtctccgattatcgtacaatcggttgtgttcgtgccccggttaaggatcactttctcccgtatggtattgtgattaccgattttcaggagggtatcctcacccttgaatttaaaatcctgaggagtagcaccgatgatggcaccctgatagatgatattatccgttcccatacgggtgccactgagaatactggcataaggcatgatcgtacaattgtctccgatttcgacattcttgtcgatataggcaaaaggatgaatggtaacattcgctccgatccgggcttctttatctacatacgctaaaggactgatcatattttttgtttttaaggttagtgtcgttatttagtgcctccacccaatgcatggtataggtttactacggcctgcaaacgctggaactcatcggaaattccggacaactgagcgtttaacagcgattgttgtgctgtcagtacttccaggtaattcgtattagaggtacctaaagttagtaattcctgtgtatactccaccgatttttccaatgaatttatttgtttcacccgttgtatccgtttatcttcagccgattgatacagactcagtgcatcgctgacatcggcgcctgcattcaatatcgcttgttcgaaacttaacatcgcctctgcttgctgggctttggcaatctttaagcgggcaatattcgctccccggtaaaataaaggttgggtcagtgaaccgatagccgaggcaatcatttttccgggattgatgatcgtgttcccggcttgattggtccatccataagtcccgctgatggagatcgacggatagaaagcagcacgtgcttcgttggcattataatatgttcctgctaatgccatttctgccgctttgacgtccggacggttggataacaattgtaccgggacgccggtatgcagtattgtcgggagttgttggtcctccagcttgccgcgttcgattttctgaggagcttgtcgcaacagtaaggataaggcattctcggtttcccggatctgatttttcaggtcggagatagaagccagcaccatataataattggcttcgctttgtacaactcctgcttcattgaccatcgccgcctctttcatcgctttcatggtctcgacattttctccccataatacggcagtttcttctgtgatctgcaactgcttgtcgagcatcagtaaggtgtaataataattggctattgcagcgacaacctgggtttgcacagcttgtcgataggcttcactccgtaataaggctgctttcgccgcccgttttgtatttagaatctttccgaaaagatccaattcccaacttgctgaaacgggcagggaccagctccaactgcctttcatccggtcgaaactactcactccgccttggggggcaagggtaagagaaggaaggtaggataaacgcgaagtcatcaggctggcttgagcttcttttacctgcaacatagcggtttgtaagtctgtatttctttcgagacccaagcggatcaacacttgtaattgaggatcggtgaaaaccttctcccagggtagattggccatattgacggtatcggataccagggtatcgttcaccgaaacaggatccctgtacaagccttgcgtatctacttcgggacggctgtatggtttgtatatatggcagctgcccagtagagctgccatacataaaggatatataatcgtttgtattttcatggtatttcttatttcgtatattgttcaatttcagaggcgatatccgtattatccgtatcatgccattccagcggtttgactttttcctggatatgttcgaaaacaacaaacaaagccggaacaataaagatctgacagatcattccgataaacataccaccgatcgctccggttcccaaagtgctgttaccgttggctccgactccatgagcgaacatcagcggcagcaatccgatgaccatagccagggaggtcattaagatagggcgtaaccgggcagaagctcccgatacggctgcttcggtaatgctcataccggttttccggcggtctaaggcgaattcagtaatcaatatcgcatttttagccaacagaccgatcaacataatcaaagcgatttgcatataaatgttgttttctactcccatgatctgagcgaaaataaaactacccatcaatccggaggggacggaaagcagtacgaccagaggcagaatataactttcatactgtgcactcagcaacaaatagacgaatacgaaacacagtgcgaatatcatcgctgtcgtactcccgctactactttgttcttcccgggtcattccggaaaattcgaatccataccctgttggcaaggattgggcggcaacttcttcgatagctttaatcgcctgtccggaactatagccgtcagccggcgaaccgttcacactcatggaggtaaacatattgaaacgcttgatgttgtcgggaccgtatacttttgtcagcgtcataaattgactgatcggtgccatttcgtttccgttccggattttgacgttttgcagagattccggattgatccgataacggggatctgcctgaatcattacccggtataatttaccgaaacggttgaaattggatgcatatataccgccgtaatagccttgcaaagtagttaggatatcgttgggactgataccggcctgcttacatttggctgcatctatatcgatcatatactgagggaaagtggggttgaaagacgtttgagccgtagcgatttcaggccgttctttcaattttcccagaaattcctgagcaacttcatagaaagtattcaaatctccaccggttttatcctgtaagttgaactcgaaaccgttggtgacactgtagccggggatcatcggaggggcgaataacaatactcgggcatctttgatcagagattgagcctgcatatatagggtaccgattaccgtattggcatcttcccctttaccccgttctttccagtctttcaattttatgatcagcgtcccgtatgagttaccttgtcctgccaggaagctgtaaccggttacctgggtcctgctcttcactgccggattggctgccaccaaactgtctacctgttccataacggcttcggttctctcctgggcggtacccggtgccatatcgactacggcgaaaatggttccggtatcttcattgggaaccaatccggtaggagtgatgttcatcaggaagatcataacgacgatagtcgctataacgatggcaaatgataaaaatttacgacggataaagaatgtgattcctcgttcgtactttttcagggtaacatcataagcggcattgaatgcgatgtggaaacgttcgatcagagaagtctttttcttctctccgtttttatcgtggggatgtaaaaatatagcacacaatgcaggacttaacgttaaggcattgattgccgataggccgatagcaatagccatcgtgagcccgaactgccggtagaaagttcctgaggttcctgtcataaaacttaccggaataaatacagacatcatgaccagggtgatggatacaatggctccccccagttcgctcatcgcatcgatagaagccagacgggccgatttatacccttggtcgagcttggcatgaaccccctcgacgacgacaatggcatcgtcgacaacaatggcaatggccaataccatggcacataaggttagcagattgacactgaaaccgatcaggtacagaccgaagaaagtaccgatcagcgcaacagggattgctatggccgggatcaaggtggaacgaaaatcctgcaagaagatatataccactaaaaataccagtacaaatgcttcgagcaaggttttcaatacttcgtggatagaagcgaacaagaagtcgttggcattcaacaattctacgactttgactccgggaggtaaggtcggttccacttttttaaggtattcctgaatgtcctggatgatggtcgtagcattggatcctgccgtttggaaaatgattgcggttactcccggatgtccgttgacattgttctggaaaccataagtcaaccggcctaattcgactgttgcaatatctttcaaacgcaaaatttctccgtcggaggtagcccggataacgatattttcaaattcttcctgcgtttgtaaacgccccttgtatttcatgacatattgaaaggactgattaccccgttctccgaattgtcccggagcagcttcgatgttttgttctgctaaagcaaccgatacatcactgggcatcagtttgtattgggccataacatccggtttcaaccagatacgcatcgaatagtcggttcccatcaccatggcgtctccaaccccctgaatacgtttaatttcagggataatgttgatgttcatgtagttctccagaaattcgttatcgtatttatcgtcggaactatagaaagaaaaacctagcagcatactggattgccgtttttgggtgatgactcctacctgggtgacttcggcgggaaggaatccctgggctttagctacccggttttgcacatttactgcagccatatcggggtcggtaccctgcttaaaataaacttctatgctggcttctccggtattggtcgctgtggaactcatatacatcatgtcctccacaccgttgatttgctcttccagcggagcgataacactgttcagaatagtctgtgcattggccccggtataggttgtggtgacccggatggttggaggggcgatatccggatactgcgatacaggtaaggatacaagtcctaatatacccaatataacgacgacaatggaaattaccgttgaaagtaccggacggttaataaatcgatctaatttcattttcttaagctttaaagcagattatttattcacaggttgggtggcagctttgattttggcagctgcagcctcaggagtgatcggttggatctgggtgccgtcccggagcgttcctactccttcgataacgattctgtctcccggatttaatcccgaagtaacgacgaaatttttaccgtcatccaatttgaatacttcgacttcagtattttttaccttcgagtcggcatctacgacaaacacaaaacgtttatcctgaagttcgtaggtggctttttgaggtaccaccaacacattctgaagttgggaaggaatgataacggaaccggtgcctccgcttctcaatagacgttgagggttgctgaaggtggcacgtacgcttaccgatccggttgtttggtcgattacttcactgatcgtctcgatttttccttgctgggaataaggacggccgtctgcggtggttaaagataccggaggcattttttccaaaatcttactggaagtgctgtcctgacggatcaggtcgagtaattgtttttcagtcatagaaaaataagcatacatttctgaaatatcggaaaccgttgtgagcggagtcgtcatactcggactgaccagggaaccgacccggaaaggtacttttcccatgactccgttgacgggacttgtgacttgcgtataggagagatttttttcggcgttggtcagctgtgccttcgcctgagccagggcagcctcgctggaagccagcgcattctctgctgtctgaagatcgaatttactgataatattcttttgttcgagttgccgcttgtttttggccgtcaattctgcggtcgcaacattggctttagctacttctacagcagcttttgctacgttgacagcttcttcgtattgaacaggatcgataacaaataaggtttggcctttttggacactcgagccttcgtctacacatagtttcgtaataaaaccacttacattcggacggatctcgacatcctggcgtcctttgaaagttgccggataagcagaggtcaattttaccgtttcgggctgtaaagtgattactgcaaattcgggaaccgtttgttgtcttccctgattttttcctccacatgcgacacacattgcactcaaggcaatgatgaataagttgtgcattcgagtcattttcaatttttcaattttcatattgcgtattattataaatttatttttgcactctttcctttatacataattcgtgctaattcttttaaatatttccgggtattaagaatatttgataaaaattggatttgagaaatgtaagaaatgttaagataacgtttgagagatgtaaaatgccccatctttaaagaaaataaaatgactgatcgggtataagtatcactcataaatgggtatgattactaatgaaggacaaagataacagatatttttatttttcgtaaataatgtaataaatagatgacaggaggttgttttaattttaaaatgaagagatatggcttttaaaattgcattttttgatacaaaaccttatgacagggcttcgtttgatgaggtgaatgaaaaatatggttttgagattctgtaccacaaagggcagttgaaccggaataatgtggtcttgacccaaggaatggatgcgatctgtatttttgtgcatgacacggcggataccgcaattattgagcaaatggccggttacggggtcaaactgatcgctttaagggctgccggatataataatgtagatttggctgctgctaaagataaattgaaagtggttcgggtacctgcttactctccttatgcagttgccgaacatgctgttgcactgatgttggctttgaaccggaaaattcatcgggcttattggcgtacccgggatggtaatttcgctttacatggcctgatgggattcgatatgaatgggaaaacagccggaattatcgggactgggaagattgcacggattctgatccggattttgcaggggttcggtatgaaagtagtggcttatgatctttatccggatgaaaaatatgcccgggaggtcgggatctcttatgtttcattggatggtctgtatgcacaagcagacatgatttctttgcatgttcccctgactgatcagaccaaaaacatgatcgacgcacagtctatcgctaaaatgaaagaaggcacgataatcataaatacgagtcggggacaattgatccataccaatgccttgatcgaagggttgaaaagtaaaaaaatagcagctgccggattggatgtttatgaagaagaagaggggtatttttatgaagatcaatcggataaaattatcgatgatgatgtcctggcccgtttactctcgttcaataatgtcatcgttacctcacatcagggattttttacccgggaagcaatgcacaatattgcagagactaccttgcaaaatatacaggattttatcgatggaaagacattggtaaatgaagtttcctaaaaataacctggatgtttaaaattaaaaatttgcaatttatatatacttttgtcacagattttataaactgaaatttatcgtaccgataaatttaaaccgatggattcagaagaaatttataagcaggctattttattccggcgttggttgcaccggcatcccgaagtttctacccaggaatttcagacgcaagcttttgtcatcgacgtactgaaggaatataaaataccttataaaacttacgggacaggaattatagccactttgggtgaaggagccgattgtgtcgctttacgggctgacatggatgcgctgcgggtacaggaagataccggattaccttattgttcggagactcccgggctgatgcacgcttgtggacatgatatgcatactgctatgttattgggggcggctattattttaaaaagtaaagaggcagagttgggtgggaccctgaaacttgtttttcaaccgagtgaagaaaaacgtcccggaggagcaagattattattgcctcatttgctggaacctcccgtaccgaaagccatattcggtcagcatgtatttcccggattaccggttggacagatcggtatacgtccgggagccttttttgcttcttccgataatattatttttgcagtggaaggaaaagggacacatgcggccatgcctcagctggggtccgatcctattttggcagctacggccctgatccagttttatcagactattattactaagttccgtaatcctctcatcccggcagtgctttcgattacttctattcatgggggaacagccaataatgtgataccggatcgggtagaggtgatgggcacggtgcgtacacatgataatgcgttgaggcaccggatttttgaattgatcgatgagaaatctccggctatttgtgatttatacggttgtcgttttgtacccgatatgccttggaatggattacctccgttggtcaatgatccggtattgacaaaggaagtgaagaagctggcggcaggcttgccgcaagtgcggcagatcgtcgaatcggaacccttgactttaggggaagactttgctatttatttgcaggaattgccgggtgttttctggactttgggggtgcggccaccggaagcagaggaaatgtgtcctttgcataatccgggaatggcacccgacgagcgggctatacgggtcggaatcgatatgctggttgcgacgggcttgcgttttttgaaaaaaggatagccgtacaaggacctgttttaaaggtccttgatttttatgatattgtaggaaatatctttgtcgtagacatccgtttggtcgatctttttgatgtattttactacccggatcgtgaccggaagtatgatcacttcatagagggatttcaaaagagcttgtgtggctatcataaccagtaaagcttgaacaggaatcagtcctccgaaagcgagtggaaagaagagcagtgagtcggcactctccccggcaatcgtggataaaatagccctgagagaaaaatatttcccctgggtagctaccttcattttgctcatgatataggcattgagaaacgatccgagtagaaaagccaacagactggcaatagctatccgtggggccagaccgaatatgaaattgaaactttcttctccctcccaaaaaggtgctgcaggcaaagtaatagccagacgcgcaaaaccgatggttagaaaattcatggcgaaaccactccagataatgagcctggcttttttgaatccccaaacctcagcgatacagtcgttgataatataagaaatcggaaatacaatcaaccctgcagtagccgtaatgggacccaattgaattactttggtttccagtagattggaagctactaaacatacattgaataaaatccccaataacatgaaggggagagatactgttttttgcataattcttgttttttacgtggttgagcaagcacacgcggtaaagtattaccggatataagatcgatcagaaccggtaatcgacacacgccctgtccactttgaccggtgcgattaaagttttgacgatttcctgatgggccgggtggttggcatatacctccagagcgtgaagatcggctactactgcttccagactgaaatcccatttttcttccgggttgacattgatacctacctgcatttcttttaattcaggaatcacttgtaccaaagcttccagacggtctctgatttcctgtaaccggacgtttttatgctcactttcttccaatttgaaaagtacgatgtgtttaatcatggcatttaaatttgttggtcaaagattgagacaccgggaggcaaacataaattttgccttcggggcatatcttaccggcgtaaagatagtgaaaaaccttaaaaagagaatagaaaccggaagcgttttacagggaaccgatgaatcgaaaaatttttactgaaaaaatgtattttgtgtgttaaattcttgttaaattgaaaataattttctaactttaggacaagaaaataatttagtcatctcttaataataaaagtcatgagaacgcgaggtaaccaattattgatccagattctgttaatgattatcattactgtaatcgtagcctacacttgtatgaatttggccgaattagtgaatatgtattccgaagcgatcggaaaggcaattactcaaatcaatgcgggattctgattaaggtgtaattctagttattcgggtcttttgaaagcagtgaaataactgaaagggaaattatggctcttctctaaaactttgtccttgttttttcgttaaagtttcctatatttgaatttattttagatttcgagctatgctgaaaaagattttatccagtaccattattaaattggtgttggctgttattgccggtattttattaggttttgtcgtaggggaagggtttatgaatgtcgttgtcaccctgaaatatattttgggacagcttattttctttatggtacccttgattattctggcttttatatcttcttctatcgcaaaaatgaaagggaatgcttcacggatgctgggatgggcattaggattggcttatctttcgtctgtcggagctgcttttatggccatgtttttaggctattggctgatcccgttactgactattagtccggctaccgaggggttgaaagaaattccggaactggtttttaaactggatattcctccggtgatgagtgtgatgacggctttggtggtggccattatggttggcttggctactgtttggacaaaatctcagatatttgagactattttggacaatttccaaaaaatggtattactgctgatcaatcggattctgattccgattttgcctttttttattgctgcaaatttttgtgccttgagttatgagggatctatcacccgtcaattgccggtctttctgaatgtaatgggaatcgttttgaccgcgcattttatttggttgttctttttatatctgtctgcgggtgtgttttccgggaaaaatccctggcaggtggtacggtattatggtccggcttatctgacagcagtgggaacgatgtcatcggcggctactttaccggttgcgcttaaatctgccaaaaaaagtcctgtactcaaaggagaagtggtcgattttgccgttcctttgtttgctaacattcatttatgtggttctatattgaccgaagtgttctttgtcatgacggtatcgttgattctctacggggctttgccggctatgtctacgatggtgcttttcatcgttctgctgggagtttttgctatcggagctccgggagtacctgggggaacggttattgcttctctgggcatcgttatttccgtattagggtttgacgaaaccggaaccgctctgttgttgactatttttgctttgcaggatagcttcgggacagcttgtaatgtgaccggcgatggggctttgacgcttattttatctaaattggataaataattatcatttatgaataatacaattgtcggaatgggagaggtcctgtgggatatgctcccggaaggtaaacaactaggcggagctccggctaattttgcttaccatgcttctcagttcgggttcgatagccgggttattagtgctgtcggggatgatcggctgggagacgagatcctggaaagttttgacgataaacaattgaaatatttcattcaacgggttccctatccgacggggacggtacaggtacaaccggatgagaacggaattccgggttacgagataaaggaaaaagtggcctgggacaatattccctttactcccggattagaaacgctggcacgccaatcccgggcgatttgtttcggatcgttagcacagcgtgacgaagtgtcgcgtgcggcaattaaccgttttctcgatgcgatgcctgaggaaaattcctataagatcttcgatatcaatctccgtcagggtttttattctcaggaagtgctttgtagatcgttcgagcggtgtaatattctgaaattgaacgatgaggaattgataacgattagccggatgttcggatatccggggatcgatctcgaagataaatgctggatattgcttgggaaatataacctgaaaatgttaattcttacctgcgggatcaacggaagttacgtctttagccccggtgcagtttcatttgtagagactcctaaagttaaggtggccgataccgtcggagcaggagattcttttacggcagctttttgttcggctattctgaaagaacgttctgtacacgaagcccatcaattggcggtagaggtttctgcctatgtgtgtacccgacacggtgctatgcccgaattaccctctgaattgaaaaacaggttggtataaaatcggtgatccctttgtctaaaagggggaagtggtttgtaagctgaatggttgccgaacgatgaggatcggtacagttagggggaacggtgggtatattttgtgtcgttttctgattggattgagatattaatttttatttttgtgtttcgttttaaataggatgatcggtataagaaagttatacggaagatcatcggttaggatttaagtaatttatagtgaatttataatgaacacaaaattttattttccaattttagctctggctttaagtgtagccgcttgtaacgacaagaaagcagctacccaaaccggagggattgatgttgctaatctggatagatcggtaactcctaatcaggatttctatcaattcgcctgtggtggatggatgcaggcacaccctttgaccgatgagtatggacggttcggctctttcgatctgctggctgagaataaccggaagcagatgcaagggttgatcgaagaactggcagctaagaagtccgaaccgggaagtgttgcccggaaaatcggtgatttgtataatatggctatggataccgtcaagctcaatggagacggaagtactcctatccagccggtattggaaaaaataaaggctgtaaaaactccgaaggaaatggtgactttggtggctgaaatgacccgtcaaggttttggaccttattttggtatttatatcggtccggacgatatgaacagcagcatgaatctggtgcagacctatcagggaggtctggggctgggtgatcgggattattacctgaaggaagatgagcacagtaaagagatccgtaccaagtatcaggaacacatcgtgaagatgttcgagttggccggttgggaagaaaaagaagcccggcaggctgctgccgacgttatggctatagaaacccgattggccgaagctgcctatgaaaaagtaaaaatgcgggatcctcatgccaattatcataaaatgtcggtagaagaattaaaaaaagaaattcccggaatagattgggaggtttatttcgctacattggggttgcaggggattacggaattgaatttgggccaacccgagcctgttaaagaggtggctcgtattttgaacaataccgacctgaaagcccagcaagcttatttggaatggaaagtgatcgatgcagccgctccctatttgagtgacgattttgttgcagaacattttgaatttaatggaaaggtactttcgggtgtgaaggaaatggaaccgcgctggaaaagagctgtcgctgctgtagacggggctatgggagaagctgtcggacagatgtatgtcgagaaatattttcctgctgctgccaaagaacggatggtgaaactggttggtaaccttcggaaagctttgggggaacgtattcaggaactgacttggatgagcgatgaaacaaaagccaaagcgttggaaaaattggcggccatatatgttaaagtcggctatccggatagctggagagattatgccgctttggaaattaaaaacgattcctattgggctaatattttacggtctaacgaatttgaattcgattatatgctgacgaaagccggcaagcctgtcgataagaccgaatggctgatgactcctcagactgtaaatgcctattacaatccgaccaccaatgaaatttgttttccggcaggtattttacagtatcctttcttcgatatgaatgctgacgatgcttttaattatggtgcgatcggagtggtcatcggacatgagatgacacacggattcgacgatcaggggcgtcagtacgataaagacggtaatttgaaagattggtggactgccgaggattcgaaaaattttgaagagagagctaaagtgttggtcgattggttcgatcggatagaggtcttgcccggacttcatgccaacggacagttgaccttgggtgaaaatattgcggaccatggcggattgcaagtgtctttccaggcatttcatcatgcaatgaaggatcagccgctagggattgtagagggttttacccccgaacagcgtttttatttggcttatgcaaatgtatgggcaggaaatatccgcgatgaacagattcgtttgttgactcagatggatgttcactctttaggacgttggagagtgaatgccgctctgccacatataaacggctggaatgaagctttcggtatacaggaaggagatccgatgtatctggcaccggaaaaacgggcttcgatctggtaaattgttgaccgctcatgcctaccaggaagtaatgcatatcgcaatcggatatatgaaaatgctggggaaactgttgaattatatcgttgggcttcggaaacagtgacagaatatgccccgtcgggacgtatgttttctgacaggtcctaacatggcagggaagtcgacttatatgaaaactttggggatggcggtttatttggcacatgtcggtctgccggtaccggcagaccgacatgaaaacggtagtttttcaggggttattttcaacgatcagtttcactattcgggctcctgatccgacaagctgatccggagccttttaggtcaggtatctgttggcagaggcattggcctgtagaggatataccagtataaaactattctgttggaaatatttgttcagataacccgggatacgattcatgctgggattaaaagagataccattgtggcggctcattacgatccataaattatcgtctttgtgaacatcccggaatacaatcagaaaatcttcccaatcgctgaattcggtaaattccatttcccctcctcgtttcccaagcaatgttttgaggcggccgagggtatccgaagaaccgtaaaatatggctttggccccggtattctgaataacgttccacacccgggcaacccattggggaaatccggcctctttttcggcttgaacagggatgactaccagatggcgcttcatggtagagaggggttgtgctggtttatatatcaacgtagtaacatcgctgtaatccaggataccttccgtgattcttcccaaaaaagaactgggtattcccttttctttgtgtagtcccaataccaggtcagtgatacggtgttcgaggatcacacttaatatggcgttcgttacattcaggtcatagcgttgcaattcctgaagatgggtatctgtcgctgctgccgttaaggctgcattttccagcagacgccgggatttcttcaattgctggtcgtctcctgaaactttattgtccagaatattcagcgcatataaatgatgagtattctttttcgatttagtagccaaactgagattcaccaattcttctgccgtgtcttcgttactcagcgggattagaatacgttctttgtggtctcctgtttcatcggtttcggatgaagccgtggctgccagattatgagcccctctttgagcagagaaggaagccattgtacaggtaaccaggatcatcaggatcgtgccgttcaatacgctttcatttaagagacggattggttcgccttcgggggtttgaccgagaatgacgttatatcccaccatgacggcagccagcgttgctgcagcctgggcattactcagcccgaaaatgattcttcgctggtcgacggacatacggaaagttttttgagtcagccaagctgcagcatatttagctattgtggcgacaatgatcatgacaataccgactttaattgtatcgaagctggtgaaaaaagcccggtaatcgatcaacatacctactccgatcagaaagaaagggataaaaatcgagttaccgataaactctacccggtgcatcagcggagaactccggggaatcaaccggttgagggacagaccggccaggaatgaaccgataatcgattcgataccggctagttcggccagataagcacccagaaaaaccatgaccaaaacgaaaatatattgtgatatgctgtcctgtacatgcttgaaaaaccaacgtccggcaataggaaatgcgattactacaaataaaacgaatatgacgatcgatatactcaatcgggtccagaaatgttctccaatgacaccggttgccatgcctacgattactgttaaaacaagtaatgccagcatatcggtaatcatagtgcctccgacggttatcgtaaccgatttatctttcgtgattcctaatttactgataatcgggtaggcgattaaagtatgtgaagcgaacatactggccaataggatggaggtttccatagaaaaatgaagtacgtaaaggccggcaacgattcccaaagccatcggaatcaagaacgtatacataccgaaaacgaaactccggccactatttttcttaaaatcccccatgtcgatttccaggccggccaaaaatatgatgtacaacaaacctgctgtacccgatagaataatactactatcccgaagaaccaggttaaggccgttaggcccgataatcgcacccgctataatcaatcccaataaatgaggaattttcagtttgttgaggagcaaaggggctgataaaataattaccagtatcaataaaaatttcaataccggatcagtcaggggtagttcgtgggagataacaaaaggtaacaacatctctatgtgcgttttataataattaatatctatttctgttcgaaacttttctgtggtaacaaatatatgaaaatgcttactttaaaatagaa

SEQ ID NO: 6103 - DNA, 2097 bp, Unknown
  gut microbiota DNA sequence
tactttaaaatagaaatgatttattttaattttctgaaataatttagggaagtaggctattttttctattcgcctgataattactgagacgcgcactaaaatggtcggtcggtgtttagttacaagactacgatacctgaaattaactaataaaacttttgtaatctttcctgttttttataaaaaacaaaaatacaatgatttatgagtttttaagaaaaaatataaagatctttgtcttgaattcaagtagctatgaaaatgaagaaaaaatatggatttagctggggtatccctctgtttctgatagcaatgatcggtatattccgcatgataccgtcttgggccgaggcgtatgcctgcctgttttatccctttatttcgactttgctctctgctttttcttctttatttcctttttctgtgggcgattgttttatcgtcggtacttgtctgtggattttgatttatcctttttatgcctggcggaaaagaaaaggggcgaaaaaaacagtcgggacgatcatacgtgtcctgatgtgggtatatatttggttttattttgcctggggattgaattatttccgtttccctttttacgagcgtaccggtatagctaaagcagcattttcggcagaaaaatttcaggattttctaacgggatatgtcggcaaactgaacgagagttacagtaaggcaggagatacgctttcgggctggtatttggagcgatatacgacggccggcccgatgagtaaaattcctgttgccggagttatacaggaaggatatggaaagatggcttcccgtttcggtttagttgaacctggaaaatttttacgggtaaagccgatgttgtggagtcggttgatgtcccgggtggctgtgacaggatatatggggcctttctttactgaattcaatttgaatcaggagttattgagtgtcgagtatccttttacttatgctcatgagttggctcatcgtctcgggatcgccagtgaagccgaagccaatttatacgcctatctggttacttctgctgctcaggaacctgctattcgtttcagcggttatttctctatgctgggctatgtggtaaacaatgcccggagattacttacagaagagcagtaccaggaaattgtaaaacggatccgacctgaaatagtagaattgtataatagccatctattatattggcgtgaaaaatataatcccggtatgggacaaatacaacatcaagtgtacaatgcttacctgaaagggaatcaggtgagtagcggtactaaaaattattctgaggtaatcggattactgatgtccttgcaagaagatcgaatcgttttgtaatagttatttattttttatggacagcaaaagttgcctgccgattaactttttgttttcccgataaatttcagatttgatgatgcctattccttgggcataccaggtagaaattttataacgtgtcgttatacctaaacaagtggtctgtaggttagattcgattttataacaaataaaatctcctgctggtacttttatacgggtttgagccgttacaacccggttcttttgacttattcgggtttgcagactgctttgttggatggtcatatatccgtcttcgaggtgttgtccgacagagagtgaaccgggaagtaagaagcccgggccggtgaattggcaggtctcgtttttccggatgtgaataaaattgggcagataagtattcacatgcttttgtacacaggaagtggtaaatgaaaaagagggaatgaccacagttcgttttttatcccaaagggttcctgtatagtgaatgactgacagcgaatcagtgttttcgatcttttctgtcgtctgttggaaatagtacctctctgcctgttcactgtcgatttggtaaagaagttgtgttcctttgtcgacggaacagaaaggagctttatggtcggtgatccaggcagaacatgtgagatataaaatcgtaaagataaagaacatttgatctttcataaacggacgttttaattggaatacaataagttttgatagattttgattgatgtatacgtaatagattgaaaa

SEQ ID NO: 6104 - DNA, 4302 bp, Unknown
  gut microbiota DNA sequence
aaaaactacgatctattttttatacaggctttgctctataatcggataaaaataactagttttgttgtaatttttcacaatatagaaaatctttttgatagaataaacgataaaaatgaaatctgtcattcaactttaaacctaacatgatgaaatttaacaggatacttcttaaactcagcggagagtcgttaatgggcgctcaaaaatacgggatagacgtgacccgtgtcgaaagctacgcccgacaaataaaagaaatcgccgaaatgggcatccagataggaatagtaatcggcggaggaaatattttccggggactgagcggtaccaataaaggattcgaccgggttaaaggagatagtatgggtatgttggccaccgtaatcaatagtctggcactcagttcggcactcgacaacgagaattgccggaacaaagtactgacagctatacgcatggagcccatcggagaattctactccaaagccaaagcgatagaataccttgaaaacggctatgtcaccattttcagtgccggaacgggtaatccctatttcacaaccgatacaggcagtagtttgcgtgccatagaaatagaagccgatgccatgttgaaagggacacgggtagacggtatttataccgccgatccggaaaaagatccgacagccaccaaattcgagaaaatcacgtatgacgaaatttataataaagggttaaaagtcatggatctcaccgcaacgaccatgtgcaaagaaaaccaccttcctatcgttgttttcaatatggatgttgaaggaaaccttaaaaaattaatggaaggccaacagatcggtacgatcgtctattaatctgctaatataatatgaactaataggttgatgtttgttattagcccattatttattagcaaatgatgcatacatgagtatccttgattctataaatacacctgaagatttaaaaaaagtatctgaagattcattgattcagttatgtcaggaaatccggcagaaaatcatcgatgattgtgccgaaaatccgggacatctcggatcaagtctgggagtcgtagaattgactgttgcgcttcattatatcctcgacaccccttacgacaatcttgtttgggacgtcggacatcaatcttatgcccataaaatactcaccggccgcaaagaacaattcaaaaccaaacgtatctacggaggaatcagcggtttcccgaagatatcggaaagtgaatacgattcgttcggtacaggtcattcttctacttcgatttcggcagctttaggcatggctattgcagcaaaaatcaacggagaaaccgggcggcaaagcgtggccgtaatcggcgacggttcgatgacaggcggaatggctttcgaagccctcaacaatgccggggtatacgattccaacctattagtcatcctgaacgacaataatatggcgatcgatcccaacgtaggaggcttgaacgaatatctgttggacatcagtacttctaagacctataataaaatcaagggggatgtatggaacgttttaggtaaactaaaccggatcagtccaggcatgaggaattttatccagaatatcgacaatagcataaaatcgatgcttctgaaaaaaagtaatcttttcgaagctatgggattacgttatttcggtcctgtcgacggccacgatatccatcatctgatcaaaatattacgggacctgaaaaatataccgggtcctaaagttttgcattgcattacggtcaaaggaaaaggatttaaagaagccgaaatcaatcaaacaatctggcatgcccccggcaagttcaataaagtgaccggagagcgaattaaagagaataatcctaacattccggccaaatttcaggatgtttttggaaacacagtcacagagctggcgaagagcaattccaagatcatcggaatcacccctgctatgcctaccggctgttcattaaatatcatgatgcatgaaatgccggatcgttgtttcgatgtcgggattgccgagcaacacgccgtcactttttctgccggcctggcggcaaaaggatttgttcctttctgcaatatctattcttcatttatgcagagagcctacgatcaggtgattcatgatgtcgccctacaaaatctgaatgttgtattttgcctcgaccgggccggttttgtcggagccgacggagccacccatcatggagcttttgatttagcctatttcggatgcattccgaatatgatcatcgcagctcccctggacgaagcggaactgagaaatatgatgtacaccgcccaattacctgaccagggacctttttccatccgctatccacgcggaaacggttttcttgccgattggcatactccttttcaggaactggaaatcggtaaaggcagatgtttgatcgagggagaaaaaatagcgattttatctatcggaagtatcggaaatgtagcgaagaaagctgtatctcacttcgaagaatcgctcgtcgccctttatgatatgcgttttttaaaacctatagacgaagaattattacataccgtttttcaaaaattttctaaaataatcaccttggaagacggaacgattcaaggtggattaggaagtgctgtcgccgaatttatggccgaccaccaatatcatgctactataaaaagattaggaattccggataagtttatcgagcacggaactcaacaacaattatatgaagaatgcggattcgatgaaaaaagcataacccggtgcattcaggaaatgctcatagaaaaggataccagagaatgaaaaacgaattaaacaaacattcaaatatagttttgccggacttagggtcttgttacaaaaaactaaaacagacctttaccaatctttcggacgaagaattaaaaggcctgcttcgtccggattcggtcaaatattacaagaaaggtgaactgatttacgcggaaggcacaagaatcaaaggttgttatttcatatacagcggaatcatcaaaatatatcaaacagggcatgaagggaaagaacaaattatcaaattcgatcaggaaggagacctcttcggcttccgttcagtcatccggcacgaacctgcttgcacctctatagaaacacattcagaggcaattctatgttatatacccgattcggttttgttaaacttaatccggaataattcaggttttgcctacgatatgatgcaaatagcctgtaaagaattgggcgactcgaatcgttacatccgggatattgcacaaaaatctgtaaaagaacgcctggccgagatcttactcctcattgcagatgatttcggtatcgaacaagacggaagtttaaaactgaatatcacccgtgaagaccttagcaattttgtcgggacagcgacagaaaccgttattcgtttactttccgactacaaaaacgacggattgatcgaagtcaaaggacgtaaaataaaattattgaatattgaaaaactgaaaacgattgcaggaatgtaaaaaatattgtatcttgaggggcatttaaaaagaggaaccttcaaagaaatacaatatgttacaaatctcagaaaaaggaaaaaaaatcccggcttctccgatccgtaagctggtcccttatgcagaccgtgccaaagaaagaggaataaaggtctatcacctgaatatcggacagccggatatcgctactcctgaagtagctttgaaagcagtccggcaaatgaaacttcctgtaatcgaatatacggcttccgccggaaatcatacgcttcgtaccaaattagccggatattatcagaaattagggatctccctgaccgaagaagacatactgattactaccggtggctcggaagccattctgtttgctttcatgagcaccttgaacgagggagatgaaattattataccggagccgttttacgccaattatacggctttcgccttaatggtcggagccaaaattaaaacggtaacagcaaaaatcgaagacaatttcgcccttccaccgatgagtgaatttgaaaaacaaattacacccaaaaccaaaggaattgtaattgtcaaccccaataatccgacaggttatctatattcccccaaagagctggaagagctggcgaagattgtaaaaaaacacgaattatacctatattctgacgaagtctacagacgatattgttatgatggcttaaaacatttttcagtaatgaatctgaaaggaatcgaacaaaacaccattcttttcgattccatgtcgaag

SEQ ID NO: 6105 - DNA, 10632 bp, Unknown
  gut microbiota DNA sequence
ctcaaattcggcatggcccgcctttgccctcccgctttgggacaaattgcagccgaagcctctctggacaccaccgacgaatattttgaaagcgtctatcatgaatatatcaaaagaagaaacttcatggtagaagccttgaataaaatgccgggagtggtttgtcctatacccaaaggggccttttattccatagtcaagttgcctgtcgacgacgctgaaaaattcgctcaatggttattggaagaattcgactataacggtcaaaccgttatgctcgcccctgccagcggcttctattatactcccggattaggcaaaaatgaagtaagaatagcttatgtactaaaaatcagtgatcttcaaaaagcgatggaaattttatccgtagctttaaagacttacccgggaaagacattataaattaagaaacagattaataggcattttccgggaagttttagcagatagctttcagcttttagcttttagttttatctttgcagcagaaaagaattattttttaaaataaaattatgacatcggattccgaatttaacaccatcagaccctattgcgatagcgaaatagaggcagcaatagaacgtctatgtaaatcagaagaatttttgactctgtttacacacctaactaaaatggaccgtgcaaccatacaaggagctttacaaggaattcgaagccgtgcggaatttcaagccaaatttttcggtccggccatccaatctctgatcaatacgactacagacggaattacagtatcaggaatggaattggtcgacaaaaatacttcttatatttttatgtccaatcatcgggatatcattctcgattcggccatcctgaatgtgcttttgcgtcaacatggtaataaatacacccgggctgctataggaagtaatctcctgatcaacgactgggtaaccgatttggtcaaattagattcttgttttgtcatagagagagatataacagtgagagaaatgcttacgagttcggctctccgctcaaaatatatccgggaagtcatcgaagaaaacgaagattcggtatggatcgccgaacgggaaggaagaactaaaaacggcgatgataaagcccaacccagtctattgaaaatgctgaagatgagcggtcccacccaattcgggatcaatttcagagaactacatatcatgcccctcgccatctcctacgaatgggagccttgcgatgccctgaaaacctcggaattatataccaaaaccgtcggagaatatatcaaaactcccgaagccgatatgaacagtatgctcaccgggctaagtgactacaaaggacgcgtacatttccatatcgatcagctcacagatcaggaattcgatgaactggatcaacttccctccaatggagacagaatagaagcactcgccggaattatcgattctaaaattcatcagaatttcaagctttggccgaataattacattgcctatgatttattacattcggtaaataaattcaaagcattctataccgaagaagaaaagaaacgttttatcgaagtgatgactcaaaaaatggataaactggaagggaatatttccctactgaacaatatttatctggaaatatatgctaatccggtaaaaaatcaattgaaattataatccttcgtacagcaaggacgaatacaatgtttaacggatagaaaaaacgattcgcctgccgcattttaattttacatataagttatacccactatgaaaattattcgcctactgataatactcactgctttcttactgatgatatcgagtgcactatctctatttagcaataccgataggacaccggtctatatcaacgtcgcttctatggcttgtttaatgatagtcgttacactgttaaacttcaagaataaaaataaaaacgaacaataatgtacaaagtaaaacgtacaatttacgtcgataaccaatcgattgacgtttggttcggattagtaagcaaaaccaaaaacggtaaaaacggaaaatatacggtctatctgttgaccgacgatcccaacaatccttataatcacgcggagcctatcttgagcaatatcacctcaaaagaaacagccgtccgaaaagcaatcgaatataccaaagagctgtttcataatatattgatcagccaaaaaaacaacaataaatcgcaagaagacaatggaaagaaaagtcagagttagatttgctccaagtccgacgggagcgcttcacttaggaggagtaagaacagccctcttcaattatctgtttgcccgccattatggtggagattttcttttaagaatcgaagatactgaccaaacccggtatgtacccggtgcagaagaatacattatagagtctttgaaatggtgtggcttaaaagtggatgaaggagttggggtaggtggagaatacggtccatatcgtcaaagtgaaagaaaagaaatctacaaaaaatatgccctccaactcgttgaatcgggaaatgcatactactctttcgatacagccgaagaattggatgcgatgagaaaagagtgtgaaggacgtggggaaacatttatttacaatgccacgagcagaggtaaattaaagaattccctgaatatggatgccggtaaagtaaaacaattgctggaagcgggtgtgcattatgtcatccgttttaaaatgcccgagcatgaagatcttctccttcacgacattattcgcggagaagtccatttcaacagctccctgcttgacgataaagtgctctataagtcggacggaatgcctacttatcacctggccaacattgtagacgaccacttaatgaaaatcacccatgttatccgtggagaagaatggttgccttctcttcccttacatgtgttgctttacaaagccttcggttgggaagacaccatgcctgaattcgctcacctcccgctgatcttaaaaccggtagggaacggcaaattaagcaaacgggacggtaacaaaatgggattcccggtattcccgatggaatttacagatccggcaaccggagaaaaatggcatggctacaaagaagacggttatttccctgaagcattcatcaatatgctggcccttttgggatggaatccgggtacggaccaggaaatattctcccttcaggagttatgcgaactattcactttagacagagttaaaaagtcaggagctaaattcgatcccgaaaaaacaaaatggtttaatcataaatatttggtggctaaaccggatgctgaattagcagatctagtcgacgaaatgcttaaagcagaacaaatcgttttcgacaggaaaaaaaccgagaaaatctgtagtctgatgaaagaacgctataattttgtagccgatttgtatgcagactgccgcttttttttcgttactcctaccgaatttaatgaaaaagataccaaaaaatattggaaagaagatacacctgctttaatgcgtgaattactggaaatactgaagagtatcgatgattattcttttgccaatacggagaaaatcatttctgcctggatcaccgaaaaaggcttaggcttcggtaaggtaatgaatcctttccgggtagccattatcggtgctgctaaaggaccgcatatgttcgatgttatcgaaattatcggtaaagaagaaacgatacgccgtatggaaaaagcattgtccactttataaaaccaaatcatggaatcggaaaaacaatatgccatgtttattcatctttcccaattggccggaagtatcgtcgtcggtttgggatggatattgcctttagtattgtggctgactaaaaaagatagctccgaatacatcgatgccaatggaaaaatcgtgatgaattggattatttcctgcttgatttacggtattgtcagtggtatactttgccttatagggatcggtgtcgtcctgctcatcgccctggcgatatgtaacctgacatttattatcataggttccgtcaaagcaagccagggaaacttatggccttatcctttatctattccatttattaaataaagaaaagcagttatatacatatttgcacttataatcgtacattagggtaaacatgtatataaacacttaaagaaaataaccggaaactgatattccggttatttttttctcgctttgtaacaatctacaggtgctgttcgtcatagttgaaaattgtcttagctatgaaaaaatttatcgtaatccttttatccaactttattttcacaatcagttttgcacaaaccgatgccgcttaccggatcttcggtgaaattatgacagtagagaataaagtctataaaggtttcatcacttggaatgggaacaaaaattattggatagatttttttgaggcctcgaaaattgaaaatccttatcgttcctatttcaaaaggagcgacggattggttttcagagcaaacgacagggaattcataacacctccgacacataatttttgttgccgtttcggaaatataaaaagtatccggcccactgatgtaaatgaaatcgttctgcaattaaaaaacggagaccgactcactttggtcaaagggtactcatcggacataaatacccatatacgaattactactccaaccgaaacgacctcgataaaatgggatcatatcagtgaaattcattttatgggagcagacaaggaggccattgcccccgaaacgaaccaagtcgccggtacggtaaaaagtacccagggtatatacaagggaatcatttattggaattcccagcaaagacaaagtcaggaaaaaatgaaccagataaatatttttttaaacaaaataaagaagttatatgcattcaaaggtaaaaacgggaaccatactttcggattgatccccttagtctctccaaacgatgaccctgcagatgcacagatcaatgcactttacccagtagaaaacataacgatcaacatgcccaatatcggtagcgtatgtgtatcccgggcacaattcgaagaattgacgatcatccccatctccgaattgaatttattgagttatgacgattttccaagtccccaagccataaaaggagaagtagtcacccgctcgggacaaactttcgccggtaacctggcttacgatctggacgagagctatgaatttgaagtgctcgacggtaaaaacaatacgatcagctaccgtatcccgtttcgttacatccgctccatcgcaccaaaaaattacaaatattcctttatcacgctacggaataacagtcagctcagcctgggagaaacttgtgatgtcaatcaggataacaatggaattattattttcaggaacggtcaaaatccagtatacatcctatggtcggaaataaaagaaatcaatctgaaatgatcaggttgtaatcatctgaatagcgcttttctatttcatcgaaaacctcccaaagaacgtcgatcgtcggagcctgtaacattcggatccgaagatccctgaaatgaggtaaacctttaaacatagaggccatatgacgcctcatatgcagtaatccacgaacctcgtcgatccactctaccgataagagaatttgttctttgatcacctcgatctgttcttttacagataaatcgggtaataactcacccgtttcaaaataatgcctgatttgtttaaatatccagggatgcccgatcgtagctcttccgatcattacgccatcgactccatacctctcgaaagcctctttcgctttctccggagaagtaatatctccattgcctaaaataggaatttttatccggggattattttttacccgggcaatcggttcccaatcggcttctccggaatacatctgagaacgggtacgcccatgaatagccaaagcctgaatccccacatcctgcaaacgttcagcaatgtcttcgataatgatatgctcacaatcccagcctaaacgggtttttgccgtcacaggaatcttaacggcttgtacaatctgccgtgtcatttcaaccatcaaaggaatgtccttcaacatgccggccccggcccctttctgagcaacccgtttcaccggacatccaaaattaatatctataaaatcaggccgaacctcctccacaattttggcagcttcgaccatagaatcgataaaacgtccgtagatctgaatcgtaaccggacgttctgtttcatcgatcgtcaattttttcaacgatttattcaccgaacgaaccaacgcatcggcagatacaaactcagaatacaaccaatccgcaccatatttcttacaaaatttccggaaaggaggattggtcacatcttccatcggagccaatatcaatggcctgtctcctacttctatcccagctactttcatttattattcagatattttaaacattatattaacggtcttcccggcaaatacgctaattttacgacaaaaataaataaaatgcagttgtaagatgatgttactgataaaaatcagcctattatttagcctgttattgcctgactccggaaaatggcaaagaattcagaccccggaatgtatttcgttcctgtttcccaatactcctgaaaagattgtaaatacaaacaacgggatacgttccaccatttaccaaaccaaagatctgacctgcgtatttggaattgtttattcagatatgtcatctaaaaagatcagaataacaagtgaatacgctcaaatactttatgaagaacttaaaaaagggagtttatccatcgaaacggcgatcctcaaagaagaaaaaacgattccttacgaaaatatgattatcaaagaaattcaatactctatctataaagataagtatgagatgacctatattaaaagatttattttcagagataattatatttatcaaatatcgataggaggacgtacccgccatatgtctgtcattcaaaacgaaatggaaacattcttcaattctatatccttccacgatcctacagaaaagataaacgaagttcagaattagttttatttgtaacttttagctatattcgatcgtcatatctgcaacatgacgagaaaagaatataataaatgcgttgatgatttcgcagatgctttgttccgatttatcgtaaaatccagtcacaacaaagcattagctgacgatatcgtacaagacagtttcctgattttatgggaaaatgtctccgaaattgcatgcgttaaagcgaagtcattcctttttaccaccgcctatcacaagctgatcgacacgtttcgtcatgaaaaaaagaatgcagactttgaaaatataaatccgacaagttatttgaccgaggaaaaatttaccgatttaaatgaaatcctcgaatttgcactcaataaattaccgccgatacagaagacggttgtattattaagggattatgaaaattactcttacaaagaaattgcagaaattacttctttatccgagactcaagtgaaagtgtatattttcagagcccggaattttatgaaagactttattcgtaaaccggaactgatactttaatacaaatactattattaacaatatatcatgaatataaatagaaataattatgagaaatatttcatcgactacttagaaggtactctttctaaggatgatattcatgatttacgggtatttcttttgtttaatcaagatctggcggaattattggatgacatagcaaaaataaaattaaccgctccctcggtccgatatacccgtaaagaaaacctcaaaaaagatgaactccatgcatgtaaagattattatgcgatcgctattgctgagaattcgctcagcacacaagatatttcagacattaagcactcttcccgtaaacaagaaataacaaaacaggcagaagtataccgtcaactgaaactaacaccggacacgaaaatacgttatacccgaaaatccaagctttaccattcggcttaccggcaattagggtacaaatatagttcgattgctgctattctccttttgatactgaccatcgctataacagtcctgaagtccgatgatattcacccccaggcaaccgaaataaccatggtccttccgcctgcgatcgagattcctgctatagatcgggttctatttataaaagagcaatctttgcccccgcttccttgtccaaagccggttattccggtacaaccgacaagaatcccggtaatgaccatccaggaattacccatttgtggaataactcctacttcggttcaggaagcggcaaaaatccggatgagttctcctgcttttaattcttcggaacttattttaacagaaaatgcgatagcctggaagccttcggaaagtaaatttttaagtaacaacctcttttcttctatgatcaatacaggaaaaatgattgcagaaaaattgaaaaacaatatcggtaaggagtaacaaatattccccttaatccgtcacattcgaaataacacataaataattaaaaataacaatcatgaaaattctactcgctatcattttgatttttccaattttcaatatcgtagcacaaaatccggttcaaccgaaggattctactgtaggaaaagacgaattgatcatcatttcaccggaaaaaaaagtccattccgatacctctgaattaatgattattagagacagtagtcaaaaacacaaggaagcaaatatttccgaattatttatcataggccgtaatgcctataaacggggacatatctgtaaaaacgaccaatacccgccattcgaaggacattggagtggattctattatggtttcgtcaatttcggtaataccgactattcgatgtacgaaggcacagcatatgaagaatacggagaatttatggaattggattggagtcattcttttgcaatgcaattcaatgtctttaaacacagtatcaatctggtacatcgaaataacttcggtattgtatggggggccgggtttgaatatcagcggctacggttcgaaaataattatagttccgtaacctgggccgatcatcaacttattccgatcgacttacacgaaaatgataaaattgccagtgttaaacgtagtagttttaaaactttctacctgaccatccctttaatgcttgaacttcaactgcctgcggctaaaagaaaccgattctatatttccggaggtattatgggaggggtaagattacattcgaaaacaaaagtcgtttataaagatagcagcggggataaacacaaaaagaaagaaaaaaataatttcaatatggtccccttcaaagccgatctcgtcggaagagtgggctataaacgcctgagcctttggggaagctacacgctgaccaatatgttcaaatccgataaaggcccggaactgcatgcttatacggtaggcatcggtgttaccttttagcaaacgataaaaagtttccgggaatacagcagtcaaattattggccggctgctgtcacctggaaacttgaaaacacaaactattcgttcatcacctttgtttgccggtcgatggaagcttggtgaatcgctttgaaaactttttctaaaaactcattatccagtcccatctcagctcctttgacaaacaccttttccaggattttatcccaacgtccgggttgcagaatagtaatattattttgctttttatattttccgatttcgtcggataccttcatccgccgggtcaatagctccaatatatcgttatcgatatcatcgatctgcgcccgcaattcatctatgttttccttgtattctatgttttccgaatctatatcccggataatcagttttcctaaaatttcccgaagagaagtcggtgtgacttgctgtgcagcatcactcaaagctatttcaggacaaatatgggattcgatgatcagtccgtcgaaccccaaatccatcgcttgctgggaaacttcctgaatatattcccgtttacctgaaatatggcttgggtcacaaatcatcaacatatcgggaaaacgccgttttatctcgataggtaattgccactgaggaacattgcggtacttggattttacataagcagaaaaaccccgatgaatcacaccgatttttttcagtcctgccatatttaagcgttccaaagcaccgatccagagttcgacatccggattgacaggatttttcactaaaaccggaatatcggtaccttttaaagcgtcggctatttcctgcatagcaaaaggattggcagaagtacgtgccccgatccacaacatatccacgccggctttcagagcttcgtacacatgtttgacattagctacttccgtagaaattttcattcctaactcacgctgcacccgcttcatccagactaatccttcggaaccgactccctcgaaacaattcggacgggtacggggtttccagatccctgccctcaaaacttccactccggcggccttcaaacctttggctgtttcaaaaacctgttgttcactctccgcactgcaaggtcctgcaataataataggcttagtagtatctgtaaataatccccagtcctctacttttaccaaatctaattttgtcgct

SEQ ID NO: 6106 - DNA, 6423 bp, Unknown
  gut microbiota DNA sequence
atgttttttaaattcctgcaatttttcgatataggtatctaaaacagtcaatatattctctttattctgagagaatatcggagcccacatgtctgcattacttttagccaatcgtaccgtcgatgaaaaaccaccggaagccaggtcaaagatattcttttcattcttttctttttccaaaacagtcaacgcaagtgcaaaagaagtgatatgggaaatatgggaaatataagccgtatgcatgtcatgatgtgcggcccgcatatatatcaccctcatattgaggcaatcatacatttgcttgaccagttcgacggcttgcatatccgaatcttcagcattgcaaataatgcctgcccgtccgtcgaataatccgggcaaagcagcccagggacccgaatattctgtccctgccatgggatgagcagcgacaaaattcttccggttcggatgataacgaaccatatcgttgattttttctttcgtcgaacagacatcggtcactacctgacggtccaccttatccagtatatccgggatcatccggatagctatacttaccggcacagctacgacaatcatatcgctcatagcaatacattcttcataactgacgatttcgtcgaccaatcccaattccttcgcagccgaagcatgcaaagcatccgcttcaaccccgacaacacgatcggcaaaaccccggtttttcaaatctactgccatagaaccaccgatcaatccaactcctattattccaacttgcatatcaacatttctttttatccgacatttacaactgcttcaacaccacgaaccatgtttaaaatgactcacatgtaaaacccggcgaatccgtccggcagcttcacgtaatacctcttgtttcgcacacaatgaaatccggatataacgttcgccgttacttccaaaaataaaaccgggagtaataaatacatgcgctttttgcaaaatcatatccgacaatttttccccactctcttcccggtcatcgatctttccccacaaaaacatacctccgctatgtttatcgtatctcacacccaacagatcgaaaatttctccggccaatttctgtctttcccggtattctgcattcaattgtgcataccaatcgtctttttgggataaagctttcacagctgccaattggagcggtttgaacatacccgaatccatattgcttttcactttcaacacctgggaaatgacatctgcatctccggcaatcatcccgattctccaacccgacatatgatgtgctttactcagtgagttcagttccacacagcaggttttcgccccatcgatactcaaaatactcagttgttcatcatttaatataaaactatagggattatcattacagatcaaaatccggtgtttcaagccaaactctaccaacctttcgtataatgccatcgtagcttttgctccggtaggcatattcggataatttgtccacatcatttttaccctggaaagatccctgttttccaactgttcaaaatcgggcatccatccggtttcttccttcaaatcataaagcacgatcccggcttctgccagtaaagaagccgaggaataagtgggatatccgggattaggtacaagcacttgatctcctttattcaaaaaagccagagacaataacaaaattccttctttagaaccggccaaaggttgaatctccgtatccggattcaaatctacccgataatatttcttataccaggtagcaaatccttcacgcagttcttttattcctttataactttgataagcgtgattacctggatgctgagcctctttgatcaaagtcaggatagcttcctcgggtggcatccggtcaggggcaccgattcccagattaatcacttcggctccttgtcggttcatcaaatcaatctcttgtaatttttttgaaaaatagtattcactgacactattcgttctgtttgccggtttaattatcatcgtttacgatttttgatttacaacttatatactttctaatcaacaataacttttatattcccccatcactgtcagttcatcgaccaatggtcttacagcattcatcgcttccagataatgtccgtaatcatcgaatttcagatccacataaaaaaaatactgccattccttccccggtataggcaaggattgtattttcgtcaggttaaggtcataaaaggcaaatatggaaagtacctgcgataaccgacctgtcttatgaggcaacgtaaagcaaatcgaggatttatcgatatctttctctgatacggtaatatggtcgtccaggatcagaaaacgggtgaaattttgcttatgagtctctatactagcctgaagaatctccaaaccgaataattctgcagccaattcagaagcaatcgcaccgatccgtctttgtccgttccgcattatatcggcagcacttttggctgtatcttccgattctaccaaacggatatgtggatatgatttaaaaaattcacgggtctgggctatagccatataatgtgaatgcacttcagtaatctcttctatagtctgcccgggcaaagccatcaggttttgctgaatccgaaggaatacctcccctttcactttgcgggaatgtttatgcaacaaagaataattcggtaataatcctcctgccacggtattctcgatagccatgatagctcccgaagcttttccctgatccaaagcaacaaacaaatcttcaaaactaagacattcacacacaccgatctcatttccataaaacaaccgggcagcttgctcgtgaaaacagccgtgtactccttgaattgcaattttcgtcattttccgtcatttttaattcgcatatcggtcaataaaaaaccccggacattatgccggggtttatattattccattattattttcaggacaaaatacacagcctccggctactcttcataaaataaaagtagaagtaaaaataaaaccggctgctaaatcgaaaatacgtcgccatctttgtccaaataaaaaagccctgagtgatcagggcttactttaatcctattttttaatcattacacggaagccctttactctctgctaaaaaagtaaaaataaaaataatatgcattccaaaatgatttcatcgctctgtttttgttttgtgacgacaaatatacaaacaaatctatttcttgcaaatgtatcccatttatttttcagagaatctctctttttagtacaaatacgattctcaatgtttagaatataacatataaaagcctccctccgatatacttactgatgagcttttttttctaactttgtccgtataaattttaatcctatattcatgtcagatcctaagaccttattcctactagacgcctatgcactgatataccggtcgtattatgcttttatcaataatccccggattaccaccacaggaataaacacctccgccacctttggtttttgtaattttctgatcgaattattagaattagaaaaaccgactcatatcgcagtgattttcgatcccgaaggtcccactttccggcacgaaatgtacacaccttataaagcacaacgtcccccgatgccggaagatctgagaaaatccattccttatataaaaaaaattatcgcaggtctgggtatttcttgtctggatgcgccgggttacgaagccgacgattttatcggtaccctggccaaaagagcggagaaagaaggttataccgtttatatgatcacgccggataaagattatgcccagctggtcagtgaaaaagtttttatgtataaacccggacgttcaggaaataaatcggaagtctggggtattcccgaagtattggatcacttcgggatcgaacgggtggatcaggtcatcgatattttaggactgatgggagatacggcggacaatgttccgggatgttccggaatcggccctaaaagcgctgctgccctggtctataaatatggagatatcgacggaatatatgcccatatcgatgaactcaaaggcaaacaacggcagaatctgctcgattgccagccaaccgtccatttgtcacgtaccctggtcactatttgtaccgaagttcctaccgatatcactcccgaagatcttgagaagaaacatatcgatgtaaaaactctggatcctatttttaaagaactggaactcttttcattggtaaaacgggtattgaatacagatatagaagaagatacctcagagaaattgtcggacatcaaagtcagttataccgaccattcccaagatccggcttctttactgcaaaaactggaagaagcagatctttatgctttatatgttgtttttaaaaacgggactctgtataattcctggccgactcatctgtgcttctcgacaaaacttcacgaagtaagttatatcaatctgcctaatgacaaaaacaaggcattggaaatcatactccaattccaggccatttttgaaaacaaaaataaaattttaatatcggccgatgtaaaaaacgatatcatttggttgaaaagagcaggtatcaaactcaaaaatgatattttcgacattaaaatagcccattatgtactccatccggacatatcacacgacttaggccgggttgctttggaatacctcaattataagctctcgggaagtaaaaaagaagatcagcaactcacgctccagttcgatgaagaagcagggacggaagataacgattttgcagagaaaaccgatgttatcttccagcttcgtgaaaaactctgtgacgatctgcaacagaccggcttactggcactctataacgacatcgaaatgccactggtttttgtactcgccgacatggaatatgaaggagtaagcatcgattgtaacgaacttcagaccatttcaaacgaactaaaagaacggatcgatatcattgaaaaagaaatctatgaattagctcatcaggaattcaatatcagttcccctaagcaattgggtgaagtactcttcgataaactgaaaatcgacagtaatcacaaaaagacaaaatccggtcaatacagtacttcagaacaagtgcttgtaaaattagaagacgaatatcccattatcaataaaatactggattaccggggattaaaaaaacttttgacgacatatgcagaagcacttcccagttttatcgacccggggacaggaaaaatacacactcatttcaatcaggcagaagcggcaaccggtcgtttaagcagcctgaacccgaatctgcaaaatatccctatccgcacagaagaaggccggaaaatccgtaaggctttcgttaccggtaatgacgactatttgtttttctcagccgactattcccaggtcgaattacggttgatggctcatttaagtcaggataaagaattgattcatgctttcaatcacggtatagatgtacataccgctacagcttcaaaaatttatcatgtcaccttagaggaagtaactcctgaaatgcgccgccgggctaaaacggctaatttcggtatcatatacggtatatctgcctggggcttggccgaaagactccacatcagccgcaaagaaggcaaagaattgatcgacggttatttcgatctttatccaggcgtgaaaaaatacatggaagaatccgtcgaaaaagccagaaaaaaagaatttgtcgaaacaattatgggccgcagacgttatctccgggacataaactcccggaatgccgtagtcagagggatggcggaacgaaatgccatcaatgctccgatacagggatcggctgccgatattataaaaatggctatgatctgtatccaaaaacgcattcaggaagaaggattgatgtccagaatgatcattcaagttcatgacgaactcaatttcaaatgccataaatccgaacaatatctcctgaaaagcctggtgacgaattgtatggagcatgtaataaaactctctgtgcctctaacggttagtacaggattcggaaacaattggtatgaagcacattgacctgtaaaaaaacttgtttcaatttaataaatgtaaattaatcccgatttttttatattattgcaataaatttcaatcaaaccaatatgcgagtatttattaaaaatagaatcctgttctattttatatttttcatatatactccggctagcttcgctcaggattattccttttctcaattttgggagaatcggatttattataatccttccttcgttggtttgaatgaaggtgaattcaacggacaattgacctatcggaaactctggcccaaatttccgggtaatttttcaacgatttttttttccgccgatttaaaaacatacaataattatggattcggattatccgttatttcaagtgat

SEQ ID NO: 6107 - DNA, 2470 bp, Unknown
  gut microbiota DNA sequence
tttattcttttataaaaaaaatgatgattataatagactgttagttgtcttcaaaaatgttgatcgatttatttgattttatcgttcttaaaaattggaactgtgtttctaacatgatattgtaatataatatgtttttattcaataatttatatgagttattaacaattgtcagtaacctatttcacagaaaaaaaatagattttgaactgtggaaaactgttagtaatttgtataaatgttttgagataaaaatgaattcttttcttggttattcgggtgaaatatcgaataagagttgaaaacgagatatccaaataaagatatgagtttctttaagtagttttcaacagccgattaataacttttcaacaatatttttctaagcaacaatctccgggaattgattcgatcagaaaatataattacgctgatcaattatagcttttgcagaatagaagtggtagaaaaaccgggagtaagatctattgttataatttcccctccttttgcttttacgatgtcgtaacctacaatttcttcgggtttataatcacttccttttactaaaatatcgggttgaataaaccggatcagttccagaggagtatcttcgtcgaagaaaataattttgtctgtaaaaagaagtgaagcaagtaagagagcccgggcttcctggttattgacaggacgtttatcaccttttaatcttttgaccgacgcatcggtattcaatcctataactaatttttggccaagaccggcagcttgggcgagatattcgatatgtccccggtgcagaatatcgaaacaaccattcgtgaaaacaattttttcttctttaaatctccattgactcaaagtatggatcagagtttctttttctctgacaattttattttctatgaatgataagtaattcatttacaattattttaatctgggatttattcccagatcatatcaatcgattggtattggtgtccggaaataccaaggttggcgtatgttttttagcttcttcgaagtccatcgatgcataggaaataatgatgaccacatctcctactgcacatttccgggccgccgggccgttcagacatacgacacctgagtttctttcgcctttaatgacataagtttctaatctttctccgttgtttacattgacgatctgaactttttcattctcgataatattagcggcttccattaaagctacatcgatcgttatgctacctacatattgaaggttagcttcagtgacggttgctttgtggattttagatttgactacttctataaacatgatgataattttaaaatggatttaaaattagaatacaatgttatctatcagtcggatttttccggcatatacagctacacaagctactttagttccttcttctgaccagttttccacaacttttagagtggtatcgtcgacaatttcgacatactctgtttccaggtatggattattgttgatttcgtcagcaatccattttttcaattcactgacattcatttgtgaagctaagttacgagctttttttaaagtagcgtatatgtgaggagcattttttttgtattcttcatcgagcaatgtgttacgtgaacttttggctagtccattttcttcccggataatcggacacggaatgatttcgatgttgtattttaattgtttcaccatatttttgataatagcgatttgctggaaatctttcattccgaagaatgctttatcgggttgaacaatatcgaataaacgactcactacctgacctactccattgaagtgacccggtcttttcgctccttccatcactgtttctatatatccgaaatcgaattttcgggtatccggttccggataaatttcttcaacagaaggtgcgaatgcgatatcacaatctactgttttcagtaattcgatatctttgtccagtgttcggggatatcttttcagatcttcctgatcattgaattgtgttgggttgacaaatatactgactacagtgatatcactattgtgtttactttcttttacgagggataaatgtccttcatgtaaagctcccattgtgggaacaaatccgatttttttcccttctttacggagattttccagaaggctaattagttcatttttagtgtttaaaacttgcatgatacttcgttaaaaatacgggatgcaagtttacgaactatttttataattaggaaatgaactagcttaaattattttattaaggtttaaggaaaaaaagaaatctgttatttccggacttatctaatgtattgagagttaaaacggataaaacattcgattgtacagcatactatagagtttataaagtttataaaagtatagagatgtccttcggacagggtttatggaactttttattcagaaaatatttatttatataaggtatggatagccggatggacggaagtcaat

SEQ ID NO: 6108 - DNA, 173 bp, Unknown
  gut microbiota DNA sequence
ggggaagcacccgtgcgtgtgcgtgtcacttatgaccgcctatacgtggaacttcaactaaagcggagtgtaaaagtcccactttggtcgcaggaaaaagagaagtcgacaggcaaagaccgaaactccgtagaacttaaccattacattgacgccctgcgtgtgaaattcta

SEQ ID NO: 6109 - DNA, 1010 bp, Unknown
  gut microbiota DNA sequence
cctgtaaagagtgttgttttagatgtacgccccaagttaaacaaattttagaaactgataaaattttgcaatatatagatgaagctgtggaagcctttccctctctgaaaattatggttttgacgggtggagagtgttttttggttgcggatgatattcctcgaatgatattacgtgcgaaatctcatgagctgatgtctcgtgttgtgtctaatgggttttgggcgacttcttatgaggctgccataaaaaaattggctcctcttgtgaatgcaggtttaacagaattaaatattagtacaggagacaatcatcaggtgtatgtaccttttgagaatgtagtgaatggattgagggcggcttatgaacttgggattaggtcaatggctgtttccgttgagtctccgccgaatgccaaatttacttctgacattattaagaatcacccttttttatcttcgttgataaataaaggtgtgttatttgtgatagatgcttcttggatgagatttagcactgaagagagtgtgtacaatggagcaaaatcatttttcttggagaatttcgagacacacaagccttgtaaatatatttacgataacattgttattaatccttattctcagatgcttgcttgttgtggacttacagtggaatataataaatatcttaaattaggagagatcggtaacggaaattctatttcggatttatattataatcaattttcggatttgtttaaattttggttgcatgttgatggccctgccgttatttatgacaaggttgctaatattcgtaaaatggagaaaaaaatattcccgcatgaatgtgaatattgtattgagttaatgcgggacgaaagtaatcacgaggttatgagaacacttttgaaaaccgaattgccaggaattctttttaggcatttgataagaaatgcttcattgaaaattaataattaaaatttgactcttatgaaaacacctaaaccaattgttgtaaaatctgtt

SEQ ID NO: 6110 - DNA, 1037 bp, Unknown
  gut microbiota DNA sequence
atcctgctgggcatccccggcaccccctcttctctggcgactacctttgacggctacgccatgaccaagaagggccaggccacccgcgctctgtccatcggtacgctgtccaacttcctgggcaccgcaccctccatcatcatcgccatgatcgcctgccccctgatcgcctctgtggccgtcaagatgggcccctgggagtacttcgccctgtccttcatggccatcaccctggtggtctccatctccaagggcaacatggtcaagggcttcatcggcgcaggcatgggcctgctgctcactcaggtgggctacgctcccatctcctccaccgagcgcttcaccttcggcagttactatctggccagcggcttctccatgtcctgcgtcatgatcggtatcttcgccggttccctgatcatcatgaactacgcccacggtgtcaacggccccaagtcttcctttgacggcaagctgaccggcttcaagatcgagaagggtgacttcagttccaacatccccaacatcatccgctccttcctcatcggtctgggcatcggcttcctgcccggcatgggcgctgccctgtccaacatggtgtcctacgcaaccgccaagaactcctccaagcatccggaagagttcggcaccggcatccccgatggtatctgggctcctgaggtcgcgaacaatgcttccgtcggcggcgcagtcatccccatgatcgcactgggcatccccggtgacggcaccacggcaatgctgctgggcggcctgaccatccacggcatccagcccggccccctgatgcagcagaataaccctgtgttcacctacatgatcttcctgtccgctctgctggccgcgatcctctgcctgctggtcgagatcttcggcatccgctggttccccaagctgctggatgcaccttatcacttcctgtatcctgccatcctggccctctgcctgctgggcgtttacatcgagaccttcaacatcgccaacatcatcatggcctgcttcttcatcgcggtcgg

SEQ ID NO: 6111 - DNA, 18338 bp, Unknown
  gut microbiota DNA sequence
gtattttgcctttttggacaccctcttctccccttttctcaagtattatttcatatataacttcagttcgacaggttgttcgcccagttttacctccacttccttcatctttccggcttcatttgcatatttcaccgtataggtttgatttttctctaacataaaggtgagcacatcattcatatcctgagtcggtccggcagtacgcccgcctcccatttgcaatttaccgcaaaaaatatccagattggcagccacccggtcctccgagttctgtacacaggcattatctgtaaacatcataattctcaacggaacatggttaccatccgcagagatcgtttccagatgcgatttatatagatcggtatagaaatcagttacattcgcagcaggtacataacgaatattctcatcccataccaaagggaaataggttccggtcggtttaaacgaagaagcataaatagctttctgctgatcgttttttaccgctttcccggcatcggcaaaaaaccaggcattgttcagttgaccgggaaaataaaattccgtaaaataccagtttccgtctgcccaaacctcggtccagttatgattgccccgttcgtcgtgccaattgggagtaccggccacccgtgaaggaattccgacagcccggaaagcatccgtcagcaagatcgataatccggtacaggaagccatatgctgccgcatggattcgaacggactctgatccggtttttcacgtttggtattataatcgaccaatacttcatcccggacattccggttgaccgaatcgatggcttcaaaaatcgtcttacaatgctgtacatacttcccgaaacgttcgtaaaattcctttctccacccttcacgggtttcattcaggctgacataaggcagtacatcattcagaaaaacagtatcgggaatctctctggcccaaacgtatttttcacgagcctgataagcataggctgtattctccaataaaaaatccgctgtcaattcctttaaatctctttccggcatataagcaatcaggaaagccatcccttccttttggttatcaggagcatttttcaatgccgctgtcaattcggttgcattatccccggcttttaccaatgcctgatccaacaaggcatgatatttctcaggaatacctgcatatttattctccgtacaagctaacagacagagcataaacaaccctagtacacacttcatattttgtaacatcaaaatttatttatgatcactaaaatatttcataaactgtgctctctcatagcgggcagcattacctgcatcggcataggataatcttccccggaattcatctatcgactcaaagccttttttatccatccagctattcaaaaaatgattcatcgtacggatcgtaccgattccctgttcatacatagccgaacatacctgcacagtagtcgcccccgccagtaaaagcttcacaacagcttctccattatgaacacctgttgaagaagaaagttgcaaaagtttatctttccccgacagaattccggtccagcgcaaagttgtcctcaaatcggccggcatactgaacacagaagccgctccgacagctatccgttcgatatcgatatccggttcgtaaaagcgattgaaaatagtaacggcatccgcaccataagctttcagcttactcacaaaagccggcaaattcgtaaaataatggctgatcttgacaattaccggaattttaaccacctttttcacatgtttaacgatatcgaaatacatgttttcaacctccacactctcagcaaactcatccatcggcaggataaaggcattcaactcgagcgcatcggcaccggctttttccagttcactggcaaaactaatccattccccgtcccgtaagcaattgatactggcgataacagggatattcactttattttttactgctttcaccaaatcgatatgttgctggacagtattagcccgaatatagttctggatataatcggcactttcaggataactattatcggtcaatgctttagatgcatccatatttatttgttcttcaaatatagatttcaacactatagctccggccccgcttaaagcaatttcttcaatcttactgacctcggaagtcaaaccacagctcccggcaataatcggactcttcaattccaatccgataaattttgtcttcaaatttaccataatctctatcgtttattatttattgttataatctctggctccaaaaaccgcacttcctaccctcaccatcgtacttccttcttcaacagcgatcggataatccccggacatccccatggacaattccttaaaactttcttcctcctggaaatacgtcgctttcaacaacccgaatatccggtgaagttcccggaattcctttcggatctgttcacggtcttcggtataggttgcgatccccatgaccccgacaatccggatatgctccaacactttaaactcatcactttcaagcagcctgcacgcctcctcccagttcagaccggatttagtctcttcttcagcaatatgaaattccagcagacaatcgatcatacgttcgtttttcaacgcttcacgatcgattttttgcaataatttcaggctatccacggaatgaatcaatttcacaaaagaagcaatgtattttacattcttctcttgtagctgtccgatcatatgccattcgatatccttgggcagttgccggtatttagcagccatttcctgtggccggttttcaccgaaagcacgctgtccccctgcataagcttcttcaatatactccaccggtttcgtcttcgatacggcaatcagcctgaccccttccggtaacgttttcacaatctcttctatattttccttgatatttaacatcatagcgataactataaaaagtagcgacaaaaatatcaaataagacccaaaattaacaaacaacctagcacaaatataggataaaattatctatatttctttccactctcgaaattaatacgaggaaaaccggagaacgatgtattttacaacaagatttttttttgttcttatgcaacgttttgtttctcccatgcatcttattgacgaaaaaagaaatcacgtgaatggatgaagtgttactgattcaggaatgccttaaaggaaagcggaaagctcagggagaactgtaccgacgatacgccgctaaaatgatgggcgtatgtatgcgctattcccgcaaccgggatatggcacacgatctgttacaggaaggttttataaaggtatttacgaatctgaacgaatatagcggaaatgggagtttcgaggggtggatgcggaaaatttttattaattgtgccctggaaaaaatccgtagatccaaagttttccctctgaccttccccactgaggagacagaacaggaaacttcttttcccaatgctttagaagaaatatcggcccaggaaatgctggatttaattcatcgtttacctccgggatatcaaacgattttcaacctgtttgcgatcgaaggattctcacacaaggaaatcggagctatgctccgaatcacagaaggtacttcccgatcacaatatgccagggcacgttatactttacaacaaatgataaaaaatttatattgactatggatagaagagaccgatttgaagaattgttccgggaacggttgcataattgggaatgtgaaccggattcagaacaatggaaaaccctcgctggttttcttcctctacgacctacccggttttccaccagatccatacgccggacggcagctatcgtaaccctccttttactcgtgggaggcggactcttatacgatcgtcttatcccggaaactacgacagaaatagtccgaaacagaatacaaccttttattgtggatcatatacaaataccacagcttaccggaacagttacgacggatcaaatagccgattcactcctccctgttctcactcgaaaacctatctacacaactggaaaaacgatttcaacggataaatataaaagtcaagaaactaaaatattacctatagtcattgcaagtaaagctctggaaacagatttttcaccggtactgatcgtccgcaacacgaaaaccgaaccggtaaaagtccgaaaggcctcacggaaatggcatttgggcatgggaggaggtaattttaatatagccggtatttccagcaactccgccggctatcccgattatgcctgtaacgatcatcttcaggggaatacccccaaacctcctctgacgaaggccggaacatcccctatttcgacacgcaccctgttatccgatctgaaaccggataaagtgaagcatagctctcccatctctttcggaataagtatatcccgcacgttgtcggaccgttggagtttcaataccggacttacctatagctatttacgcaaccagtggcgatatgaaagttcggattacgatgtattgcgtcaaagattgcacatgctgggaatcccggcatctttcagttatcgcctgacccattgggaacgtttctactgttattggtctgccggtattgtctgtgaagttaatctttcaggcaaaatctattcggcctataaaagtcagcgtcgacgaataccgggtacgctttggtcagcgaacacacgaataggtattgcctaccccattattcgccatgtatcggtctatgcagaaggaggatttttatggaatctgaccccggccagtgaaatacaaacgattcgctcggaacagtttttcaacctcacggggcaaatcggattccgtttgaacttttaaatacaactcattatatgaaagaccttcgatttctcaccgtcaacctgtccggaaaggccgacctcaagaaaatcaaggcatttaaacagtttaatcataaaaaaacaaaccatgaaaacattacattatcgctggaatcgtagcctgaactggatattgactactttattaggatttttaggtttctcctcctgtgaggataacggggacgatcccggtaacatcatatgtatgtacggtacgccgacagcttcctataccatcaaaggaaaagtcaccgatcaggcaggtcaggcgctatccgatattcagattatcgtgtccgatatggaattcagttacgaaccccgtcctgattttatccccgataccccctatggaagccacccggtcaacgatacgttatactccggaaaagaaggagaattcgaaacccggcaagcagcgttcccgatcgatacggtgaagtataatttaaaaatcaaccccgacgaaaataatccgtactaccaggccgattctctgaaagtaaccttccttcgtaaagatttacagggaggtgaaggctggaataggggaaatacaacacaagaagtaaaaatcatactgactcctcaaaaagaagaagatcatgaataattccatcagcctccggaaacgcctgggcctggaactcttccgacaaaaagaacagctgatccggcaaaaacacgaattacatactcttttttgggaatgtacccttcgctgtaatctcgcttgccggcattgtggcagtgattgcaaagcgatttccgggcaacccgatatgccaaaagaagacttcttaaaggctttggacaacattactccacaggtcgatccccaccgggtttttatcattttcacgggtggagaacctctgatgcgcaaagatctggaagagtgtggccgggcatgttatcgccgggaatacccctggggattggtaaccaacggtttgttattatcccgtcagaggctggacagacttttacaagcaggcctgcacagcattaccgtaagtctggacggaccggaagatgcccacaactggttacgccgacatccggaaagctttcgccgggccagtcaggctatcggaatgctgagccgggaaaaagaaatcgtatgggatgtcgtcagttgtatcaatcaacaaaacatcgatactctccccgttttcaaagaatatttgatcgaactaggagtcggacaatggcgtatctttaccatctttcccgcaggcagagcagcacaagtgcctgaattacaactatcttcttcccaattcaaaaaagtattggattttatccgtcaaacccggcaagaaggtcgtattcacgtcaatttcgcttgtgaaggttttttaggtccttatgaagctgaagtccgtgaccaattttatcgttgccatgccggaatttctgtcggatctatccgcattaacggagcgatatcgggttgtcccagtatccgggccaactacgaccaagggaatatttaccaggatgattttatggaagtgtggaacaaccgcttcgaaaaattccggaaccgggaatgggcccgtcagggcgaatgtgccgattgcaacctgttccgttattgcgaaggaaatggcatgcacctacacgatgaatccggtaagctgatgacttgccattatcaccggctatagctcacgggctatggtaggattaccatagcccgtgagctatttggttatatctgcaaatcttactatttttgtccaaatgacaggacatgaaaatcattcatacagcagactggcatatcgggcagacctttttcggctatgaccgttttcaggaacatcagtattttttagattggctgacagatcaaattaccacacaacaaatcgatgtgcttcttatttcaggagatatattcgatgtagctaatccttctgctcaggcacaacgtcaattttatcggttcctacgccgggtaacagaacaaaatccgggcttacaaatcatcctgattgcaggaaatcatgattctgccagtcggctcgaaaccccgattcctttactcgaagaaatgaacatacaaattcggggtacagtacgtaaaagagcagacggcacaatcgatacggaggaattaatcatcgaactgaaagacagatcggggaaacggcaaggttggtgtctggcggtaccctatctccgacagggagactatccggcagtcgagagtgaaggagatccttatcaggcaggggttaaggccatgtacgacaagctggttgcctgcgtcgaagaacgcaggcaaaaacaagaagccatcattgctatgggacacctgcaagccgcaggaagtcagatttccgaaggtgatcaaagtgaacgcctgatcatcggcggactcgaagggattccttccagtgtcttcccttcccaaatcacttacggagctttgggccatatccaccgggaacagcagattgccaaccgcaacgagatacgctatgccggcagtccgttacccatgtcttttgcagaagaaaattaccgccacggagtgatcttactggagatcgacaaaggaatacttctaaatcagactaaaattatttttaatcctttagtcactttacttcgtatccctaaacatccggcccccttggacgaagtgttgaatcgcctctctcagctcccggaagagagagacgatcatccggcccctttcctcgaagtcagggtactactcaccgaaccggaacctgctttgcgcaataaagtggaggaagccctacgcaccaaacaggtgcgtttaacccgggtactccccttttatccggatacagtacaacttacaaaaaacgagaatacgctcaccaccgaagaattactggatccctggaagctgttgaaccgagtatacgaaaggcgatatcaaaatcctctgcccgaagaattggctcatttattccgggaagtcattgaagaatcacagctgaaaatgggagaaaaacaatgaaaatattacgtatacaaggaaaaaatctggcatctattgccggagaattcgatatcgattttacggcagctcctctgcgatctgccgggatcttcgcaatatgcggtcccaccggtgccggaaaatcgactattctggatgctatctgtctggccttattcaacaatatgccccgcaccaccggtattgaaggtactaaaatgccggatgtcggacaagaattcattcaacagggagatcgtcgtcaaatactccgcagaggtactgccgaagcgatggctgctgtagaatttattgctgtagacggaaaaagttatcgctcggtatggcgggtatggcgagccaataataaaataagcgggaaacttcaacctgcagaactccgggtatacccccttggagatccgtctcctatcactacaggaatcagtgaatcggagaataaattgattcaactcatcggtctgaattataatcaattcacccgtaccgttttattggcacaaaatgaatttgcccgattcctcaaagcccggaaagaagaaaaggccgaagtactcgaaaaactgaccggtactgaaatctattctgttatctcgaatacggtctattccaaaacgacagctatccgcaatgaatggaaagaactctccgcccgtatggggaatattcgcctgcttacccaggaagaaatcgagacattacagcaacaatcggccaaactcctgaaacacgaaaaggctcttcaacaaaaaaatgaagaaatccaacgtaaaatacgttggatagagcaattagaacaaatcaatcaatctaaatcggaagcccaggccaccctttcggatgcccaaaaagtacaagccgaagcacaagcccagtcagtctggttacagcagatggaaagcatcgaaagcagccgtcttttttggattgaaaaaaatgaatgtaccactcatttagtaagccaaactgaattattacgacaaacagaacaggcgctctccgatctgaacgaaaaagccacgcaaacccttcaatcggtggaacggcaaaaatcattggtaaaccaatatacaacccagtacaataagcttaaaccggaacttttagaagcccgtcgtttagatatcggaattgtcaatgcccggcaggtagaacaagagagccggaaaactttaaccgacctgcaagataaaatcaaagtgcatcaaaaaattcaggatagcagatactcccgtattctgcaacagagagaattagacgataaattaaaagaatggttcaggaaaaacaggcaacatgaacaaatgtgcctgaacataaagctgatcgaaagttttctggatacagcttatacccaaaggttgcaggttatagaaaatcaatctttatacacctctactctacaacaactaacagtaagccggcaacagctggaacttcaacgccgtgagatcgaaacatccatacaacgtcacaatgacctcctgcagttgcgccagcaacaacaaatatcggtcaaccggtttcccataagcgaacttcgcaatcgtaaagaacaactccgcctacaacgcgaaagattgcttcaggaaattaccttgacggaaaaactagataagacccggcaagaactgagaaaaaggcaagataaactgcaacaacaacaacaaaatttacaagcactcaaagttcgcctgaccgaatacaaaaaagaaatcgaaattgcagaaataaaatacacgaccatacgccacactttggaacaagcccgactatcggtttcagaaaatgtcgttcgactccgggcccaactggaagaaaataccccttgcccggtatgtggcagccaatcccacccttatgcggcacatcatcccctggccgacggcttgctcgaaacactcgaaaaagaagtcagacagcatgaagcagcatataatcggttaaaaaccgaaaatgcgcgtcttgaagccgaacaccggtacctcggagaagtattacccgtattacaaaatgaaaaatatgaatcgcaagaagaatgcaaagagatttgccagcaaatcaaggagcttaattcggataggtctgtttctaacggacaaaatcggataaacctaagagaacagctgaatatcagccaaaaagaattggaaagtatttgtctgaaagaaaacgaatgggagcaacggcaacatcagttagaaacgctccaaaaagaactggataaaatacaaaaccaaaacaatgccctgcaaaaaacatttcagcagacccaggaaaaggtagtcggtcaagccactgaactatctaaattgcaagagatcattgaaggcctgaaagtccagcaaaatatttcactggaaaaggtcgctccttttatgcatgcacctacctggcgacaacgctgggaagataactacccggatctcaaacaggaactgaccacagctgctcaaaaatggcaaactaaaacgctgcaatcggcagaaaatgaaaaactattgcttcaatcggtagctgaatacgaggagaatcagaaaaacctggaatccttccgccaaagcgaaacagaagccgcagaggctttgaaaaaacgctctgaagagactttgtctttcatccggaaacgggcccggcttctgcaaggtcaaacggtcgatgaaaccgaacgttattggcaagagttaacagaaagggcgactcaggaactggaaacagccatccggcagaaagaacagctttcaggccaatcggaacaactaaaaggaaaaatcacccaactccgtaccacctgtgaccaatatcaaaagcgcctggaaaaagccacccggcaattaggcgaatggctggaaaaatacaatcggacagcccctgctcagctaaccgaagccactctcatttcactattgcaagtggcacctgaaaaaatccgggaagaacgggaaagacaaaattacctccgggataaggtaacgactgctttggccactctacgggaacgtgaaaaacaattggccgatcatttacaatcgcccggccgccccgatccacaatcggaatcactttcctctttacagcgtcaatacaccgcattacaagaggaatccgagcgtatcctccaacaaaaaaccgaagtattggcaactctgcacacccaggaagaaaaccaaaaacaagcggccaccttaaaggataccctcgatgcgaaaacgaaattattaaaccaatggagcaaactagacgatctaatcggttcacagagtggctataagtttaaagagatcgcccaaggatatacgctggatatcctgttatcatacgccaatatacaacttcgggaattaacctcccgctatcagttgcagcgtatacccgatgagttggccctacaagtcatcgatcacgatctctgcgatgaagcccggtcggtattctctttatcgggaggcgaatccttcctcatctctctggctttagccttgggcttatcttccttttcttcacggaatcatttcgaagaaaatctctttatcgacgaaggtttcggcactttagacagcgaaaccctgcaaattgtcatggaagccctggaacgtctccgctcacaaggccggcaggtgggaatcatatcccacgtacaggaattgaccgaacgtattcctgccaaaatttgtctggtaaagaccggcaacggaaagagtaaagtcgttgtagaataaagaaacccctatgccggatatacaatattcggcattattttttatcttcgcgggagataagaaaaaatggtcagatattttattgaattagcttataacggcagccgataccacggctggcaaatccagccgggagcatcgtccgtgcaggaagaaatcaaccgggccctcagtactttgctacgccaggacatatacgtcgtcggcgccggtagaacggatacgggtgtacacgcttcatttttcgtcgctcatttcgatatcgaatgtgaacttccggagccgcaacaggtggtctataaactgaacggattactggataaagatattgcaatctacaaaatataccgggtacctatggataaacatgcccgtttttcggctatttcccgtacctataaatattatatcgataaaacaaaagatccgtttacctatccatttgcctggaaagcttatcccctgccggatattcaggcaatgaacgaagcctgccgggtgttattcgattatacggactttaccagtttttcgaaacttcataccgacgtcaaaaccaataattgtattatatatgaagctcagtgggaagagaccgataaacagctgatttttacggtaaaagccaaccgttttttgcggaatatggtaagagcgattgtcggtacgttgattgacgtgggaagaggtaaactgaccccagaagatgttcgcaaaattatagaatctaaaaaccgctgtaatgcaggtacttctgttcctgcacaggctctatttctttgtcatattgaatatccggaataaaaagacatataaaatgaaaaagatcatctttttatttataataagcagtctgatttctattaaaggaataggattaacactctctccggagaccgaagtcagtatcctgacttgtgctcccggcaacgaattatactctcttttcggtcatacggccatccggatcaacgatccccgacaccaaatcgacagggtgtacaattatggcactttcgacttctctactccccatttttatttaaaatatgcacgaggcctgcttccttatcagctgactgttcagaaattctcccatttcatatacaattatcagctggaagaacgtacggtctacgctcaaactatccggctggattcgctggaaaaacaacggattttcgatctgctcgaagagaacctgctcccgcaaaaccgctattatctctacaactttctattcgataattgtaccacccgaagcagggatatcttattaaaaagtttacccgacagtgtcgcctggaatatgccggatgtaaacaaaaatttctggaatctactggatgagtacttgcaagcttccccttgggtacaatggggcatacatacgatcctggggcaaaggggtaatcgtacggccactacttttcaatatatgttcttgccggattatctgatgtatggacttaaaaatgcccgatacgacggacaattgctggccgaacctgccgaagttttatatcaggctccggaaatgaacctatccaattcctggtatgggactccccttttcgtttttgctctaggatgcctgctactgatcctacttttacaatatgttaaaagccggtcattattgaatgtcatttcccttatttttctccttttcacaggaattgtaggggttttgattgtattcttaggaggttttacagcacaccccatcactgctccaaactggaatatcctatgggccaatccgctcaatttatttgtaatcccttttattttcaggaaagcgcttcctctattcatcagaaaatatctgaaattctatctggctatcctggctatagctataccggtctgggccattgctcagccagccgtacccatggcttctatctctttgattatcctgatgatctatctgtgtttcagactaagaaatgaaaaaagataaaaaatacccgcaaaactattgcagatttatagaaatgccctatatttgcactcacaaaacagcactggtggcatagctcagtcggtagagcaaaggactgaaaatccttgtgtccctggttcgattccaggtgctaccacataaaaataaagtagttacgaaagtaactgcttttctttttccccctgttttggaacgttttggggatcaccattataatggaatgcatgtatgctttcaacctccggatatcgtcaaaataaaagttacactctcgttttttgagattcactccacttctcccggattttgtataacagatacctgttcctgcccaagagtggcttaagcgtatcgctgtttttttaaacttctggctggcattctgaaccaaaggtttttacagccatatttctccttcgagagtctgccagcgatattttatccggatatcttgcaaagcttcatgaaccttctgggaaaagataatataatttgatggtatttatattgtttctccgaatgttcaccatcaagacggttggccgaagctaggcggaagatgcttacaagattttaaaacgtatgcttctacttatacttcactatcaatcaaattaataccccatattaagcgaacaagattcaaaaaaagggagtgaataaaaagtcaaaaatatccctctgagaattgaatattcgaaagaaatctccatcaggagtacgaataaaaagaggatgactaagactttttagtcatccccatcctatacattatttccccaacgtttttagaatcaactttttgagggctggtttatttggtgcaggagcattgacggaaacgattctgccttcgcggtcgaaaattagaaaccgaggaactccaacgattcgatactctttggcaaaacctttgatccagctgttaataaaaatcaagtggccggtaagttcttctgttgcaataatctttttccacctatcccattcgacgaaggttccgatgcagacacttagaaattctatctcttctccttccaactctttttccaactgtttgaaatagggtatcatcattcggcaaggggagcaccaggtggcccaaacatctacgacaatgacttttccgaatagttcagagagggccaatgaactgctatccggttgcattcctttgaaatcaacagcaggaatacccggttttgaccaagccaactgtttttcggttatttctaatccgttttgataggatttcccgaaaaatgtctttcccacactatctatcagctgttggtattgttcgtaataacgaaaacgcctgatttcattatacaaatagtgttgttgaaatgtagagtctatcaggcaggttgatttgtacttgaatgcttctcgcagttcgataggatctccgtatttgtaccacacgtatgttcgtaacatctctccggcataaggaagttgtaacaatgcaggttgttgcaatgttttttccggttgcattttttgataatagttggataatcttatcgtatcggaaagatttccggcatttcgttgcaggtaagcaagggcatagaaatcgacatcagcttccattttagcctttaacaaagagttgaaagtggcattgccggtagccttttccggtttgagttgttggcgaactcgaagcaaatcttccaattcttgtgtgaaagttgccggatctgtgctgtatccacctccgaaacgttcatatagaaaagcatgttcccggaccaaagttgcggcttgttcccattgggacaatgcttgattttcaggagtctgttctccttctaatatcattccattcgtttgaaagcgaagccgaatcgtttcgtttcctttcagatagaacggatgcataacgccctgttctgttcccaataaatagaaaccttcttgaggcaatggaacatttaaacggaaacagccatttgaatcgattagagcagaagcaataggaattaaactacccgcttgacaaccgtataggtagtactctttctgccggtttattccatcttttccttcgatggtcacagaagaagcactacaggccaataatcccatacaggctagtaaataaactatgagttgtttcgtgatcatattttgaatattgttgtaagaagtattttacttaaacgtatcattcattttaagaactgatagaatcgtgcactcccgttccccaagaaaattgtaccaatttgataaataatgctttttttactttgccttctccagtgtatactttctctgccggctgaatatttccggcttgtatcggatgcaagtagagtttgtattgtccgttttggtgggtagcaatgacaacataatcaaaccagtccgtattaccaccataaggagcaaatttaacatactccatataggtgatagtttctccactgccaatgcccagattctgaggaatctcttcaaaagtatctagtttacaagcaaatatgtcattacctttggtataataaatgatatcgttgttttcattgagtgttctaaaatctgcattcaatactcccttatcggaaggaatctttaccatttctttgatgggattgctgtttactcgattgatgagggtaccatctatgtttatcaagtaatattggtttccatttttcatgatagcatatgccacgtctcctggagcatatatattgggagatctactacctatgaaaattaattccatattcatgttgttgggtgaaatgcccgagttatctgtgtacattagaagggaagttcctcttgttacgctacagaaagaggaagagatttcatcatacaacagcggttgttttgccccgacagcatggtattgagaagacaactggtaattgccgtccactttaattgaaaatcgggtgtaaggggcactacttttcatcgctgggatggtgtagacgtgattgtcaatcacagcgtgaatatcactaggaccattaaacaggtgggttactttccgattttgagggaattcatagaagaagttgtcataatctctgattaatcttccactataatagtctaaagccacaatgtcctgttcgctagcgacaaagacagaactaatctttacgttagtgttcgttgttgaatcgaattcgctataataaagagtgaaagctaaagataccggagctccggccatctgtttaccgttgatactggagataaaatcgggcatggttttggtaggagtaatcaaatccaaatcggtgccattgctattttcttttaggacccaccaagcatctgtggtttctgttcccacggtcaggttgtatctctcataagcataaatacctgttgctttgtcctttgcacagaaaagcaaattataacttccggttcttaaactgatcttgtaatccaagtcctgttcataagagatagtgtctatgttgttggagccactgttgaatgcgataataccccaaaaacagtcgtattcccgattggccggtgtaatttggggttttagtgaaatggtttcgccaacagttcggttgtaggcttcttgtattcccgaaacagtgatttccaatttgtctgtatagtcgtaattgcctttatcttcataacaggcgatttctaaacaggctatacacaaggtaaatataaaatgtaatattctcataatttgtcaattaaaataaatcatctgattaaacgttgcttggaaaagtaacctctgcactattgctatcgttcggatcttctcgcaaaggagcttttccactggcgatatttaccaggtcgttattgaaggcattcaatgcttcctggaattttcctctccaaaaaatcagattcggtcgatcattggccatctgctccaaccactcttcgtccactttgtcttgcaataccttgatcatcagttcgtgtttcggtttgctgtaggtgcccaaatagctctgtgcagtgctatatcgagtccaattaacaggttgttccaattgatctgaaatatttaacagcataattaaatttttagcttgccccaattccaaatcgttggaagccaccaattgtattcggagacgaactttttctgttttcaaagaggtattacggagaactatgacaggaacatatccggtaatctctcctgctttgattttcaataatgcttttgcttcagcatcatcaaaggcgatataatgtttcccggcaacggcagaattgctccattccgtaatgatagaatcagtcaaatagccttgatcatcgtaattgtaggtaacatcatatcccggaatttgcacaacttcaatctgacgatcgtggtcagccgttcttccggagatagagacaggcaaataaacggtgtctcgattttgagttccccaaatgaaagagtaggtcatttcgtaattccccgcttctttcgggctaaaactgatacgtgtgacatcttgaaacaagaatcctttttcttcctggcatcctgtagatgcaatgcccaaaaacagtataaataaatatgttacttttttcatatgatattcaatttattggatgtaaagactttctgctttcggtaaaggcaatacatagattaatgcagatccgacggtagaggttccgaaaattttgcttctacccaaacgtttgtaagcatagaaagcttgtccttcgccgtaaaattcccgattgtattctaaaatcaacgtttctgataattcttccgtgctgccaaaag

SEQ ID NO: 6112 - DNA, 2611 bp, Unknown
  gut microbiota DNA sequence
gaataacgtaaaaaaaataaattttttgtcacattattttttgaattcagtgtcattataataaaaaacaaaattagtgggaatggaaaatagaatttgggagattatagcagcttcaattcatggcgaggagttatctcaggaagagataagtacattgcaagtttggctggacgagaataagcagaaccgggatgaatacgccaggttgcaaattttttatgcagagaacaagggtagtcttacagataatataaatgtacaacgcgcttgggaagataattacgctagaagaaaagctggtaaaatgataaggcttcgccggaaaattgtacgttggggatatgcggctgtcgttacattggttattggtgttggtgtgttattattgacagaaaaagatgatgagcaggctgtaaaagttgaatttgtagaatctcagattgttcccggctctccgaaggctgtgttgaccttggcttccggcgaagagttggacttgcaggaagagggacaatttgtaagcaaggatagcagcagaattcgcaatgtggggaatgtacttgaatatgaggcaggcgtaaagaagcacggagagaaaaagttggagtataacactttgacgattccgcgtggaggtgagtaccagttgaaattggaagatggtacgaatgtttggttaaatgcagagactgagttgcgttttccggttgcttttggtgacagtgaacgtagaatttttctgaaaggagaggcttatttcgatgtggcaaaagaggcggaacgtccatttgttgtttgtgtgaatggagtggatgttacggcattgggaactgagtttaatattgcagcagtacaaggtggggatgaggtgttgacaacgttggtaaatggttctgtgcgggtagtgaatgaagaaggtgcagactgtattttgactccggcggaacaggccgtttgtaaaaaaggcgtggtagggattgaagtgcagaaagtgaatacgaatctttacacttcttggaaggacggatattatgcttttgacaagcaaccattgggagaaataatgaggactttggaacgttggtatgatattcatgtggtgtttgcggattctgtagcgggaaaattgcgtttttcaggacggttgaaaagatatgaggatattgataatttattaaccatgataaaactaactaatgacgtagattttgaaattgcagaacgggtaattattgtaagaactaacaaaaaccggaaatagggaggtatttccggttgagaagtgatgcctcatataagccggcaagcatttgaggcaacgtttaattttaatttaacaaatgtatgaaaaaaagattattaaagaatgccatgttaagaaaaagaatatggctgcgtaaaatgtttttgcgtatgaattatttgttttgtttgctagtattaggggcactttctgtttctgcagaagtctattctcagaatggattagttagcttgaagatgaaggatgtgtctttggtaaaagtttttaatgaaattactaagcaaaccggttatgattttttgtacaattatgatttggtacaaaataaggggactgtagatgttaatgcaaaaatggtggatttgaaagactttttgcatgatttgttaaagggaaaaaatttagggtttgaatttcgtgatggagctattattgttcgtggtgagtctgtacgattggatgatcaaaagattaaatctaggacaataaaaggtattgtaagagataaaacgacaggagatccattgcctggagcgaccattaagattaaaggaacttcgttgggaacagccactaatatggaaggtaaatttgagttgacagttgttgataattttattgctttggagatttcatttgttggttatgagactgtagaggtgactgtgggcaagcgggaatatttggatgttttgttgaaaactgaatcttcgaatattgatgaagtcgttgttactggtgtatatactcgaaaaaaagaaagttttaccggttcttctcagacatataaggcggaagaattgaagagtgtaggaaatcagaatttgattcagagtttgaaagtattggaccctgcttttgctgtgttagaaaacaatgagtttgggtcagacccaaataaattacccgatttggaaattcgtggaaagagtagcattgttggtttgaaggaacagtttggagaagatcctaatcagcctctgtttattttggatggtttcgaaactagtttgcagacaattatggatttgagtatggacagaatagcatctgttactattttgaaggatgctgcatcaactgctatttatggtgctaaagctgcgaacggagtggtagtggttgaaacaaaagttcctcaagggggtaggctacgtttatcatataacggtaattacgaaatctcttttgcagatttaactgattataatttgatgaatgctgctgaaaaattggagtttgaacgtttggcaggtaactttaaatcgaatattgcagattatcaggagttaaaagaagtccgttataataaattattaagcaatgtgttgagaggtgttgata

SEQ ID NO: 6113 - DNA, 932 bp, Unknown
  gut microbiota DNA sequence
gcgagcagtttcgttatggatttggtggtagctataataaaatacaaggcgtgatgaaatcttctattcgtgatatttttagtgggaatcttgatttattgtatcgcgttgggaaattaacgttctctaataaaataagtgtggatgttacgaaatatactaatcctgttgtacctttttctgaatatgctcatgcaaatccgtattatcctaaaagaacggttgatggtatagtagaaaagtggttggagtataaagataatgaattcagtgcaacggatgcttcagagattgttggtaatccattatggaatgccgcattaagcagctatgataaaagcaaaatgtttggagttcgcaataattttaatttggaataccgtccatttgattttctatacataagaggtcgttttggagttgcaaaacaaacttccgattccgaaagatttacgtctcctgaggcaacggagtttgaccaagtggaattattgaagaagggttcgtataatgatgtgagaagagatgatttttcttatgatggggatttgaccctgacatatggacagattttcaatgatgctcatcaaatcaatgctgtattgggaatgtcgataagcgaaaggaagagtatttccaaaggtttttcggcagtaggttttccagagggaaattatacaactccaggcttctctaataaatatccggataatggcaaaccttcttatggtgatttaaagaaccgctctgcaaatttctattttaacggtggctattcctataagaataaatatttgttggatgcaaatgctagaatggatggaacttctgtgtttggttctaataaaaagtttacgacgacatgggctgtaggggttgcttggaatgttcataatgagaattttatcaaggataataccgatattcttgat

SEQ ID NO: 6114 - DNA, 4324 bp, Unknown
  gut microbiota DNA sequence
tcaaatatattcaaatatattcaaagttatacaatatttttaaatttacaaaatatatagtaactatttatcagaactgacgcaatattgtcttaaataaattcgaaaaaaacaaaataggaagtataaactaaaaaagctaaggtaacaactcgcctatttcacatagcaaattcaacttctttcactcaaataactgcccaaatttcccaaaaaacattaggaaatcgcgaaaaaatccggttcggacaaacattataatggctacagcacccagaatcagtttatctgcatagtattcaattagttttcaggatgtgatcctattcgtaagccacataaatatttttatgaaattttgtctaaaataaaataattcatgattacacttgcatccatcatttacattttgtagtattgcatcaaacatagatgttactttactgatattatcctcattttacgaactaatattatttgctatgccaaaaagaattatacttaattggtctccgcctgttcaaatcaatattccttcgcctgctcattctatactgaaagcatggcttgagaagcacgactacaaagtttcaatattatactggaatctatatttttttactcttcagcacgattttttattctccaatttaaaagcgtgtgacgaaatgtacaatatgctcttgtatttaaactatatagccttccgaaataatgatcaacatatatataatgaaattaaagtaattttacaaagtatcaacccgagacatttaacatcagaaccggatttttacgcccgctatatggagtctgcatacaagcaaatggaaaaaacaatagatgatttgttgtcctcaatagatttttctgaagtgctgtgctggggatttgccatgaaaatggatcaatggttatttgcgtcaattatcgccgaaaaaatcaaaaaaatcgatccaactatccctattattgtgggtggaattaataccaaagataacgcaataacatatttaaataaatttactcagttcgattatgctatttggggagaaggtgaaactcctttactcgaattgttacgttatctcgaacgaacaaatgatattaccactcttcagcaggtaagcaacatcgcatataaaagtaataatgagattttagtatcgaataaacggaataatcaatatttaaatatgactgatttggtattgttccctgattattctgatttttttgagacaaggaaaaaactgaatgtcgatagtcctgtttatataaccatagaaggaagtcgtggctgtcattggaacaaatgtcacttttgttatctcaatacggattacaaataccgtttaaaagcgatagacaaaataacacaagagatcaaatatatgatcaatacatatgaaattttcgaatttcaattcctggacaatgatctaatcgggaaagatatggaacgttttcatcttcttttagatagctttattgagattaaaaatgaatttccacgttttcaaatagtattagctgaaataataactaaagatctggattatgtaacaattaaaaaaatgttcgatgctggcattatatatgcccaaataggctatgaaagcgcaagtagtattttattaaaaaaaatcaacaaaaaaaatacattttcgagtaatttattatatgtaaaattcgcaaatttccataaagtaatattaggtggggttaatgttttgacaggtctcccagaggaaaccacggaagatataatcgaggcttgttccaatttgcgatttttaagatttttcttagattacaagatgtttcgacacgttactataccgctaaccgtcaactcctccagcgtgtattataaagaaattaatgaagatgatcctatatggaacttatacaaattgtcacatattattttacgtaatacttttaaccggaaagaccaatggaaaatatttgaattcgttcgtctaatcaacaatattcaatggaatagttttcatcaaatcgaaaaatattatttgacaaataaacacacatacagaatcgaacgcgaccaaaataaaatatcatacaaagaatatatcaataacaagaatatcaaatctttatcttggagtacagactctttggaagtggaaatattgtataggaccaatgataagccacgttctttcaaaaaactgcattcagagttagtagcatctgcaatcaatcgtaacaagtcaattccagacgaaatcagcctgaagaaaagtctggagtttttatataatgaagggcttgtctattacgacaagagctttgacgcgagcaatggagagaattatttcgaaaatattgtttctgtcattgttatcttctacccagaaactacaaattaaagatgaagacatgtggcatcaaagggcttttgaatatcctttcaacttatggaagtgtgacattatattgtataatgtttacttatcaaggagaagaattgaatcatcagcattttctactaggtatagctagcacaaccttactatgcgaggctttattaattgcatatgttagaaaacataagttcgatataatcgacgtatccatatttgttgcttatctatatttcatttttatgaatgaatataataatgcactatccgacaaatctgatatatattccgtacagttatttttcgttctatattttgcatttcgcattatattacattgtttccatgtaaagtatattttgatctgtttgttggctgttactgaaatcttccagtcactagttggaacaggacaattcttaggtatattagattcaaggcacacttcattttcggtaacaggtacttttcttaatccgggtccttttggaatttttctcgctgtacttggagttattatggttttgcatattatctccaattattctttatttgccgtatatcgaaagcaagatactcaatacgacaaaacagcaatgctttttcaagcatcctattacttaagtctgatagcatcaatttttatcattattatgctagtattatctgggagtcgaagtgctttgttgggattcggcattcccattgcaatattcattttaacgacaaggcgtattaggaacagaattaattatttaagacacaaaaaagctttacttgctataggggtattagccatcttaattattatggcaacaggctattatattcgaccagagtcagttaacggcagattccacatttggcaagtatccttgtgtgaattggacagcccaatggttactggtactggtattggtacattttccaaacaatatatcatagcacaagaaaaattctatgcaaaacatggttttgagtcaaattgggttaaatatgcagatactccttattacgctttcaatgaatatttaaatatcatttatgaaacaggtattatcggattactttttttcattttcattttgttttttataattaaaaaacagctatctggcaataatcgaatatttgcttatggtattatctctatattaataatttcatgtacttcttatccactacatttgattcccattataattgtattggtagttttaatgtctttaagagagaattcagatagaggtgttataccgtgtaaatttacgttattgatgttatcatctatgttcatttttacgacattacgattacctgattatctcgctacagtgaataccacaatgagatgggagaaaagcaaacatcgttccgaaatgtgcatattcgagataagaaaagaaagtgactttctggataactatgatcgtcttgcaaacaatgacaggtttttgcttgattatgccatttttttaaaaaataagatgaattatataagaagcattgagatattaaaaaaaggacatacaattagcaataaccctgattttgcactattgttggcagagctctatgcaagtctgggtaatgcatacaaagcagaacaatattataaaaaagcatttgcaatggttcctagcagactcactcctttgtatttattggctattttctattatgataataaacaatacgcaaaatttcgatgtctagctaaccgtattaccaatttttgccctaaaattagatctgttcatactgataaaatgaaaaaggatataattgatatgttagatatattgaacgaggataaatcattattataggtgtaaaataataagcaatgcaaatactcatgggtggttacatgtaagctgaaaagattgaactttaaatttattgttttgtattatcattatccattcttt

SEQ ID NO: 6115 - DNA, 829 bp, Unknown
  gut microbiota DNA sequence
aaagtccactagaatcagaatttaattggaccttttaaggcaaattatttcactgaatttatttaaactaaactcagggtaaatatagtttactacttgatttctatatgattatcttttagaaaaggaaccgattaggaacgctccgcggtcctcagtgtcatatttctactgaagaaccgtcttattttcagccacaaaaatagccttttatttttccactacaaaggaaaaaaatgccttttcagtttttagagaaagatctcaggggaatattttccagttgaaggtacttataaagtgtgcttttactcttaatttcaatttgttggcatatttgttttacagcaaatcctttttgatacaagagagctgctttttttactttttgctgggtttccggattcaagccctgaggtcttccgaatttttttcctcttttccgggctgcttcccgtccttcacgagtcctttccataatcacattccgttcgaattctgccagagccgcaaaaatatgcatcgtaaatttccccatataatcggtcgtatcaatattatctttgaccgaacgaatccgtatgtttttactttccagctccgaacatatccggacaatttcagacaggctacgggccaaacgatctaatttataaacaactaatacatcgccttcacgtaatagtgaaaggcaatgttccagttccggacgtttttttaccccggaaattttctcgcaaaatatttgtacgcaatcctgacgctgtaacacatccaattgcatatccagattctggtcacgcgtactcaccctggcgtaaccgatgat

SEQ ID NO: 6116 - DNA, 5234 bp, Unknown
  gut microbiota DNA sequence
attgtatcgtgctcgacccggaagggaagatcgtatgcggaggggtaaggggggctgaattggacgtcgttgtgcaggatttgcttggagaaaaagcgaaaggattgtaggtgttgagaagctgatagccggaaaggaaacggtgcctgtgttttactgcgggcaccgttttatttatcaaaggatttccgttccctttacctttattttatagggccattgggcatcggttggctgagggccttggggattccatcccgggttcatccggtgttcggcaggagctcccatgacgacgaaccaaagatggcttaaaggttggtctttgggggttttgaagctgacttttcctttacggtttttgtgtactttgccccggattgtctgtcctgttgcggtgactccgacgaaaccataacgccagcctgctttttccggtgattgaatgttataatcttgtccggccggggttaggcccgcaaaggtgatttgtacggttgtgccggctgccgggacttgcaggtggatcgcattaaatccgtaattttcaggacaccaggctttcctcacctgataccagccgtcttctttttcttccagacagctcctgaaatccgggaaagaattggcccatgggcgggtgatggaaaatacccgtttataatcgaaattgatcaggtgctgataagcatcgaacatttcgtcattgaattgttcctgggatagattttgcatccgcttataagtcataaccgggtcttcgcctttcttgccttgccggaataattcgccgataaacggtaaaccttgcctttcgctccaatattcgagtatataaggcgaacggtaaatgttctccgtatgcagaaaagctttgtgggtattctttttaaaagcatcccagtgataggtctcgtcatcgatccagtgggggttgacctgccagagcatccattgagctcccatttcgaaaatcccgttacctccccaggcgacaccttctccgtcggcgatcgactgtaattgaaaactgtgtcccagttcgtgagccacagcatttaatcttttgtcctgtagccggttcggagtagcccagaaagcaccgatcacctggtcgtaatcgccgccataggccgtcccttccagagaatattgaatcatcgccatcatccggtatttttcactttgcgatcctggtttgacgaatttcagggagtcgcggtaaaataggtaaaaacgttccagttgatatttcagattttccagatccacagccatcggatgtccctctaaatcgggaggagcagctaaatcgttcccgaatcctttttcccagaatatggccagattatccgtacaggacatgcgccggtaggagtagcgggaagtgtcggaataccaatcctggcctgcaaattctttcggttgataaatagcttttcccggaggaagaacaaaatgatcggattggccttgtgcctgggcagaccagctgccgaagccggtcgacaagatgaaatggaataaaatgaaatgtcttttcatcagttggtttttagtcaggaaatcccggattaaagtgtatgaattacattaattttgatctgtgagcaaaaatagttttttcccttcataatccttaggctttaggaaaaataatgctaggttgaattttttttctttctatttcgattccgggctttataccgtcagaccgggtcgccaattccgatcaccggagacgaatgagtaacgaaatatacctaccataaattaggagaaacggagaattaaagtttgcttttctttcattgttccatttctccattgttctcagaaaaaggtaacttgtgaggaataaaattagttttatcatcgatattcttcctgaaaaaaatcatcctttgtctggaagcggcggagctgacggcggaggaagctcacttcctgttgcagcctttccatgcgttccagcatatgatgaatggcgtcgatgccttcgatattgatcgagagatcgtaatacaggtggctatatctttccagttcccggagctgggaggcgagaagataccgttcgccgtcgacggtgcgtatttcgatcaaccctccttcttcgagcgaaataataaaagtcgggtcggtatggctcttttggcaatattcgttgaaaataattaattctgtatccatagttgaacgatctttaagttaggagttttgtaattcccggaataattccttctgcttctctgtgagatgagtcggtatcttcacttcataagtgacaaaaagatccccgaactgtccatcctgtttatatacgggaaacccttttcctctcaggcgtacctttgtcccattttgtgtttcgggcttgattttcatcttcacttttccgttcaaggtttcgataatctgttctccgcctaatacagcggtatagaggtcgatcgggacattcatatacagattgtcaccttcgcgtttatataccggatcgtcgccgataacgaaagtgatatacaaatcgcctgccggtccaccgttcatccccgggcctccctgtccgttcagtttgatcgtctgtccgtcggctactcccgccggcacggtgatccggatctttttaccgttgacttccaggatttgtttgtgggtctctgcggcatcgcgtaaagaaagatgcaattcggcattgaagtcctgccctttgaatccagccgaacttcttcggctgcttccccggcgttgaccgaatagggattcgaagaaatcggaaaattcaccttcgtttccgttgaagttaccgctgaaacctcctccctctgcagaggaccagtagccaccacccataccgccgaaaccgccaccgccacttcggctttgttgctgataacgttgcttttgagcttcgaattcatctgcatgtttccagttttctccgtaagcatcgtattttttccgtttttcgggatcgctcagtacttcgttcgcttcgttgatctcctgaaacttttgttttgctgtcggatcgttcgggtttaagtccggatggtatttccgggccagttttttaaaagcctttttgatctcgtcctgagatgccgttttgctgacacccagcactccataatagtcgatataagccatagtaatattttacaaaccattatttaattctgtaaatttacgatggatactaaaaaattgtaatggaaataagttaaaataaacttaaatgattattgcagcatttagccggatagataaaaatataaaaaaaggttcagggaaataaccaaagtaaaagagtcgttggtaaataatctttcaattctttcttcagattttttaaagctatttccaggtgtttttcgacagtacggggagataaaccgagttccgatgctatcgttacagccgttttacggtcaaaacggttcatcaggaatattttccgggcttggggaggtaaatgatcgatggcggtttcgatatgctgccggagttctgcttctacataatattcccaggttagcattcccgtaatatcccttttttgcaggattttttcctgatattcattccggattttcaagtgatccagatagttcatacaacggtggcggatagatgtaaataaataggcttttatatgatccgttcccaaaattcggttgtcttcccaaatgtggataaaaaggtcgtgtaccaaatcctcggcattttctgtgtttcctgtaaaacggctggcataaactaccagaccactgtaatattgtttgaacagggtttcgaatttctggtattcatcggttgagctaaaggacatcacatgtaaatttttcctcttgatgcaaaggtaaaagataaaatcagggtactgcaaaaaaattattcttttaactacgtatatttttgttttgaactgttttcatgatataagtcggataaaaatggataaaattatgagaacagatccgaaacaatcggatgagaaccgggaagaagccggactggaagaagctttgaagttgtgggtggagatccggcaggtagatcgaaaaaaaggttgggagcggttggaggcagaaataggccggcaatacggattacgccgacaggaaaggcgtcgtcgtttgggttactttcggtggctggctgctgccgttattttatgcttcgggatcggtgggctgctttggcttcaatctgtgcgaaagcctcaaaccgagctattagccgattgggataaacaacctcgtctgatattggaaaatggagaacaaattttgttaggcggggagcaggaagtgaagccggaagaagaaaacaggaattttgtgatcgatcgccggaaaaaaaatatcgtttatactaaccggcagggaggagaacaaaaaaaatggcagtacaataccctggaagttccccggggggctgaatatgaattgatcctggcggatggaacctatgtgtggctgaatgccgatacccgtttgcgttatcctacctgtttcaatacagacgaacggcgtgtgtatcttgaaggagaagcttattttcaggtgacgaaagataccgcacatccttttcgggtagagtcggaggcgcaggttgtagaggtgttgggtactcagtttaatgtgtatgcttatggacatgaggaacggacatatactacattggtagaaggaaaggttgctgtgaccgcttcggcttcggggcagcacgttcagcttatgcccggtcagcaagcctcgctcggccggcaaggaggggagatcgttgtcggtgaagtgaacattcagcaggtggtggattggaaaaatggcatgtttgttttcgatgatctgagtttagaggctattctccgcaaagtggcccgttggtacgatgtcgaagtattttaccggaatcagcaggctaaagcgattgtttttaaaggaaaccttccccgttacggagaattgccggaattactgaaagtattggagaatagcagtgaggtacatttttcgttaaaaggaaatactttgattgtagaatagaaaaagaggaaaaagttggtcgctttttcctcctgaaaagaaaacatctgttggtcgcagatgaattgtttaactaatgtctttacaaaattatgaaaaaaaatgcaacatgctggcttttcccttcgggaaagtggtggaaaattctcttaattagggatattcagtaaatgtccctat

SEQ ID NO: 6117 - DNA, 12578 bp, Unknown
  gut microbiota DNA sequence
ttctaaagaactggtattcgggttggatctgctggattatccttcggtatataccagtgagattgcagatcaccgatatttacctgtcggtagctataccgaggctttgttattgctggccgaatgtacgaatcgtatcggtgaccgggcgaaagctatggattatctgaatcaggtccggaaaaactaccgtttgtctgaagcgacagatttcgaccaacagttgaaagctacctggaaagaattgttgaagggggaattcgcttatttcgcttttttaaaacggaacgatctgtgtgaaaaagaactcggaatcgaagcctggcaaaagctcttgccattccctgagtcggaagtcggtttaggtggggcagaacagaatccggggtattgatcgttttatagttgcaacggttacagcaggtagatttgtttgctgaaaccgttgtaatcgttgcctccttttaactattaaagaagtagaattattccgctctttattcgtcttcggtgttcgtgttcagggaaccggtcgcctaactatccataatccgatagaggtgagccggtattttattctataaaatttttctaattcttcctttgccaggtcgtgttaatgtgagatgcagggttttatgccggaggaccattggagcaggaacgagtgtccggttagggtttccgaacgcccgaccggtggtgtttgatggaaacgtaacgtaaagttttttgtgtagtgaggagttccgccggtcagtgaaggaaagccttaccggaccggtccgggcgaccgggtctgacgacacagaacccgaaatcggaatagaaagaaaaaattaattctaccataaatttggagtgacggagaattagagtttactttacttttctccattgtttggcaaacttttatttccctgtaactaaaaacggtgcaatgttttaaaactaaacattacaccgttttaactattttcaccattttaagaaattatgttttataaaactatttcttttggtgttgtcaaggaattattttccgagcatttcgcaaatttcgttgtatacaaactctccggtaaagccgaacttttcgtccagtactttggctggggcagaatatccgaagtgatttacgccgtggattttgccgttacatccgaccaatccttccagagttaccgataaaccggcggtcaggccgaaatgaggcgtagaggccggaatgacttcttcctggtaagcggtcggctgctgacggaataaaccttccgaaatagccgatacaacctgtgaagcgataccttttctttcgagtaacaacttggcggcatcgatcagggtggccacttccgatccggatgcgattaggatcactttgggattttcaccgtttttctgtacgatgtaagctcctttttctgcttttaaagcttcggtataacggtcggttgcggccggcagatcgttgatattctgacgggacaatacgagagccgtcggagtttcggtattttccatcgccattttccaggccaccgaagtttcggctgcatcggccggacgtaaagccagcatgctcatttttccggcgtggttctgcattttttccagcagacgcaactgggcttcgtgctcgatcggctggtgggtaggaccgtcttcaccgacccggaaggcatcgtgggtccagatgtatttaaccggcatctgcatcagagccgataaacggaaagccggcttcatataatcggagaatacaaagaaggttgcgcaggcaacatgaataccgccatgaagggcgataccgttacagattgcagccatagtcaactcggcaactccggcttgcaggaatttaccgctgaaatctcctttcactaggttgcgggctcctcctttgataaaaccgtctgtcttatctgaattggaaaggtcggcagagctgacgatcatattttcaacttcctgtgccagtgtaaccaatacatcggctgaagcctgacgggttgctatattggctttgtgtgcaatagctttataatcgatagcaggcgcttctcccgacataaaccgatggaatttggctgctaattccgggttggctttttcccaggcagcttgttcggcttttttctgtttggcctgagcccgtttctcttccagtacctgcgcataatattcctgtacatccgggaagataacgaatggattctgaggatctccgcccaggttagccaccgtattttcaaaagaagctccggcagcgctcagcggttgtccgtgagttgatactttgttggagaaatcttcttcgttggcaccgacagctcctttccccatcagggtgtgtccgatgatgagtgtaggacgttctttttcttcctgtgccactttcagggcctgacggatttctgctgcatcgttgccgtcgatggtgatgacctgccatccccaggcttcatattttttggctgtatcttcgtgggttacttcatccactttggtagaaagctggatattattcgagtcatagaacatgatcaggttagcgagtccgagtgtaccggcaatacgtcctgcaccttgggagatctcttcctgaatgccaccgtccgagatgaaagcataggtcttgtgggccatccattcaccgaaacgggctaccagaaaacgttcggcgatagctgctccgacggccatggcatgtccctgacccagaggacctgaagtattctctacaccccgttttacgtctacttcgggatgaccgggagtgatgctgccccattgacggaagtttttcagatcttccatgctatatttaccaatcaggctcaacgttgcataaagcatcggtgacatatgacccgggtccaggaaaaaccgatcccggtttacccactcgccatcgtccggatcgaaattcagaaattcagaatatagcacgttgatgtaatcggcaccacccatcgctcctccggggtgacctgattttgctttttcaaccattgaggctgccagaattcggatgttgtccgccgctctgttggtagttgtattcatgatataaatttaaaatagatttttggttttttgcaaatttataaataatcttttgaaaaataaaagtaaaaattacacttaattttacttttcttcttccgtttagagattcagctctttaaactggtgttcccaccaagccggttgatctttcagatatttggcgaagtaggagagaatcgtattgttccacaggatacgctgattgtaatcgaccacggcatgatcggcatctttaaccaatactaattcgacatctttacccaataatttcagagcagtataaaattgtatactttcgtttgtcggtacattgacatcttttgtaccgtggattaacaggataggcactttcacctgatcggcattgaaaaggggactttggtcgacatagatatccttacggttccaggggaaagcgtgtgccgaagcgttggtactgtagccgtaaccccaatatccgcctccccaatagctagagatagaggaaatgccggcatgtgagatagcacaggcgaaaatatcggttcgggtggtaaggtattcggtggtaaaacctccgtaagaagctcccatacaaccaatcttagaagcatcgataaacggatgggctttggcaaatgctttggtcgaggcgataatttcgtcggctgtgattttaccccaattgttttggtggcgggcagaaaattcctgtccgtatccgatggttccggaaggttgaagcacatatacgacataaccgttggccgtatagaggttgaaaggccagcgtccgccgaaactacgggagacgggggtcgttccgccgtagtaataaacgatcagcggatattttttggccggatcgaaatcggcaggcagataataacgtccgtcgatcaccgtacctttcttatacttatagtcccagtctttcatctctccgaaaacaatattccggtattgctcttcgttgggatccgcccagagagccgcttgattatcggttaggttcaaggtatagatccggggaggataatcggtgttcgaagcggtatacatcattcggtcggcatggctggcaaaactggtccggagaatcatgtctcccgggcattcgatccgggtgaatttaccgtcggcatagcaatacagacgtacgaaatcggcatcggtcgtttttatatagatattaccgtttttatgccaggtcatttcttccaccgaaggattgaaatcgcgggtgatcgcgtccacttttttagtggccaggtcataaatatacaattgggtatcgtattggttggcaatctgatttttcccgatgttttctcccagtttaccgaaggccgaagggccgccgctgatcagcagttttttgccatcgggagagaaagtacaggatatggaataaagccggtccttccaaagggtatccagttgttgggtggtgatatccatcagataaatatcttgtttgttatagggatattccgtataagccgggcgtgaagtggagatcagtaattttttaccgtctgcactgatatccataagcgaagtgctcagatttccccaggtgagccgggaatggaggccggtagcgaaatcgtacttacacagataactccggttacggaaatagtcctgccgatcttgtatgccgtccagtttacgcaattcccatttgggatcgctgtagttttcattggcataatagatcagataagaacgatcgggtgaccagatgcagctctgaatttgccggtcttctttgatcagacgggtttgtagttgtttttccaggtcgtaactatataaagattgtccgttgccttctgcttgcaggaaagaaagtttgtcctgatcgggaatccattgcagattacgtacgttattgccataaaaggtatagacgatttctttgtcggcgatccggtatacgtaggtattgttactgcttcggccatctacggtattggtgatcccgacaagggcatattttccggtgggggagacagacagatgggatacttgtttaccgttgagcacatcgtaaatattcttgcctcgttgcggggacagagagaaaccgaaagggagctgttcgtaggctttgtcggctttaaaattagcatacaatacattgcctccctgagtggccgtttttacgataatcgtgtgttttcctggaatccaatcgccgtgaacgattttttctacgggtttattatccgcagaaccggctttttttactccatcgatatagacttcggcctgaccgaatagccggaaatgaaaacttccgctcatccattcggaattgctgaaatagaccgcgtaataatttagcgtcggttgatctgttttttcaccggctgttacggtatcccggttcatcggggccaccgtccaccggagccggtgaaaatgattctcctttgaatcggcatcgggaaccaggctgccgatatttactccggagtaatcggtgagcatggcatctgtaaatacctggtctttgacattttttacatggctcaaggccggcttctccatttttataggtgtcaggctcagccactccttgatatcctgtgcgttggcagtcaaggaccctgcaatgaataatgagagtaaaaatcctttgtttttcatcgatgataaggtttatcaggttttagctttttaacattttttctttctgcgaaggtatcgctttttgattgaaaagaaagttaatgtctagttaaacccggagtaacttaatcgttcttttaccgtacaagtcagaaaactttaagttatgcgaatattgatttgtctgttagccttagcggtgaccctgacctgttgtaagtcgaataaaagaatgatacgatcggaggtagggtatgtatctacccaaccggtagaagttgctgtacaggagaaagtacaggataccttgatcgtggaagaagaaccggtgacggtgaaaaaggagaaagtcggtttgacggacggtgccgatttgatgcggtattgtattattgtcgggagttttatttaccggcagaatgcgatcaacttgcggtcggacctgatgcgccgcggatttttgggttgttcgattatgcagaatagtgaagggatgtaccgcgttagtgcggtttgtgacgatactcacgccgatgctgcccgggagcttatccgtatccgtagacaatatccgcagtttcgggatgcatggctcctggaggtcaaagaggactagtcttcgagcatcgaatcgtggcggttgactctcaccactccttccagatgttttagtctggaaatcaattgggacaggtgttcggtattatcgatcaggacagtgatattaccatcgaataccccctcggcggcattgatcgaaatggcccgcaaggtagcatgcggatctttggcgatcaattcggtaattttgttgatgatattaccgtcctctttgcctgtcagattcaggacggtttgataagaagtggctccatcgttggtccagcgggtcttgacgatccggtaaggataacggcgaaccagctccagggcatttttacactggcggcggtgtactttaatcccttcgccgatggatacgaaaccgatgatatcgtctccgtataccggattacagcaacgggcgaacttatactctacattatccacatttttatcgatcagcagtacatcttcatcgattttttttggacgtaccactttgatatctttaggcggaacgacaggggccggcttttcttccacctgcgtcaatatctctttgatttcggaaggatcgtgcttgccgatagcgatgccgtggtaaaggtcgagagcgaacttgtatttgtagtgctgcatcagtttgcggatcacttcgtcgttgaattcgattttccagtttttcagacggcgcatcagtgtttccttgccgatatcggcctggtggttgatttcttcattcaggtattgacggattttattccgggctttcgaagtgactgtaaaactcagccagtcggctttcggttgctggttggcggcagtgataatagaaacctgatctccgtttttcaaaacatatttcagggtttcattccggtgattgacaatacctccaacacacttgctcccgatattggtgtgaatagcgtacgcaaaatccaataaggtggctcctgcctgtaacgttattaaatctcctttgggagtaaatacatgtacctctttatcctggaggttgattttcatatcatccagtaattccagcgcattctcattattgctttccaggatttcgcgcaattcgttcagccagttttcgataatcgaatccgaagatccccctttgtatttccagtgggcagcgaatcctttctcggcaatctcatccatacgttccgtccggatctgtacttctacccagcgtttgccaggccccagcacggtggtctgcaacgattcgtatccgttggatttgggtacagaaatccagtcccggagacgctggggattaggcgtatacttatcggttacgatagaatatacccgccaacagtcgggcttctcattttcgccgacactgtcgataatgaaacgtacagcaaaaatgtcgaaaatttcttcaaattcaacctggcttttccgcatcttatttaagatcgaggcaatcgtcttcgtgcggtatttcattttaaatttgatacctctccggttcatttcttcggcaatcggagcgataaattcggcaatgtaagcctcccgggcggttttcgattccttcaatttttgttcgatctcccggtagatttggggattggcatagcggagagctgtgtcttccatctccgatttgatattgtacaatcccaatcgatgggcaaaagggatgtaaatatagctggtttccatggccagctgtttttgtccggcctccgaaagctgcgcagcctgccgtaaagcatagagtttttcggccaggaagatcagctgtacgcggatatcttcggcaaaactgagcaataattttctgaaattctccgagtttacaatccgctgggtggcataaatgtggctgatatccttcagtcctttgatgatttgctctactttttccccgaacatctcccggatttgctccagggtgatcatttctttttccactgttttgtggagcatggcacaaatgatagaagtccggcctaagccgatttcctgggtaatgatcagcgtaatatccaaaatacggacgatctcctgatagtttaattccgaagcttcggtttcgttttggatggctatcttaaaggctttacggatcaaccggatgtcttcgctcgaaatcaggttccggcaggattttaacacagccgtatatttactcaatatgatcggacgataggtttgttctgtcattgcgttcataagtgaatcttgttagaaggtgtcgcttttttctgtttgtaaaaatagcgattcttttgaagattatcgatccggcaattctatttttgtgtaaaagtttgttgagaagtgtgtgtaaagaataagtgtacagaaatatgaaatcagaaatgaactgctgtaatctgctaccatgctgttatcccggaaaatccggaaaatctttatcgggccgcttggaaaataatacgttgaagtataaacaggaaaggccggtttaaaattacgaggatatgcttgaaatcaattttttatgtatatttacgacgatcaaacgtgggattattttgaaccgtatacaactttttggaaaggataaaaatataaaatatgacaacaaaagagagatatgaaggcgtattggggtggtttgccgggaaaatgccggtagccgagagtgaattgaagtataacgaccctttcgaattgatcgtggcggtgattctgtccgcccagtgtaccgacaaacgggtgaacatgacgactccggctttattcgaacgctttcccgatgcaaaggccatggctgccgggacagtggaggatatctatcatttgatcaaatcaatttcctatccgaataacaaagctaagcatctgcatgaaatggcccaaaaactggaaagggattttcagggaaaagtgcctgaggatatggagttattacaaacgcttcccggtgtggggcgtaagacggccaatgttgtgatggcagtggcattccacaaaccggccatgcctgtggatacgcatgttttccgggtatctaaccggatcgggttggtgaataacacaaaaacgcctttggaaactgagaaacagttggtaaaaaatattccggcggagatcttgtcgacggctcatcattggctgattttgcacggacgttatgtttgtctggcccggaaaccgaagtgtgaggaatgtggaatccggcaatggtgccgtttttttcagagtagacggtgaagggggaacggggaatggagaaaggaaacctcccttctcctttttcctttctcctacatttacttgtaatatatagctgcccaggctccggatttcactttgccgacacccgatggcggacaggtatcgctgtacagtgtaaaaggaaaattgaaaatcatcgatttctgggcttcgtggtgcggaccttgccggatggagaatcccaatatggtgaaactatacgatgattttaaagacaagggccttgctgtgattagtgtatcgcttgacgaacgtaaagccgcctggacgcaagcgatccaaaaggacggtatgccgtgggtacacgtgtccgacttaaaaggctggaaaagcgaagtggtgaagttgtacaatgtagattccgtaccgtgtattctggtacttgatgagaataaccggattctggccaagaacatccgggcggaaaaattgcgggcctttgtggaagagcggctgggaaaataggtttgggtcgttatatattacgatggagttcatacctgttttttattataagccggtttcgataggaaaatctgtaggaattatttttcttacagattttctatatatgtttatcctaaaaatgtagaattattccgatccttgttcgtcttcggtattcgtgttcggggaccattggagctctgtcgagtgttgtcttgctttttctgaacgtccgaccggtggtgtctgacgagcttgcgaggagttccgtcggtcagtgaaagaaaaagccagatgaccgacagaagcgaccgcgtccccgaacacgaataccttcgactcccgtcatcactgcctggcaagctaaaccggacctgaaaaccataaatttcaacgaaaaaatattttccggtaaagtaacccaactatccataatccgatagaggtgagccgatattttattctataaaatttttctaattcttcctttgccaggtcgtgttaacgtgagatgcagggttttatggcggaagaccattggagcaggaacgagtgtccggttagggtttccgaacgcccgaccggtggtgtctgacgaacgcagtgaggagttccgccggtcagtgaaggaaagccttaccggaccggtcctggcgaaccggtctgacggcacaaaacccggaatcggaatagaaagaaaaaattatacctagaattattctggtacttgtttgtctcccgtgacccggtcgcttccgccggtcagtgaaggaatctttacggtaaatgctccctttcagcaaaagatttactcgatgatatgcattcccgtcagttcggaaaaatgacgcaagaggataacttttatttcagataaatcgaccggatgtcctaattccttttccatggaagtcactcctttgtcgacaaatccgcaaggatggatataattgaaataattcagatcggtattcacatttaaggcaaaaccgtgcatcgtgacatatctggaacatttcacaccgatggcacaaattttacgggcccggggggtatccggttcgagccatactccggttgctcccgccaaacggaagccctgaataccgaaagaggcgatcgtgcggatcacaacctcttccagccggtctacataatcttttacccctaacccgaaactctccagatcgatcaccggataaaccaccagttgcccaggaccgtgaaaagtaatatctcctccccggtcgacttttataaattcggcatgcttagcccgaagctgtatcgcgctgatcagcatattcgcttcattaccgctttttcccaaagtataaacagggtcgtgttctacaaaaagcaagtggttttcgggaattttattccctgccttctccgctttcactttctccagcagccgttcctgcaattcccagacttcccggtatcctttttgtcccaaatctgcaaataccgtctttttcttctcttccatacccttgccggttttcactttttgatatgtctttccgcatgataactggatctgaccaacgggccgctttctacaaaggtaaatcctttcctgagcccgatctctttatactcttcaaacacttcgggccggatgtattctttaacttcggtatttttagccgtaggttgcagatattgtccgatcgtcatgacctgacatccaacatttctcaaatcatccatggtctcgagaatctcttccctggtttcacctaaccccagcataattcccgatttagccacacactgactagcagcgatttgtccgatcactttcaaagaaacttcataagttgccctactccggacactatcggacaaacgtctcaccgtctccagattatgcgatatcacttcaggtccggcatcgataacctgctgtaccaaatccgtccgtccctggaaatcaggaatcaatacctccatcgtcgtatccggattttctttccggatagcccggatcacctttacccaatgcgaagcacccaaatcctccacatcgtcccgatcgaccgaagtgatcactgcgtgcttcaaaccgagtaaccgaatcgaccgggctacatgttcaggttcctgaggatccaaaggagcaggatgccctgtcgtcacattacaaaacttacaggcccgggtacatatattccccccgatcataaaagtagccgttccgcacccccagcactctccctggttaggacacctcccgcttgtacaaatcgtattcagatgatgcccccggatcgtgttcagtacatcgacagaaagctgtcccatcggcaatttgatcttcaaccattccggttttcttctggtattttccatttctaaagtaaatcgtattcgattgcaaaaataaaaaagaaaaacgtaaaagccgggagatacataaaaaaagagcgcatatccttatgcgctcttcgctaactaacccttaaaactgtgaattaaaaatgtggttattcccgtttaataccacttagttgttgtccatgatggaatattttgttgttgttttcatttataagatgcaacaactagagattggttgcgtcggaaatattatt

SEQ ID NO: 6118 - DNA, 730 bp, Unknown
  gut microbiota DNA sequence
atgagttatgaaatgcagtaggtaatgatttagcgacctatcttctgcaatgatatacaacgctttgcataactcgaataacctgttgcaaagataagagtatatcgtgaaaaaaaagaattttctccaaattattttcgtagagccgcccgtttgggtggctttttttgttttcaatgtattctgttcctatgctaaatgctgtctccgaagactgtgttttttgttttcgccctacttctctccctgcacatcctccacttatgcctgtgtatcatgtcgggatcgcttgttcgttgtcagcggcaaaggtagttccgggcttccacggacaaaaaaggtcggtgcggcaagccgtttagacgacaatctccacacttccatttcattgcaggtagtattctcgccataaaaccttgtttgtcctaagccctacctttttacgccactgaaacgaaaacgaccgacccgacggaaagacgcataaaaaaaatgtcggatatgcgagaagcagggaaaaagaaaatggaaactcaactccctcacctctggaatccgcataaaatcaaaaaaatcagacaagatgaaactgagatacagaatatcaatttgggtggcacttgcactcgcaggctctctcctttggggcggaagcgtttggctttggctggcagggatatgtgcaggaaaattcctctttcggttgctcctcaccatcgttttggctatc

SEQ ID NO: 6119 - DNA, 821 bp, Unknown
  gut microbiota DNA sequence
acccagagaccaaacaggtgcagaacgaggtcttcttccgtgccaacggcatgaagctcggcgacgtggcacagtcgatgaccatctacgacaacaagggctgggtcgtggtgaacaactcccacgtgattttcgccatcgacctgaacaccttcaaggaggtgggacgcatcgagaatctgacctccccgcgctatatccatttcctgagcgacgagaaagcctatgtcacccaactgtgggacaaccgcatcttcattataaatccgcgaacgtatgaaatcaccgggcatatccaagtgccggacatgacgatggaaagcggctcgacggagcagatggtgcagtacggcaaatacgtctattgcaactgttggagttaccagaaccgtatcatcaaaatcgacaccgagaccgaccaagttgtcgatgaactgaaaatcggcatccagcccacatcgttggtcatggacaagtataacaagatgtggacgattaccgacggcggctacgagggcagcccctacggttacgaagccccctcgctctaccgcatcgacgccgagaccttcactgtggagaagcagttcaagttcaagttgggcgactggccctcggaggtgcagctcaacggcgacagggacaaactctactggattaacaaagacatctggtgcatggacgtgacggcgagccgtgtgccggtgcgcccgttcctcgaatacagcggtacgatttattacggcttgacggtgaaccccgctaacggggaggtgtacatcgctgatgccatcgactaccaacagcagggcatgatatac

SEQ ID NO: 6120 - DNA, 2115 bp, Unknown
  gut microbiota DNA sequence
atttaataacaaatgtatccaaaaaatcaaatctattgataaagatatcacaaattcatttattcattataactttacaaacaccttattagatacattacgaaaaaataattcgaatatttgagaaccctatgaccgacgttcattcccaagaaacccggagctataatatgtcccggatcaaggcaaaagacaccaagccagagcttcttgtccggaaataccttttttgtaaaggtttccgttaccgggtaaatgcgaaagacctgcccggtaaaccggacatcgtccttcctaaatacaaaacggtcatctttattcatggctgtttttggcacggccacgaagggtgcaaatattttgtcatcccaaagacacgtacagaatggtggactgaaaaaatccggaaaaacaaggaacgggatcagcaggaacacgaagccctccgaaaaacggggtggaatattataacagtgtgggaatgtcagcttaaaccaaggaaaagagagcagactctggaaggtatcctgcttttattgcaaaaaatatatcttgatctacaaaaaaaacctattatcacaccctatacacctccggcaacagagtttccgatagttgcagaaccgccatcgccttacggagatgattaattttgtttttccttaacaaaagaagtaaaacccgataaagtcataattctggactgaaattctttatcgaaagaattcagatattgagcaggaaccaccaggcagacattttcatgatacatttctgaaagctgatttctggaaataccctgttgtaaagtaaacaaatgttttaccggaacattatcagcttcattcaatacctgtctccatcgatctttacaagttgttttggctcctaaacacactaatttatctttcggaaaacttttatcatgatattccctcccacccggaaatatgaaatccggttttttattatcctccgttacaacctgagcttcgaaacgcaaatccgcacaagtaaaaatccgtgccaaatgatgttccaatgattttcccgctctgctcttccggcgatttaaaagggtattggaaaaagctatcaattcgtccatactttcaaacggagttctaagcctatccccataaaactttgtttcgaatgctttaaacaacttatattccgcatctatccattgcagtaaccatttatcagcttctttgttgatcatttcatcagataaaccataagaccggataacacattctctggcaccatcagacatcgtagacgtagaaggaaaatcaaaatgttggtttataaaatcatagaacagcactttaatctgaacctccggttcatagaaatttcttttttctatcaaccggtttgtctggtcaggtgaaatactaaaagaagccagaaaatcttcaatatcctcatccgctgacaagataaatcctgaataatcatccgaatctatctgacaaattataataagatctccaacattgtcctcctgaaaaaaaaggaaattctttcccaaacgggttaaccgatactcattacgtgtaccgctgccataataaataaaacgactaacagtctcaaaatcattctgccatctgatttttataaaacgatccttattagtcccctttattcccggagcatcaaacatcagcggccaacaatttttaggaatataaaaacctgcctgatgagcaccggtagccccgacgtcattagccgatataaatttacaaaaagcatatcgggccttatttacagcagtaatggcatagcctgtcatttcattcatccgggtggtaatttaaaagggattctgtaattttaccggcaacagccgtgatcaaaggtactacgaccgagtttccacattgtttataggcttgtatttcggatacagcgtcaataatgtatttatcctcatatcccatcaaccgggcacactcacgaggtgtcagacgacgcggatttttcccttcttcctgcggaatcagaatttcagctccatccttataataccttgcacttaaggtccgcgcaattccattcttatctaccaaaccaaatccgaaaccatttccttttgctttg

SEQ ID NO: 6121 - DNA, 363 bp, Unknown
  gut microbiota DNA sequence
atgcttcggttgcgcggataatgcaggtaagctgactgccaagaaaacctgctaagcttcaggtaatgatcatccgtactgtaaacggacacacgtgatcaggtagaaaatactaaggcgctcgagagattcatggttaaggaactaggcaaaatggtcctgtaacttcgggataaaggacgctcttgtgaaagagccgcagataataggcccaggcgactgtttaccaaaaacacatggctatgctaattcgcaagaagatgtatatggcctgacacctgcccggtgccggaaggttaagaggagagctcagaggtaactcgaaggtttgaattgaagccccggtaaacggcggccgtaact

SEQ ID NO: 6122 - DNA, 869 bp, Unknown
  gut microbiota DNA sequence
gtatcttatacttttaactgtagaaaaaatttgccttataattatttttttgcttgttttgtaaaaaaattttacgaggtggaaagtataaggtattatgaacaagaggctgatttcaaagtcgctgtagattgtattatttttggtttcgatgaggaaggattaaagttgttgttattaaagcggaattttgaaccttgtaagggagaatggtctctgatgggaggttttttgcgggcggatgagaatctggaccaggcggcggaacgggtattgagggattgcaccggcttggaaaaagtttatatggagcaattgatgacattcagtgatgtggggcgtgatcctggagcccgtgtcgtttctgccgcttattttgctttgatggatatccgtaattatgataaagaggcggtgagttcatataatgcagcatgggtactgttggaacaagtgcctcctctgatcttcgatcacaaccagatggttacgaaagctttggggcgtttgaggagacgggcgaccaattgtccggtaggtttcaacctgttacctcaggagtttacgcttccttctttacagatgctttacgaggcgattttcggatgtgaaatcgacaaacgtaatttccggaagaagatccatagcatgaatatcctgatcaatacgggtaaaaaggactactctacttcgaaaaaaggagcttatctctactctttcgacgaagaaaaatacaatagtatgctcgagaatggatataaccagaacttttttaatatttgatattattagagttataaagcagggcgaccgcaccaaaattcctctaaaaagtttatcattgcaaaatgaatacctctaattatttt

SEQ ID NO: 6123 - DNA, 391 bp, Unknown
  gut microbiota DNA sequence
atgaacgagtttcggctatagagggtataaaagtgattggtcacatcaccaaaccggagctgggatgtgccctgattacccgtgacggacaagagtttgagctgaaagcgcaaggttggaatccactaaaagaaaaataattttaattaaacaacactgataataagcaccttatgtttttatcagtgtttttttttagaaatagtttgtagtttaaaaaagtttcactacctttgcaaccgcaaacaagaaataatggtgccatagctcagttggtagagcaaaggactgaaaatccttgtgtccccggttcgattcctggtggcaccactttttaagaaagaaaaacgatgtaaatccctgaatttcaaagagattcggggatttttct

SEQ ID NO: 6124 - DNA, 591 bp, Unknown
  gut microbiota DNA sequence
gggttttcttttggtcagcataacttaaccttacagattaaaacatttttccaccagagttttcaaatactcagtcgtaagatttgccaaaccaatttgttctatacaggcaaagtctgcattctttttatttatcacaaatttcctttctacgccatcaatgcttgccagcagatggtaattccctttataagtttgctcaacacgcatattgctgatggtgtgcccatcgatttccattgcagcatcttcggcttcgcattcccattcaccccataccttcaggtggttggcgatagttgactctactctgcctatccatgattctgacacaccattttcaaccgctattgtacggaattgtttcaatgaggaaacaacatctctgatgatagcatcgggacgacgaattccgttatcacgggcaaattcaataacatccgagcgtgtgatgtcatacagtttagtccgaatatacatgcaatgttccttgttcggcaaataaccgcccctgtcaatgatgtaggtaatatcgtatgcaggagcaagacgccaggcaccatcttcattcataataaatgaaaagttctt

SEQ ID NO: 6125 - DNA, 764 bp, Unknown
  gut microbiota DNA sequence
cgggaggttaccagcaacgggtgggtattgcgcaggcaatcatacacaatccgaagttcgtggtgttggatgagccgacgaatggacttgacccgaaccagatcctggaaattcgggaattgatcaaggagattgctacggatcgttcagtgctactttccacgcatatcttgtcggaggtgcaggccacctgtgaccacatcaagatgatcgaggaagggcaactggtattcgcagggacgatggatgagtttaacaattatatccaaccgaattcgttcgtggtggtactgaagaatccgccgagaatgaccgagttggaacacgtgccgggagttagtcgggtggaggcaataaattcgaaaagtttcagggtatggtttgatacggatgacgatgtgacagcccggatggtacacgagagtgtcagccggggatgggagttaagcgaggtttccgtggagcggagttctttggatgaagtgttcgctcgcttgtcgggaaaaagtaaacgtgaatcataagttcgtgtagtatgagaaaaatattcaagatagcgttgacagagttatgcactctgttctattcccctatcgcgtggttagtccttattatctttactgttcaggcgtgcatgacctatttccgtttggtggacattatgttgatgcagcaatttaacaagcctttatggtatagtatagcaaaagagatgtacacgggaaatatgggattgttcccgaatatgttggtgcatctttacc

SEQ ID NO: 6126 - DNA, 409 bp, Unknown
  gut microbiota DNA sequence
acactaaagaggtcattgaaatgttgtcaaaaacgaatggttaagcatgaagaaatgtgctgaaaaaatgtgctaacctgctgataataaaggaggaaagtattgcatagttcgttatttcttagtaaattagaagtctctcaactcttctgattatgactaaagaaacactccttatgcaataccaatccgagtgcctgtcggctctcaaatcagtagcgaatatacaaaaaccttttgaaaaagcattcatggacaccatgaaattattcatggccatcccggatcgtataaatttccttcaattgggcagatatggctgtttctcagaacagacttatcgtaacctttttgagcatgaaactttcgactggtttgcgttcaacggctctatcatcagcaagcatct

SEQ ID NO: 6127 - DNA, 10814 bp, Unknown
  gut microbiota DNA sequence
tgattcccggttaaaataagatgtaaaatttattttttaatgtttgattgtatccaatttaatcgtacgttttattcattcggaaattcttgaaaaagaaagaattgtatgggagaagatgaaagaattttgatccgtaatttcttgcatagtgcccgtttaccgggggaaggatgtgtcagctttgaatccgtacatcgggtattataaggcggcagcgatagcgcaaaaagcccaccgcgaaggaattaccttgcggcaggctgcgatcgggtcgggtgaggttacggcagaggagttcgatcgctggggcgacccggcccggatggtgggggaaagctaatcgacggcttccacacggatggcatcgacgtatagccctttaccttcgaccggatccatgtaattacggatttctacccggagcttggtggcgtccgccggtgcccggaatacttttccggcataggcatcgatatagcccgaagtctcgtattggtaactcggagaatgaagggcgtccgaaggcaggtttttactgcctttcatccaggtacaccagctgcgccatttgacctcgtgagcgggtgcattgacgtacatcttcaattggtaacattgaccacccgtcacaggaatgtcctgatagaggtaagttttaccttctattcttaccgctttacttccctcctgggtcggagaggtgacgctgactatccggggagtatattctttactggaaacatctgcattccagtgatcgggaagatcgtcaataaaatcgctttcaaagcttccgtttagaacgaggttcgttccattgcctacgcctgtacagggaccttggggcttgtcgacttcccaatccgcttcctgcaggatcgtttcatcccaatctgcgagtcgggtggtgatatccaactcgctggtggcagccgggtctttgaaaatggctttgatctccgttatccggttggctaatatggattcgatgggatgctccggagtgacaaataccattgaattggaagaaagggtcagaatagccttttcttttgggggaaataccagcaaagtcgtcactgaagtaccgttctcgtccggcaaaccgatatttttagtgatagaacaatcgcctttatattctccggtcagactcatcttttgagagatattactcagattgatttgtaaatcggttaaccattcgggaatattctcgatggtcactctcaacattccgacttttcggttgaggtcgaaaacggcgctgttgtcgccgtcctgggccacggtgaaatcactttgcccgagtagatgatctccggtttctgttttacccgatttcaggaatatttcgccgggcggaagattatcggcatattcccaattttcggtttcttcggcatttgtaacgcaatagccggtatatgtgccgggaaaaagcttcaggtgaaggacattgttgtcctctttttcgggattgacactgtaccggctcatgctggaatgaacctgatcgtaaacaaaaaactgatacactgagggagaagctgtaatgccggacaggctacgtgttctgacatacatggcgacatcttgtttgtcaccgtcaccaggccagggggccatcgaacgatgacaaccgacagccataactaccgctaagatataaatcatgcgtttcatggtgaaaaatttttaatgaaataattaaaacaagcagcattcaggagagaagaatgcaaggagtacaaccactataaaattaaagaaattagataaaataaccaaattataattgataaatctgtttgaaaaacaggatataattcaaattgaagtggagatgacatgataagctataacatgtaagcaaaaagaaataaaaaaataagtatatggatgtgttaatatgtaaaaatccacaggattccgtttccggagtactgtggattttaagcgatcataaaaggttctaatctaattctttcaatattttttctacgtcacccggaacaacgcgtccgaatactttttcgccgatcaacacgacgggagccaggccgcaagccccgacacaacgcagactggacaaagagtatttaccgtcgggagtcgtttcgcctacattgatattcaatatccgtttaaattcatccagtactttttcagctccccggacataacaagcggttcccatacatacggaaatcggatgttcacctttgggggtcatagtaaagaatgaataaaaggtgactactccatataccttagataccggaatattcagcttgtcggcaacaatccgttgtacttctgccggaagatatccgaaaagatgctgtgctttatgtaagacattgatcagttctcccggctgatttccatgagcatcacagatttcgagtaacttgtctattttatgctgaggtaattgtatttcgctcatagttttcaattaatggttgctttattaaaatagtgggtatgtaataaatgatgggctttttcgctcaacggctttccgagatattcttcatataatttgataatatccgggttttcatgagatttccgtagcggtttatgttcgtcttcctgataaatggcctgactgcgggcttttaataaagccgaattgccatgatgtaaaggttggcctcctcctccgatacaaccaccgggacaagccatgatttcgatcgcatggaattcggattttccttcccggatttcattcaaaagtttacgggcatttcccaatccatgagcaataccgacatggagttctactccgttgagtttaatagttgctttttttatgttctccagaccccgtacttctttgaaatctactttgtcgagtgtttttccggtataaagttcgtaagctgttcgcaatgctgcttccatcacacctcccgaagctccgaagattactccggcacctgtagattctcccaaaggatgatcgaaatcttcgtccgccaggctgttgaaatcgatattggcccgtttgatcagactggctagttcccgggtagaaagagagtagttgacatcgggatcgccctgtgttgcgaattcttcccgggcacattcgtatttcttagccagacaaggcataatagatacaacgatcaaatcttcccggggaatgttcatcttttctgcccaatagtttttagcgatagcaccgaacatttgttggggtgaacgtgcggtcgacgggatatccagcatatcggggaactgatgttcgaagaaattgacccaggccggacaacaagaagtcagaatagggaggcatacgtctttatcacccttgagataacgggtcaaccgatccagtaattcgcttccttcttccataatggtcagatcggcagcgaaatcggtgtcgaacactttgtcgaagcccaattgtcttaaagcagctaccatctttccggtaacagaagtgccgggggttaaaccgaattcctcgccgagtgcagcccgtactgccggtgccgtctgtacgataacggtttttttcggattactcagatcgctgatcagccgattcgtatggtcgacttcggtcagtgctcctaccggacatacggcgacacactgaccacagaaggtacaggctgaattggataaaggttcgtcgaaagccggagctatcgttgaaatgaaaccacggtttacagcaccgagtgcccctacggtttgcacttcattacacatcatctcacaacgacggcaataaatacatttgctcatatcgcggacaatcgacggagaggtctctatcgggagaatattccgctcaccggcaaagggtatctcgcggatttttaatttaacggccaggttttgtaattcgcaattcccggatttcggacagatcaggcaatcgttggggtggtccgagagaattaattccagtacggttttccgggcattgagcaccctgaggctactggtttttaccttcatgccgttttcacaacgggtagcacaggccggagccaggtttctccgtccttcgacttcgacgacacaaatacggcaggaagccggaaggttggtgatacacatgtctttcagattcatatagcataaggaggggatttgaatacctactccccgggctgcttcgagaatcgtcgttcctttggccacctctacgatatgattatctatttgcagagttatattttgttccatgttttttcgttatgggctgttatacttcggttatccggcacttatcgcattaaatttgcatttatctttacaagtaccgcatttgatacatttagtcgtgtcgatgaaatgggcttctttccgttcgccgatgattgcatctaccggacaattacgtgaacagagggtacatcctacacatagttgcgggtcgatacggaaagataacaacgccttacattttccggcaggacatttgtgatcccggatgtgagcgacatattcgtcatagaaatgttccagtgtagacagtaccggattgggagaggtctgtcccaagccgcaaagagccgtatctttaatcacttggctcaggttacggaggttgtcgagatcttccatcgtgcctttcccttcggtgatccgggttaagatttccaataaccgtttgttgccgatccggcagggagaacattttccacaagattcttcgacgataaattccagatagaacttggcgacagcaaccatacaatcgtcttcgtccatgacgatcatgccaccggatcccatcatcgaacctgctgccagcaagttgtcgaaatcgatcggagtatccagatgtttctccgtgagacaaccgcccgaaggacctccggtttgtacggctttaaattttttaccgtttttgattcctcccccgatttcataaatgacttcccggagagtagtacccataggcacttcgatcaggcccacattattgattttaccggctaatgcaaatactttggttcctttcgaacgttctgttccgatagaagcgaaccagtcggcccctttgttgagaatgacaggaatattggccagtgtttcgacgttattgacattcgtcggtttattcaaatagcccgattctgccgggaaagggggtttggtcgtgggctcgccccggtgtccttccatcgagtggatcaaagcggtctcttctccacagacaaaagcacctgcaccataacggatttctatatggaaagaaaaatcggtaccgagaatattttctcccagcagcccgtatttttcagcttgttcgatcgcgatacgaagccgttcgatagccagaggatattctgcccggatgtataccagtcctttactggcaccgatgctgtaaccgcaaatggccatggcttcgatcacggagtgcggatccccttccataatcgaacggtccataaaagctcccgggtccccttcgtcggcgttacaaacgacatatttttgatcggcctggtatttgcgggcaaattcccatttcagaccggtagggaaaccgccgccaccccgtccacgcaatccggatcgtttgatttcgtcgataaccgcttccggagtcatctctgtcagacatttggctaaagcgctgtaaccgtcacgaccgatacattcttcgatgttttccggatcgataaaaccacagttacgcaaagcgatgcgtaattgctttttataaaattccatgtgtttggaatcgctgaccgtcacttttttagacggttctttgtataataaccgttctaccttgcggcctttaatgatgtgttcgttgacgatttcttcggcatcttccggttttacctgtacataaaaggtattgtcaggcatgatcttgacaataggacctttctcacagaaaccgaaacagccggtagcgatgacctgtacttcgtcttccagagcacgttctttcagacaatcttccagtcggcagatgatatttttactggctgacgcacggcaaccggtccctccacagacaagaatatgcattttataactcatagatggggttgtttatcgattaatagttgaaaatatttagcacgttatagaatcagatactttggtaattaaccgggataatcccttcgaccaattcgtcgtttttcaggtatttctggatgatctcttctgctttagcacagttgacatgaccgaatacgatcggttcttttcccggtttggtgatttctaccgtgggctctgcaaagcagtaacccatacagccggtttgagtgactacggcctgaataccgtttttttcaagattgttcagaaagtaattcatcgtttccttactacctgctgctattccacaagtggccatggcgactttgatctgaatcagattttcaggatgctcgcttttttcgcgcagatcgattttcgattgaacgttatccctgatttttttcaggtcggcgagtgattttattttttccatatagctgttattaggtgataattgattttatgattgcctgatggacatgctttgatcggcatgtatttctttgagattctcccggattaaattttgtatggccggaagaatttcgggatgtcccaaaggtacaccttccagcacctgtatgatctcttgggtatcgaaccggtatgtaccgctgggagtcgaatgatcgtagctgaaatggatggccggattggcggctgccaatagcgtaagcgtttctgctacatctcccaaaggaggacggtccagatgggaatgaccgaaacgggctgtgagagtagtcccttgacccggctgtgagacgatactaacttttcctccggttcgttcggcattttgctggagcaagggaattcccaggcccactttgcgtactgtccggctggtaaaaaaaggatccctgacccttgccaaagtcgcctcatccataccgcaaccgttatcctgaatttcaataagaaagagatctgcctccggatcttcgcaaatccggatctgaatccacgaagcctctgcccggatagaattctggacgatatccatcatatgagaggacaaatctttcatgaataggtatattctttaacttattgggataataaactttaaatatttatttctggcctcaaatttaatttaaattcataaaattacaacgattgcaggagtgaaattacgtaattaaattccggatagattgccggatgtttttgaaggaaaaatcttctattttcagttgggtatatatttttccgatgtccccgggatagtgggcatccgaggactggatgaaagaggcggatttcagttcgggatggccggacaggaatttcgaaagagaggtatgactactgagctccagggcatcataacgtaaatccggcgggacgaatcctaattgtgaaagaatactgaaacagggtttgtcgatatgggccggaatgaaaataccgtcgagttgcctgactttatgtgcaatttcttccagcgattggttcaaggcagaaatcaatagtttgggttcttcgtaaatgatctgttcttccggatcgacgacaacctggaagccgaatttttccgggtcgttcggaatatcgggtaaatgtacatccaggtaatgctgaaaaatagtaagctgttcgtcggtttcgaaaaaagtcagggcatgcacttcttctttactacagatttcagcacctgtaaggacgaatatacctttcgttttcccataatcacggattatcggtgcctggcgggtggagttgtgatcagtgattccgatcatattcagtccttggacttgggcgaaatgcagaatattctccggactcatttccagatctccgcaaggggaaaggacggtatgaatatggaggtcggcccgaatgtccattttactgctcctttttctggagaagttcgtaaatctcgcctgtcatttcgaatgtctgtctggaagtacttaagatgggtatgccttctgcctcactttcggaaacggtatcttcttccggtcggtaacctttgaccaggacaatggctgccagttctttcagcgaagcgatggccatgatatttttgtgtgtctgaagcgtaatccagatattcccttcccgggcgttacccatcacatcactcagtagatcggaggtatagccgcctttgatctctttgtccaggcctgccgcaccacagcagacttctaattttagttgtgtagccaattctctgactgtcatatctttgctcgtttatttttattcttcgttcttttcaaattttccgattccccagactttggccgataattccatcgattcttccggggtaagcaacccttcccgggtgaggattttttgcatgaatatacattggttgagtttggccttcccttgcacgacatcctgagccaaagcctgacaggagggtgtgccgcaagccccgcagtctatctgaggtaaaaccttcataatgcgggtgattttttccattttctgaaaagcaaccgacaagtcttcatccagtttttcgatcgaccggggtggaatttcaccgctcagttgcatttgttttaccagaaaatccttgtaccggggcattttattgatagagatgtagttgtatttgatatagttctccatccgtttctgtagtctttcgatggtgagaaaacggttgttgatcgccagtgcccctccggcacaggaatggtcgcatgccctcagttccagaaagtcgatatctgtcagttcgtcgttttccagtttttcgaggatatcgatgacattatggatttcgtcgatcgccaggcaacgccccggatagttggaagcttctcctcccgagagggtccattggatggattgcggagtcagatggtattgttccggtacccgggggagaacctgggatttatgtcggttgatcgaaaggaggattttgttatagataaaatccatattgatcaccccgtctacaggagaactttcttcgccgacgggacacttgatggctgcgattttagcggcacactgggtgacataaaaaacaccgatctctttttcaggtatgcctttgtcgatgtattttttcctgacatagatggctgcaatatccatggcttgctttaagcggacgatatgtccgatcagggaaggaaaacgtacctggatcaagcgtacgacagccgggcagaaactggagataaaaggacgctgccggggatgctgctgaagataatgctttgtctcttccatcagcagaccggtcgatttatccacttccatgacataatggaatcccaggttgtgcaactctgaaaatatctgttcttcgctgatatcttccgggaattgtccgataaagaccgaaggtaacaagatgatccggtaagagaatttgaaaatctgattgaaatcgtcctgttccacataaatggcttgacggggacaggtcttcaggcacatgccgcaatcggtacaagcggcttcgttgatggtcgctttaccgtattttatgcggatcgctgccgtaggacatacattcatgcagtgcgtacatcctgtgcaaacctcactgttgatcttcaatgcatgataaaatgtctcgttccccattttcgtaattttaagacttatctcagatacgtggtcatcgtcactttggtgccgacatttacggtagattcgatattcaaccggtcacaattttttttcatattgggtaatcccatcccggcaccgaatcccatttcccggacttcgggcgaagcggtcgagaagccttcctgcatagccttcgctatatcggggatacccggccctttatcggtgatggtgacgacgatagatttcccgtccagcacgacgttcatcactccctcataagcatgagcgacgacattgacttccgcttcataaagcgcaacgacgatacgttttattaaaagggcatcgacgttgagctgtttcaatattttctttatctcactggaagcggtccctgcccgtgaaaaatttcctccttccagattaaaattgaattccatatgttttcttaatacaccggaagaagcccggctttatacaattctccgcataccctgaacatactttgacggcaacgcaatagcaggatttcgttttcctcggccagctgttgcatttctgccgtgatctgcttgtcacgaacaaaaagaataaacggaatatccgccatttctgccgtacgaatgacttgtggattggccattcccgttatcaacagcaatccttccgtattcagacgcaagacatcgctcattaaatctgctgcaaaagcatgttgtatgggatcgtgaagcttacgggccccacaaatacacgtggcgtcgagtaattttataatgtcgtccggtgtcataccttggttaatttatatgcatctaaattagtgaaatcatcttcaaaaacaatacctcctctgcgggaagcgataatttaaaattgatataaataaacatatttatcagtagccttgtatatactcatgctaaacgatagggtcggaataaataaaaaacaatttgaattcgaataaaaactggattaaaacttatttatttgactaatgatctgcttatatattgggtttacattggatttaatatggatttgtctatacacgaattcagatttgccttatctggtttacagacctgcagttcgggttatcgacagaataatatgctgattcaacttgttttaaaattatcggtaaagattacctaaatattgttttaaatattttgaaattaatt

SEQ ID NO: 6128 - DNA, 14801 bp, Unknown
  gut microbiota DNA sequence
agtgaaaattaagtttgagtagtggtaattatccggtcataataataaaaggggaggatgaattatttttctgtgaggtatttccagaaacggacggggaggttttggcggtgcagtttcggattgatacgttctttgatggcgatggttttaaagtaggttcgccagagttgctgaaaaagttgttcatcttctgccatcagttgctgatccagtttgccggtcaaaagatgggttcctttggtttcgaaacggacttcatcgactttttgccgattgtaataataaccgtattcccgtttgatatcatacagcaaccagcattggtcggcgaatcggttttgaaagtgaccgataaccaaaggcagtacattgtatatcggttcgagggcggcaaaataagttccgtcgatggttttttgaaaacgggtgaattggacaacccgtagacgttcgttccccactttcttagcgatctgagtggcttcgagtacatcgggatctccgaagttgatttcgatcgggcggagagcgtcgatagctttgcggatataacggaatagtaagcggtcggtatccggaagttcggacaaccagcaagaggtgataacggataggccggccggagagagtctcttttcaagacctttccatacccgggaggatttgcgttcatcggtaataatccgaattacctcttcgtggaataaaggaaggggaactccttcggcctgtagtatatccggaaacatttttcggtcataagcctcgaatatacaggtgagtagtccgtcgaagcttttatcatattggtagataatcatcggcttttcggttttattcgaagataatctttagctgacggggatcttcctgtttgcctttgtgtggaatgagtaactggcgtacccgctcgggccggagttcctgaaccgtctgtaggggaagttcattacaggtaatgaaatattgtgctttcttcaaaacgacccccatttttttcaattgcgaaccattgattttaccgtagcgacgggagacaatgatcattttcgccgattttactcctaaaccgggaatacggagcaataactcataatctgcccggttgatgtctacggggaatttttcaggatggcgtagtgcccaggccagtttcggatcgatttcaaggtccaggtcaggataagagtcgtcgacaatttcatccactttgaactgataaaaacgcaataaccaatcggcttgatacagtcggttttcccgtaccagcggcggttgtttcaattggggtaaacggttgtcgtaagcattgacgggtacaaatcccgaatagtatacccttttcatggtcggtcgctgataaagggcagaagataaccggaggatatctttgtcggaatccggagtagctcctataatcatctgggtactttgtcccgcaggggcaaaacggggagccgaccggtattttttccgctcttcggcactttccaatacgccttgctggatgtgacgcatcggtgtgaatacgctttggaaatccttttcgggagctaatgtctgtaagcttttttcgttgggtatttcgatgttgacactcatccggtcggcatataatccggcttcgtggataagttccggactggcccccggaattccttttaaatgaatatatccgttgaaacggtggatggttcgtagatccttgacgattcgtaccaggcgttccatggtataatccgggttgcggacgactcctgaactcaggaataagccttcgatgtaattcctgcggtaaaattcaatggtgagattgaccaattcggttaccgagagtgttgcccgcgggatatcgttgctcctgcgattgatgcagtaggcacagtcgtacctgcaatagttggtcagcatgatcttcaacaaagaaatacaacgtccgtcttcggcaaagctgtgacaaatcccccagcctgcagcactacctatcgccccggctttatgtccccgggacgtaccgctggaggcacaggatacatcgtatttggcagattctgccaatatctttaacttatccaaaacagattcatccatagtgtcacaaagaaagaacttcttggtgagaaaacaaatcgaaaatagttaaatatagacttgacggaattattcggctgttttcggtgctatcgggaccaccggggcgcagaataatacggtcgattttatgaccggttaaacaagggtttgagtaatagtcggtattcgtggaccaggttgggagtcagcttatttttctccatgccctctgccaattcttgcagagtccaaaaacgcccttcgtccacttcatcgttatcgatgtggatatggttgtaacgggtacataaaaaagaaaaaaccagttcccgttcgcggggactttcccaaacgtagttacccagaaaacgggcctcgaagtctgtgatgcccaattcttcggaagcctcccgtttaagtgcatcttcgactttctcatttacgccgatatgtccgcctactgcggtatcccacataccgggcagaaggtcttttttcatacttcttttttgcaggaatagttcgtggcgatcgttggtaatgtgtaaatgtacgacgggatggagtagtttggatcccgaatgacaaatgctgcggggggcctggccggtaacttctcctttttcgtcgacgatgggcaaccattcttcttttttcatttttctcaataaaagacggttatggataaaaagtacgacgaaataagtacctaaaataatgtataagagtggggttgtgatgaattttgccgtgtcctccggcaaaaatagaatggctgtataggcaagtagggtatgtagggcgacaaggataaaaagtatccgcaacatttttcgcatactttgaagttgtggtcccgaaaggtggatatttttgcggtaaccggcaggtagagtatgggtaaagtcggtatgtgagaaggcgaaaaatcctagcaataaacataaagccgtttcaataatagccggttgtagctgtgaaagtaccgaaccgtttgcccaaatggaaatcagacccgggatacaaaaaaacaaagtagtgaggaggatcattttgtcatatactttttcccggattcgggtatagataaactcggctcctcctaaaagaaaggcgacccatactccggtaactgttccgaaaaattcatcggctatgaaatagatccctatcagtagtaaagagggtaaaagacttcgaacagaatgattcatgattttaaagctataaaacgactggcaaaaataatcaatatactttatctccccacagcactgccctgtaaaatagcggaaaaaagagagatacaaaaccggaatacagctggaactgaaaatttctgtattaactttgtagcccgaaacgtatttgaaaaagtttgtaaagtttataaaccgaatgaaaagatagttttataagaaaaggattatgttgaagattgtcggaattatgttgctgggcgtattcaccgggtatttattgaaaaattatcagctccggtgggtacaaaaatggattatgctggccatttggttattgttattcttattaggtattgctgtcggtacgaacggagagattatgaataatctggatacgatcggtttgaaaggtttgatcctggccctgggaggagtatcgggaagtgtgatcctggcttgggtggtatatcgcttttttttcatgaggagagacgagtcttctgtttcctgagtatttctaagtcgttattttgattcagaataaatgaaaggaagtttgattattgttgctttttttgtggctggagtgattctggcccgctggggcgttctgcctcaggaattgcttcagcaggattttagtatgtatgttttatacgggttgatgttcctggtgggtataagtatagggagtgaccggaaagcctgggcggcgttgaaaggtcagcagctacggattgtactggtgcctttggcgacgattgtcggcacgttggcaggaagtataggggttagctttcttttgaccgatatccgtttaacggattgtctggctatcggttcgggtttcggttattattccttgtcgagtatttttatcacagaatatagaggggcggaattgggcacaatcgctttgactactaatattatacgtgagatcattactttgttgggagctgctgttctggtccgttgcttcggaaaattggctccgatctgttccggtggtgctactacgatggatactaccttgccggttattacccgattttcaggtaaagagtatgtgattattgcgatattccatgggtttgtagtggatttcagtgtgccttttctggtcactttttttgcgaaactttagattattatttattcgtcccaattgtggaaaaaggtttaggatggaagaataactcttcatcttaaacctttttttctgtttcagcaagttgaaaatattgcctccgcttttatcggaagaccagggaggggtatttcgttttttacttcctttgagaaaataaaaaagcgtcccgttttccgagacgctttttagtttcagtaaaactgattatttcacagttgccatatgagcgatcaattccaatactttgtttgaatacccccattcgttgtcataccaggaaacaagtttcacaaagctcttgttcaaagcaatacctgcttttgcatcgaagatagaagtacgggcatctcctaagaaatcagaagaaacgacatcttcgtcggtgtatcccaggatacctttcatttcgccttctgaagcttctttgatagcagctttgatttcatcgtaagaagcttctttagctaaacggaaagtcacgtctactacagaaacgtccagagtcggaacacggaatgacataccggtcaattttccgttcagttcgggaataactttacctacagctttagcagcaccggtagaagaagggataatattacctgcagcagcacggccacctctccagtctttcatggaaggaccgtcgacagttttctgagtagcggtagttgagtgtactgtggtcatcaaaccttcgataacaccgaatttatcgttgattactttggtcagcggagccagacagttggttgtacaagaagcgtttgaaacgatcgtttcgccggcatatttcttgttgttgacacccataacgaacatcggggtatcgtctttggaaggtgcagacatcactacccgttttgcaccggctttgatgtgagcttcagctttttcttttgtcaggaaaagaccggttgattcaaccacatactcagcgcctacttcatcccatttcaggtttgcaggatctttttcagcagttacacgaatagcctgaccattgacaaccaatttaccgtcttttgcttctgcagttccgttgaaacgaccatgcatcgtgtcatatttcagcatgtataccatgtagtctacatcgatcaggtcattgattcctacgatttcgatatcgttacgagtcatagctgcgcggaaaaccaaacggccgatacgaccgaatccgttgataccaactttaatctttgccatttttattgtttttaagtgttataaaattatcatttcctttcaaaagtacggaaaaaattcctgatatggttcagtaaatatcgaaaaaaaatgaaaaaaacaactcaaacgatttcaattttcagttggaaacgcattatcctgaaaggatttacgaataagtgtaatgttgggacagaatacctgattagcgagttcgttgtgaactctgattggcgaactttcggttctgaccgatgaatggggacaggaatctcagctgggccgatcagtgtggcgctaatcaggatttgaaaggaatactaattgcagtaagtcaaatgttttaccttggggatttcttttacagtggccatatgtgcgatcaggtctaacattttattggaatatccccactcattgtcataccaggcaatcagttttacaaatttattattaagggcgatccctgcttttgcatcgaatatacaggttcgggcatctcctatgaaatcggaagaaacgacttcttcttctgtataacctaaaattcctttcagttctccttcggaggcctctcttactgccgctttgatctcctcataggtcgtctcttgggctaaacggaaggtcacatctacgacagatatatccaatgtcgggatgcggaaagacatacctgtcagtttgccgttcaattcagggatgattttgccgacagcttttgctgctcccgttgtggaagggattatgttgccggctgaggcacgtcctaaccgccaatcttttttcgagtgagcatcgaccgtacgctgactggctgtcgtagcatgtacggtagtcatcaatccttctacgataccgaaatgttcatggatgaccttggtcaatggggccagacaattggttgtacaggaagcactggaaacgattgcgttgccgtcgtaagtttgatggtttacccccataacgaacaaaggtgtatcgtctttagcgggtgccgacataacgacacgttttgcaccggcacgaaggtgagcttccgctttttcacgggtaaggtagtgacctgttgcttcgacgacataatctactccggcttctccccacttcaaaccttccggttcgcggctggaagttacgagaatgtggcgtccattgacatacaattcaccgtctttgatctcgatcgttccgttgaaacgcccgtgtacggtgtcgtatttcagtgtatataccaaataatccaattcgctcggatcgttgattgccacgatttcaatatcgtttctggtcattgctgcgcggaataccaaacggccgatacggccaaatccattgatacccactttaatttttgtcatttttttcttttagtttaaaattggttatttatttagtgtaaaaaaatcaaaatacgagctctacggactgtaaaacagtccgttttttatttactcaaacgtttgcgttaggatggataaaaaaaagcactatctgtcagccgactataagccggacatttacgatcgatagcgcatgaagataaaaggctcagcaaaaataaactgaaaataaaaccgataattacttttttcattttcatgataataatcttaagttgctatctaatcatgcttccaagattcagaattattatttatgcacttcgttttaatagggctcctaaaaattgatggaacaaacaaacctgtcgtttcgatggattacctaaaaactttaacgtgtgcaaatgtataataaaattttgaatcccaaaaattagtaggaaagattattcagagcggctgaatcttattcgaacatctcgcttgtagacaaggaattattacaaaatggagggagaaaaaataaaaatgtaagttttttttgattttttctttgaaaaaatttgtgcaaacgttttaaatacctatctttgtcgcgagatatagaaattatattgctttataagtgtagtaaatttattgttagtgtgtttaaaaagaggctgtgaagcctctttttattttatgatcaaattttatattttgttataaaatgctgatttgtaatatattactggtaaatgaggtgattttgaatcggtcgtccgggcgatttccgataatccaggctattttttcatccgaaagcaataataaacattcctgtttttgcttgctgctgaatttttgatctctgaaaaaatcactgagttttttcttgctttttttcatcccgatcggacaaaaatagtctccggcttgccaattacggataagcaggggaaattggagtttgtcggcatccagacaagcgatatcgggttgctgtggaatcacaaactcttctgtacgggggaagagcgtaaattcgacttttagttttccgatcgtataaatacctgttgttggaattgaaacgattgtccggctgcatttgctgttgtcgtaaagccgccagaatattctgcctctttccagggtatgatggccggcgatgaattgtttgccggggatagctgtatgcgtattcagaatgtcacggatctggactttgttaaaaccgaaaggtttcaaggtttcatataaaaaagtataaggggcgggtgtggccagcgttttggaaatatgaatcaataattcgtcttcctcgcaatccagaatttcttcctgaaaccgatgaatgccgtattgaaagatttcttctgtttctttcagggtttcgcaattttcggtcatggtatccagaaacgaaggattgatttctttgaggaccgggatgatctggtggcgtattttattacgcacataatccagtgaattattggtggaatcggtccgaaaccccaattggtggtcttctatgtatttcagtatatctgtccgagaacatgggagcagaggacgaaggatgtctccgttgatggattttataccggttagcccttttatacctgttccccggcagagattgatcaaaacggtttcggcaacatcgtcggcatgatgggcgacgacaatgtaatccatctttttcttttctttcatttcccgaaaccaggtgtaacggagttcgcgggctgccatttctacactaagtccgttttcgcgggcatacttcagggtatcgaattttttgacgctgtgagcgatgccgtaactatcacagaaacgtttgacaaattgttcgtccatgtccgattctttaccccttaacgaaaaattgcaatgcaaaaccaacatcttcagattcaggtatttgaatgcatgtaacatgcatatggagtcggctccgccgctgacggccaatataaatcctgcatcccgggagatgtgatgttgttgaagaaaatttttaatcgtttcctggatcataatatgaataaggtaaaaaactataagccggatgatcagatttcactgagctctaaccatctcatttctttttcgtctaagatagcgattatttcagcaatacggttggattgcgctactagttcttcgggggacaggttgccggaatttaatgcggtttcgatgattgttttctctgtgttcaattgttccatgtctgtttcgagctgttgcatttcctggcgttctttaaagcttagtttgcgttttttctctacagaattattcggagtggattggggctgctctgtttttttcttttctttttcagttttctccagttgttctttttcttcttcttttttattcttataaatggtataattaccggggaaatctttaacgattccgttcccttcgaaagcaaaaatccggtcgaccactttatcggtgaaaaaacggtcgtgggatacgatcaacagacaacctttgaagcctttcagatactcttccagtacattcaacgtgatgatatccagatcattggttggctcgtccaggatcaggaaattcggattgcccatcaatacggtaagcaaatacaatcttcttctttcccctccgctcaacttttcgaccagggaatattgctgtttgtcggtgaacatgaaatattccaggaattgagaagcggacataattcgcccgttgcccagatcgatgcgttcggcaatgttttttacgatatcgatcacccggtccgtttcattgaaagcgataccggattgtttgtagtagccgtaaaccacggtttcgccgatcgaaatcgatccgctgtccggttgcagattttgggtaataatattcaggaacgtagatttgcccactccgtttttcccgacaataccgattttttctcccctgacgaatttataagagaaatcgcggagtatacaatgcccgtcgaagcttttagatacatggtcgagttccaggatttttttacccagtcgtttaccctggatgtccagttccaattttttctctgtcgtattctgagaggctgtttctttgagtttgtaaaagttgtctatccggtattgtgctttatgactacgggcctgaggcatccggcgcatccattcctgttcggtacgtaacaggttacgggccttgtcgatggcggcattgcggttttcgatccgttcctctcttttttccaggtagtaagcatagttacccgaataagaaaacagaccgaattcgtcgatttcgattatctgattgcatacccggtccagaaaataccggtcgtgagtgaccatcaacagggtggcattcgatttacccaggtattcctcgagccattcggtcatttcgatgtccaggtggttggtcggttcgtccaggattaagaaatccggattactgatcaatactttggccaggccgactctttttttctgtcctcccgaaagctgaccgatttttttgtcataagtatcgattttcagttccgagaggatttgcttgatcgttgtgtcgtaatcccaggccgaatggatatccatttcgggaatcagtttttctaaagcttcggtatggttgtgcgcaactgcttcttcataagctttaatcagcttcaacacaggagaatccgagtggaatacttcttcgaatacagaattttcgggatctaaagccggatcctggtccaggatacccactgtgatgtcgtttctgaaaattaccgtcccgctctccgaggtatcttttccggcaataatccgcaaaagcgtggatttacccattccgtttttggcgatcaaggctactttttgtcctttaccgatcccgaaagatatattttcgaataacagttgctcgccgaaccgtttgctgagattatctacttgtaaataactgatcataattttatgtgtaatacgggacaaagataagaaattaatgactactcaggtattttttccgttcttcttccgggaagtgctcgatggcatagcggagcatggtgcggggcatccggctggaacgggaagataaaaagtctttcaatacctgacggtcttttttgccggtttcacggagcaaccagccgacggctttgtggatcagatcgtgggggtggttcagaagcaggtccgaaatagccagacagtcccggaaatctccttgccggacaaaatgcatacagctgactatagctatccgctgttcccacatattggacgagtgggctaaaacatacaatatcccgcggtctttatctgtcaaccatactcccaaaagcttgtagcaggtgaggtctaccaaatcccaattattgatgtttcgggtttgtgaaaggtagaaatcgacgcaggtttgccggaaagcttcgtctttgtttttagtaaattggtctaccaggataagcaagccggttagccggatttcatggtagggagaagagatcaactcggctaagaccggaggtgttgctttacggtatttcagtgctatgcttctttgttcgggaacggtgattcccaggaaaagatctccttctccgtattgacctttcccggttttgaaaaaacgggaaaggtgtgcggctttatccggattaccgagggcatttaattcggctatgatgtcttgtgccgtcggagtggcatgggtttcgggcttcatcagttcagtttttttcgccacaccagttgctccagcaataaagccgatacagcgatcaggataaaccagccggtgaggtatttgttattatcttgtaaaacaatctcttttactaattcgctattgtgatcgaagcaggttgttttaatatctggcaccttgcttcggggaaaatattggcttagttcctgttccttacaaaattccatttgtgattcggtacggtcgtagttccaggccagtacatcgaccagacggtcttcctggtatacttcgaataatcctgcttcttgtatggtcgttgcgttggtgagttgcaggtcgccactgaaatttttccgcacctcagggataaattcaaaggtgtggttttcgttccggatttgcaggggttggttggtctggatcgttcgggtattcagaagtacgggagcggtggtattcagaaagtaggaggtatgaagaccggtattgacctgaaaagccatgttgaccaaaagtggtacgaacaaaggatgaaataccagatcactgtcggtgggcagaaagttgaaagcagaaaggtaaagatttcctttgccgtaatgccgggataccaatagaggtgccgagtgtttatccgataataagatttcggtatgggcgggtaaaataagccggtaatactgacggatttgagggagtattgttttaatatccggttgttcgaatgcatcccggaataaggctgcctgggtttcgatatgagcgattacggtattggtatcccgtttgtcgtagcggggagcttgtattttttgtaagaatttattctgaacttcgggagaggaagaggccggaagaaccaatagattgcctccgttcatcagatagtcttcccacatgctttccagacccgtagagctgtcggtcagaccgtccaggataatcaggctgtagcggggaaggttttgccggactgcctggttgacaggaatggaggtaaaactaaaatggctggaatccgaaaatagttttccaaaatagggattttcctcctgttgccatacatacagaatttcggtattttcactgaccggataggcaaaataaaatgtattgtcgaaaaggaccggaaaatcggagatttctaccgttcccttataaaagtcttctgctgtgttcagataactgatttcaaccttcttttcgctatgggcttcgagatcggtttggatgatgctgcgcttttttccgttgatcgtcaaggtgagcggaatatggtgaaaatccctgtctgaagtgttgaccagggtgatatatactgtttcggattgattttgtttatggaaggcttgcccgaagttcacttctttgatatagagattacttcggttttcaggtttcatcatcagaaagacggattccagggtagagtcggtgatgatgtgttggaaatcacagttctttttctggaaatcagaaatcaggaatagcgtacccggctggttttctcccgattcttttacttctttatagacttgagaaagtggtttagtggccgggctgattttaagattcccgatagcctggagcattttttctttatccaatgtgaccggaagaactttatcattggtgaacaagctgaaacggctaccggcgggataggtatcgacgatgtcgaaaagatgttttttcgcttcttcgaaaagacttccttgcgaacctgtattggtcatcgagaaagaattgtcggcgtagataaaaatccggggagtggtcgttgcgggtaaagcttttccttccgggttgagatagggggtagcaaaagcgatgacgatacagcttaaagctaatagacgcagaaacaacaacactaaattttttaaacgtgaactgtttttcttttgcttttgtaaagcttccagaaagttgaagttgctgaaatagacttttttatatcgctttaaactgaacaaatgtaatagaacaggtataaccaataacagtaatccgtatagaaataccggatgtagaaattgaatgactgataacataaatactcgatttatcgattaaatatacctgattgagggtaccgactatttgcgggagtaaaagtagcaataatttctgtttttcgggataagtttatcccggagagtgaggcggtttgtatatctctgactgtcagtttgaaaaaatgaattgttagtaaaaaagccgtttttgttattaaaaaggtattcaaaaatcaaagagataatttttttaattgtacttttacgacaaatatcataaaatgggaatttatgtctaagatcattgctattgcaaatcaaaaaggtggtgtcggaaaaacaacaacttcagtgaatcttgctgccagtctggcagttttggagcaaaaaattttgttggtagatgcagatccacagggaaatgcttcgtctggattgggatatgacgtgcaaaaattaggagattcgaccatctatgaatgtctggtcgacggactggaagcagaaaaggcaacattgaagactgagatcgaccgtttagctttattaccttctaacattaacctggtcggagctgaagtagatatgatgaatctggaggaccgtgaaaatatcatgaagaaagtgcttgcaccggtgagggataaatacgattatattctgatcgactgttcaccttctttgggactgattaccgtaaattcactgacagctgccgactctgtgattattccggtgcaatgtgagtattttgctttggaaggacttggaaaattgttgagtacgataaaactgattcagaaacggttgaataccgatctggagatcgagggatttgtgttgacgatgtacgatgcccggttgaggttgtcgaatcaggtggttgaagaggtgagaaagaattttcaggatatggtgttcaagacattgatcaaccggaatacgaaactggcagaagctcccggattcggacagcctgctatcctctacgatgcaaatagccgtggatctgaagactatatgttgttggcacaagagttgattaaaagaaatttggaataaaagtagatctacattaaaataaatacagaaggaagattttcgatttacgatcgtatcccttttt

SEQ ID NO: 6129 - DNA, 3427 bp, Unknown
  gut microbiota DNA sequence
acgggggctgggagccctgattgctgatgcggctgaagaaccggtgaccagagagattgtcgtatcggccatacaagagttgaatcttgccgatatccgtcccaatccttttcagccgagaacggagtttgacgaggaggctctgagtgagttggctgcctctattaaagcgataggaattgtacaacccattaccgtgagggctgtcgaagaagggaaatatgagattattgccggagaaagaagattccgggcttccaaattagccgggttgtcgactattccggcttatattcgtaaaacagaagacgatagtctgctggaattagctttgatcgagaatattcagcgtgaagatctgaatgcgatcgaggttgccatcagttaccagcgtttgatagatgaatgcaatctcactcaggatggcttgagtgagagagtcgggaaaaaaagagctactattgccaattatcttcgtttattgaaattgcctgctcagattcaattggctgtccgggataaaaaaatttccatgggacatgcgcgggcgatattgggagtagaggacccggatacccagctgatgatcttcgaacagattctggagtatgatttctcggtgcggaaagtggaagagatcgtccgggaattggtacatcctcaggtggaagaacctgcagaggctccggtcgttgaagataaaccgaagaagagtaacgagatcggagattatatcgagttgcaaaaacatctgtcacggcgtttcgataccaaggtggaactgaaacgcaatgaaagcgggaaaggaaaaattattataggctttaagtctgatgcagaactggaaaagatcatcgagttgttggataagattgaatgagaaaaattgtttgtttgatagtagccattctggcaggacttagtgtgaaagcattgagtttatcgcaagattcggtgactcagctagtaactgccgacgatacgcttaaagcttttgagaagatcgtccggaaacctcattctcctcataaagccacgattatggctatgcttcttcccggatcgggacagatatacaacggacaatggtggaaagtgcctatcctgtacgggggtatggctgccgatatttatggtattgtctggaatcagaagcgtttcaaggagtatcgggatgcttatgtcgaatgggtgcagtatctggatgcgaaagccaaagatccggatacgccttatccgcaaaatcccgcgtgggataaaattcccaaagctttcgatgtggagaccgatccttatttgcaaacatcccagggacaaacctggtttaaaaatacgttgagtaaccggaaaacttcttttaagcggaaccgggatttgtgctatattgtgatggccgctatttatgccattaatattatcgatgccacggtgtatgcgcatttttatgattttgagatagatgataatctgagttttaatttacaacctacttcttcctatagtcctgttagcggaggaagtatcggtttgactttaacttttaatttttaacgcgagatgatacgttttttgttttttgctgtatcctgtctgctatatcatgctgtatgcggggtgaatgtggtgtctaaagatagtgttgcttcggtagagcaagatactgtaattgaaaatcagattataacggattctattccggaatcttttctggagaaattggattattattatacgagctggtatacagggaaacgggatagtacttattatgtcgattcgctttgtatagcagagagttgtaaaaatattgttccctgtaacgattcggtttatctgttgcgtttggattctttacaatctgccgttccattgtcgttcaacgatattgtccgtacgtacatcgaactgtatacggtgaaaaaacggttgcaggtagccaatatgttaggacggagtgaatattatttccccattttcgaagaagcgttggatgcagagtgtatgcctttggaactgaaatatttgcctgtaatcgagagtgctttaaatccgaaagctttatccagggcgggggcctgtggattgtggcaattcatgtacggcacagggaaaatgtataagcttgaaatcaattcctatgtcgacgaacgccgtgatccggtaaaagcaactcaggcggcagttcgctatctgaacgatctgtatgctatttatgaagactggattctggtgatagctgcttataactgtgggccggggaatgtcaataaagcgattcgtcgttccggaggaaaaaagaattattgggatatatactatcatctgcctagagagacccggggatatgtgcccgcttttatcgctgcgaattatgtattcgcttattataaagaacatggcattttcccgatagaatcaaccttgccgccgatgtgtgacagtattatggtgaacgatgctttgcatttcgagcaaattgcggccaagctggatttttctgttgaagaattgcgtgatttgaaccctcagtaccgggccgacgttattcctgccggttttggaaaatcgtacgctttgaagatgccttataaccatatcggtagttttatcgataatcaggattctatttttgcttgtaaccgcagtaaatatttcaacgatagcgatcggaccgccgatcctaaaaaccggattaaagtgcatgcacaggctttgggacaggacggacgggcccgtttggtatatactgtgaaaagtggtgatgtacccggagctattgctatgaaattcaatgtccgcttggccgacctgaaatactggaacaacctcaataaacggatgacgatccggccggggcaaaaattggtggtgtatgtacctgagaaaaaagccaatcaatacaagaataaggctgcttataccggtaaggaagataacgtagcctcagccccgaaagtcgaaacgatcgatggtgagtttgtattgtataccgtccggaaaggagaaaacctttggtctatcgccaagaaatatccgggagtatcgaataaggatattatgcgctggaacggaatctctgaaaatcaggtcaaagacattcgtccgggacaaaagttaaagataaagatttagtttaatttttggcagttatatacatatttatactcataaacgtagaattattctgttgcttgcccgtctttggtgttcgtgtttggagacccggtcgcttctgtcggtcagtgaaggaaagccttaccggaccgttccaggcgaaccggtctgacgggataaaacccggaatagaaagaaaaaaattaaacccacgtttattggtgtaaatatgtatataactgcctaatttttttcattaagaataatatacaactttcaaattaggtattaattaaactgattctccgcaaac

SEQ ID NO: 6130 - DNA, 352 bp, Unknown
  gut microbiota DNA sequence
cttttttgtatcttctctgccccgtctacattggggaaaacatcgcaaatagcataatataaggcattgggtaatacatcataccaccagtcgcggccatagcctcctcctaaaagggctactgacggagtcgtattgttcatgactatattccagccgttatcagaattgaaataattctgcaccatttttacatagttatatccgtcttgattcgtcttgtcaatccctacaaggccggcaccaagaatagcagccaatgagttcagactttcatggaactctccgttattggcattctttccctgacgaatatctttaatggcagtatataagccaaatgtagtctggt

SEQ ID NO: 6131 - DNA, 1538 bp, Unknown
  gut microbiota DNA sequence
gatttcattttttaattttgtgacaacatttataaaagtcaaattcttaaaatagagcatcatgaaaaaagttattaattcaccgaaagcaccgaaagcgatcggtccttacagccaagctattgaagtaaacggaatgatctatatcagcggtcagctgcccgtagacgtaaataccggtaaattcgccgaaggcggtatccaggaacaaaccgaacaatctttaaaaaacatcggttatattctcgaagctgccggttgtacttatgataatgtagtaaaaactacctgtttgctaagcgacatcgctaatttcaaagccatgaacgaagtctacgcaaaatatttcacccaggattgcccggctcgtgctgcttttgccgtaaaagatctgcctatgggagctttggttgaaatcgaagtcgtagctgccaaataagtagcatacgacattccggttgatcagcgttctttcttcctaatcaagtttgaaggaccgctgatcatttttatatcttcgccgtcattcccagataaaccccgataaaataaggaatcagccatacccaccaaacaatgacactgaaacggctgaaattgcgtttcgcccgggcggaacctttccgaaatgtccagaaagcccacaacgcatgaatcgccattagaaacacggcaatactacctaaaacagcatgtaaacggttgtcctgaccggtaagccgtaccagctctgccataaaagcagtaccgacaaaatcacacaccaaacctaatccaaaagcagtcacgtgccaccctttcaaacgcccctgtatacgttcactccatacccctacggaataaaagatcaaagccattgaaataataacgatcgcagccaacaaaaactcatcatcatacgttgtcaatcccatgtcatttgtatttacttataacaaatacgcacaaaccgacaaacatgtttctgacaatccaactaacttttatcctcataagtcgtcagccattgcttcaattcagtggtccggttcatccggtccatagaaaattcctgactacggatatcgatgacctcgtataattcgatgatcttccgatagaggatcgcctgaatcccggcatctgtcagcctccgggcatcccggtaaatcaattcggtcaacatttccaatttatagatcggatcgtctgcaaaaaaagtcgtgatctctccggtatcggcctggataaaccaatcccggtctttgttgaaataagaagcatacattccggcataaggcgactcgtcgttcatctggcgcttaccgtcccggacatcgtccaattcctcgaagaaagtctttataactgtggctatcaaatctcttgctaacatagtggtttcgagttgctgaattttaggtaaagatataagctttcgattaaaaacgatagttttaaagaaaaaatttatctgcctgattctttgcatccaactattttctttataaataatctctataaatttataaaaataaagtatttgtttattattttta

SEQ ID NO: 6132 - DNA, 400 bp, Unknown
  gut microbiota DNA sequence
acacgctcccctttccgtcctaacccgattggtttgtcttccgtaaaactggaatctgtcacaatgggcgaaaagctcggtcccattatcacagtatccggtattgatatgttagatggcactcccatttacgacatcaagccttatctgccgcatatcgacagccacccggaagccacaggaggttttgctttatccgtaagcagtgaacagttagaagttatttttccagaccatctgctgcaaaagatcccggaagctgaccggaaactgttgtcagagcttttatcccaggatccaagagaccggttcatccacgacaacagccgcatctgggggctcacctatggaaattacaacatccgctttcaggtacacgacaacgtgctcaccgtatcag

SEQ ID NO: 6133 - DNA, 1483 bp, Unknown
  gut microbiota DNA sequence
aagaaaaattatgatatatgcgtttcataccaaaaacaaaagctataaatattatcaaagctataatccaagtagcgatatcacctgtcgtcatttaaaagcctccgtttatttttatactaaatatcaaaatttatcaaaaacctaataatgtgcctacttgataaactaataaagatacaacccatgctacaacaaaattaccaatagcagataagaacatccatttccaaccaccagcttctttctttattgtaccaagtgctgtcatacatggtgtatataactggctaaacaccataaatgctaacgcagacattgtcgtaaatgccatctgtaatccagtattagctaccatacctacagcttcaacagtttcagtatcagggcttaaatcaggtaaaccatataaaatacccattgtagaaataacagcttcttttgccataataccagtaataacagcagaaccagcttcccatgtatcaaaaccatggaatacaaacaatgtggacataataccaccaagactagctaataaagattcagacatatcttctacttgacctgcaaaattataactgcttaagaaccataaaattacagacatagcaaaaattattgtacctgcttttatgagataacctttacctttatcccatgtttctaacaatactgttttcatatctggaatacgatatggtggtaattctaaaacaaagcttgtattatccttttcaaatacagttctactcaatatactagaagctaaaattgcaccaattataccgataagatacatagcaaatacaacatcacctgcattttcaccaaagaaaatagctccaaataacgccattactggaagtttagcaccacaagttaaaaacggcgttactaaaatagttatcatacggtctttttctgaatctaacgctctagctcccataatacctggaacagcacaaccgaaaccacaaataataggcatcaatgctttaccactaagaccagcacgacgcataattgggtccatgacaaaagccacacgagccatatatcctgtaccgtctaagaaactcaagcagaaaaataacgtgaaaataagtggcacaaaagtaagcactccacctacaccagctataataccatcacatactaaagaatgtaaccaatcagctacacctaatccagtcaacgcttcatctgcccaaccataaaaatcttcatttataagtacatctaattcatcagcaatcggttgaccaatccatgtaaaagtaatctggaatacaagatataacattaatactaaaataggtaatgccataaagccattagctaatactttatcaatcttttcagtgagattattacctacattttccttaacgacaacttgctctacaattttatcaataaaagcataacgtgcttctataattgcttcttctaatttttctttatcactaatagtagcttt

SEQ ID NO: 6134 - DNA, 1096 bp, Unknown
  gut microbiota DNA sequence
gtaataagcttggaaaaagtctgtctaaggcggtgaagttcactaccgagcagatagacgaagccgtcaaggctctctctgagggtggcagaactggtgctgagtatctggaaaagaacattttccgaccgatcgccctgacttttataaggctttgcgtgttcatgacggtgtatgtgcttatggagatagtcataaggcttatcctgcgtctgtcgggagtttttacccgaatggcaggtctgacagcggcaaaccgttttgcaggcatggcgcttggtctttgcaaaggcggtctgtatctggtgttgatagcctttatggtctgcactgtgataaatgctaccgagaacaagcttcccaagttcaacagcgctgtttttgaaaatacctatctgttcagttacttctttgatattctgtataaatgattaccgtaaggtgtatcagtaaggaaaggagcaaataaaaatgttaatgtgttcaagatgtaaaaagcgtcctgctgtggtgttcatctcacagatgaacgccaaggaccctcagcacaagaaaaacgagggactttgccttgtttgtgccaaggagcttggcatttcgcaggtggacgattatatgaaggcaatgggcatctcagacgatgaccttgaagcaatgtcaaatcagcttatggaggcttccgacggggacgattttgagccgggcggaacgaactttctgagcaatcttttcggcggtgacgcagccaatcttttcagcaacctcgcaggaggtatgcctaaagccaccgatgagggcgaagagaaaaagccaaaggataaaaagaaaaagcttaaatttctcaacaactattgcacaaatcttactcagaaagcaagagagggcaagcttgataacgttgtgggcagagataaggagatatcaagagttatccatatcctgtcaaggcgtcagaagaacaacccatgccttataggcgaacctggcgttggtaaaacagccattgccgagggtatcgcacagaggatagttggcggagatgtgccgttccatatcaaggataaggagctttacctcctcgaccttactgcacttg

SEQ ID NO: 6135 - DNA, 877 bp, Unknown
  gut microbiota DNA sequence
ctccccgcaaagcaacgcgaaataaaatactgtttttcttgatttccggctttgtcgtaagagtaatccggtaagtggaaggtttttccgtattcgggaatatatattcggcttgcttcaactgcacactcactaaagtccaccccaatacaaaacaggccaaaaacacgacagccccatatagcttgcaaagaacataatacttacggccaagaatatatgtccctatcaacagcagaatgacagctatccaccaaccgacggacagtatataaggatatttatccccatatactattccaccaaccaacggcatcaacagtcgcaggaaaggatgccgttgtaagttgtctgttatcaataaatattacagatttttcaaagcacggattgcctctgttgggtcgggagcggaaaatacggcattgccggcaaccaaggcatcggctcctgcatctaccagacgggagcctgtatccagattgacaccgccgtcgacctctatcagggcttccgaaccggtcactgttatcagttcgcgcaactcgcgtaccttatcaacagtatgttctataaatttctgaccgccgaatcccggattcacccccattatcaacaccatatagacatcgttgataatatctctcagcatagataccggagtagccggattgatagtaaccgccggcaacattcccgcttcgcggatttgctgcactaccctatgcaaatgcggacatgcctcataatgcacgttcattatacgtgcccccaacgcctttacttccgggatgaacttttccggctgcacaatcatcagatgcacatccaaaggcttctcggcaagctttgccacatacttcaataccggaaaacc

SEQ ID NO: 6136 - DNA, 1169 bp, Unknown
  gut microbiota DNA sequence
gtatactccctttccgacaaaatgccaatcccggtgaattcagttatgcccgctatttaaaacaaaaaaacgttttttttcatctactaccggttagtcccatccggcaaaacggtcattcggacgatttatacaccgttttcgatcaccttcgcaagaaatggctaagtaagacccaacggttattttcagactcaacctgttgccaactcgtaaacgctctctgtctgggatataaaaacgacctcgacagcgagatacaaaatctgtttatctcgacgggaacagtccatcttttatcggtctccggtctgcataccggtgctatttacttatttatactgtttattttcaaaagtatcggtttcccttcccgtaaaattacttttgtggtattcccgattctttggtgttacgtttgtctcaccggtttatccccatccgttgtcagggctgcaacgatcctttcttttattcatatcggtcaatatttcaaccgatcctatacccccctgaactctgttgcagcagcagcttttctaaccttatcgtttcatccctcgaatttgtattcactcagtttcctgttatcgtacagcgcttataccggtatactgactatttatccttttttatatcgatttgccggaaagctccccctttttccggctaaaatatatgcctgttgctgtattacaattgcagctcaattgccgactcttcccatcagcgcctattatttccatacgatcaatttgaacggcttcttagccaacctggtcgcggttccattagctacttttctgctctatgccgccatgctttgtctgatactcccctttctactcagtcagtacctggcctggattccggaagtgacagaaaaaataatcatgggatttctgcatatcttcgctccttacagtttcaacctgcatcacttgtatccctctgttcccaccgttttattgtcctatatcagtttgatttttctatatctctattttaccaaacccgggaaaaaatggagaagatattccatactcactctctttattctcttatgctggcatatatcctcccatttttatcttgccaatcgccaggaaatcatcgtatttcaacttcctcaaaaaagtgctattatactgaattataagggatattat

SEQ ID NO: 6137 - DNA, 591 bp, Unknown
  gut microbiota DNA sequence
aagaacttttcatttattatgaatgaagatggtgcctggcgtcttgctcctgcatacgatattacctatatcattgacagaggtggttatttgccgaacatggatcattgcatgtatattcgaaccaaactgcatgacatcacacgctcggatgtcattgattttgcccgtgataacggaatccgccgtcccgatgctatcatcagagatgtcgtttcctcattgaaacaattccgtacaatagcagttgaaaatggggtatcggagtcgtggataggcagagttgagtcaactatcgccaaccacctgaaagcatgggacgaatgggaatgcgaagccgagaatgctacaatggaaatcaacggacacgccatcagcgatatacgtgttgagcagacttataaaggaaactatcatctgctggcaagcattgatggcgtagaaaggaaatttgtgataaataaaaagaatgcagactttgcctatatagaacaaattggtttggcaaatcttacgactgagcatttgaaaactctggtggaaaaatgttttaatctgtaaggttaagttatgctgaccaaaagaaaaccc

SEQ ID NO: 6138 - DNA, 431 bp, Unknown
  gut microbiota DNA sequence
aaagacttgcacagactaaatacttcactggaaaagtcaatgattcaaattaaattccgaaaaacaatattttcgagggtggcaggttattccttccagctttcaaaatagtgcttttgaagtagtttatcaatgtcgctctggcggtagatgattttaccttttatctggataaagggaattagccctgtatctcgccactcttgcagggttcgcaaactgacattcagttttttagaaacctcattattagaaagaaagcactccccgttcaggtggggcttatagtgcttgacaattgattcaataccgttcagcattgaatcgagcgaagaaatgaactctttgacttgtggtgtatctttatttattagttccatgattgaaagattgttttattgaaatattgatttcaagattgctagatagct

SEQ ID NO: 6139 - DNA, 433 bp, Unknown
  gut microbiota DNA sequence
tcaatagttcgttaaaaattcgccaagcctaagctgctctggcagtaaataaaatgagttctttgaaaagtttgtcaataacttgcgggtctgggctaatcccaaacacgcaaataaatcgttcaagcatataagcattgtgtatgaatgacttgcaggaggatatggaataggctattccgagcctcttacatgccgctttggccaagttgacagctgcgagcgatgcattgaagtgaaaatccaacttcctgaagtcggttgactggcagttggtgattcctgcatgctgcttgccatctctaaagcaaaattccagttggaacctggttctgtaataatccagcacctcacgtccatccatggaatcgtctgtagagaagtaaagctgccacttgtctgtcctcccgtccatcggataccagacgactaa

SEQ ID NO: 6140 - DNA, 18482 bp, Unknown
  gut microbiota DNA sequence
aaatatgcaggaaaatatacaagaaataaatatctttacagagtatttgcagcaagttttatattgttaatatccggtaacaaaccaataagtatacccttatgaaaaaaataagactgatacaattattgttcctatccttatttctgatcgggacatacctcccaactcaagcccagaaaatagacacgatctcggtttacagtacgtccatgaaaaaacaaattaaaaatatcattatcctgcctgccagctatacccaaaatacacagaaaaaatacccggtagcctatctgctccacggttatggaggatgttacgatacgtgggccacctatacaaaacccgatctggctcaaatggcttctaatttcgatatgatcatcgtatgtcccgacggcctgaacagttggtattgggatagccccatcaatccttcctaccgctatgaaacttatgtgagcaaagagctgatcaactatatcgattcccaataccgcacttataataaccgcaaaggaagagctatcaccggtttcagtatgggcgggcacggtgctttatggctggctttccgtcacccggacacttacggagcctgtggctcgataagcggaggtgtcgatatccggcctttccccgaaaattgggaaatgaagcaattgctgggcccctattccgagaatccccagcgttggaacgaatataccgtaatcaaccaatcgccctacaacagcaagtcgggacctttagccatcattatcgattgcggatattacgacttcttctataccgtaaatcagaaattacatgaaaaactccggtattacaatattccccacgatttcctcacccgtccgggcgggcatacacacgaatattggaataatgcaatagattatcaactgctgtttttttataaatatttccaccctaattgaccgaaaatcttcgatagataaaaggcatttcaagcccgctaagcatttctatcaggtagtgatatacatatttacaacttataaacgtaggtttatttttttctttctattccgattccgggttttatcccgtcagaccggttcgcctggaacgatccgctaaggctttccttcactgaccggcggaactcctcacttcgttcgtcagacaccaccggtcgggcgttcggaaaacctaaccggctcctcgttcccgctccaatggtctttcgccataaaaccctccatctaacggcagagctaaccggtaaaggaaatacaagcggaaatttacgaaaataggaaaaacggactatccggcttatttccagggagaatgatctttcttaaatcaagaccggtctgcaattcagtgataacgtaagtcggaggtgttcgtgttcggggaccattggagctctggcgagtgtcgtcttgctttttctgaacgcccgaccggtggtgtctgacgaacgcagtgaggagttccgccggtcagtgaaagaaaaagatagacgaccgacagaagcgaccgggtccccaaacacgatcaccgaagacgaataaataacaaaataaacctacatttagagtaaacatgtatataagcacctttcattattaggtccggtagaaaattttccgaccatcaaggcaacgagaaatccggtcatttatgtaatccacattctttgtgttcaggcgactcccaccaccaacgtccggcccggatatcttcgccgggcttaacagcccgggtacagggctgacaaccgatactcggaaatccctgatcatgcaatttattataaggtacgccgtgctcacggatatactcccatacctcggtttctgtccaatcgatcaaaggattcacttttatcaatccgttcatcccgtcccactctaccaactgatttcctgtacgggtaaccgattgttcgtgccgcaatccgcaaatccacactttcattccctggaaagcacgtttcagaggttccagtttacggatatgacaacataacctcctgtattcaatgctatcgtaaaataaattcaccccatgttccgccaccattttttccacttcgtgatagtccgggaaaaatacctgaatccggattccatatgtcatatttgtccgcccgatcagactatatgtttcaggaaacaaccgcccggtgtccaaagtaaaaatacgggtagtcgcatcgatcccgcaaatcatagcagtcaacacctggtcttcaatccccagactcgacgccagagcaatatgtccctggtatttttccaaaaaataatccaatacctcttccgccttcttgcctttcagctgctcattcaaccgtattacatcctctttcatcatatcccaatcgatttttactttcctccccagctccaagcccttagcttatagctttttcccactttttactttttctaactaaataccccggccaaatatttctgtgtcaactccttttgtggatttttaaagatttgttctgccggtccggcctcgatgatctctcccatatacataaagatcacataatcggcaattcgtaaggcctgacgcaacgtatgcgtcaccaatacgatagcatattcctctttaagttttaaaaacagatcctcgatggttttactcgatataggatccaaagccgaagtcgcttcgtctgccaggataaactggggttcgacagctaatccccgggccagacagaggcgttgttgctgtccgatagacatccgacctgccggagtatgcaaacgatctttcacctcttcccataatcccacagcctgcaggtaatggcgtacgatcatattcagcttcttccggttacgtataccatgaatccggcaaccgtaagcgatattatcataaacagacatcggtagcggacagggacgttgcgacaacaatcccatcttacgccgtatatgtgtaatctctactcccggagcatacaattcttccccgtctaccaacacactacccgaaatatgaacctcttcattcgtatccaacagacggttcaagctcttgagcaaagtcgactttccacaacccgaaggaccgataatacaggtaatcttccggtccggaataactgccgacacctctttcagaatatgattgtgctggatagtgacattcaaatggtctacgacaatgttcgatcttttggaatcatcggtacaaaatttctgattcggacgaaaaaaaccttttttcaattctgtttcattcaaatcggacatattataccatttgattttcttacctaaaaacggaatattcatatatagttaccagattactaagttactcaattattttaatcacgatgattactgaattttattcctggagaaacggttcgtaataatccgtcccaggatactcaatatcaaaacaataatagtcaatatcaaagcggcggcatacgccctttcctgaactgcgggtatagggctgctcagctgaaaaaatacggccagaggcaaagtggctgccggctgtcccagggaagtcgggatattatccgtatacccggcagtgaacaacaccgcagcagcatctccgatcgcccggccgatagacaacaaagtagctgtagcgatacccggagcgatctgccggacaaccactttgatcgtttcgtaacgcgtagctcccagggaataagaagcattcagcatatcctgcggcaattcccgggcaatctcgtccatcgaacggataaaaatcggaatgatcaatagcgttatgacaataataccaccggccaaagaagtcttcaaccccaaatagatcatgatggtaaaagcaaaagccccgtatacgatcgaagggattccgaaaagcacatcatacgccagtcgggcgaacgaaccccgtttcgaattttttttcagatatacattcagataaaacacgacaggaatactcaccgccagccccaataccgtagaagctcccacaatatacaacgaaccgacgatagcattcagcaaccctccttctttgccgatgtaaaacccgcctcccggcaaagaggaaatcatttcccaattcatggctccccagccgtttttgacgatggtatataaaatactgcctacaaacaaaaataccagtaatgttgtcaccaacatcaccactttcatagccttctcttcaataaatttcaatttcatgacatcggtttttcgatcataccaaattccgttccagctttctaaggatcaggcgggaagcgatattaaagacaaatacgaccacaaacaaaatcaaagcggcaaacatcaatgccgattcataaagcggcaatgacaacatttccccgtagttattggcgatcaatgccggcaacggataacaaccgtcgaataacgagtcgggaagttgtacaatatttccacacaccatcaacacggcgatcgtctcccccatagccctcgaaatagccagggtcaccgaagctactatccccgggaaagtcttcttcagcaatacatatttcgtcgtctgccaacgggttgctcccaaggataaggaagcttcccggtattccttaggaacagaagaaaataattccacaaacaaactgatcagcaaaggcaggatcatgatccccaatacaataccggcagccagtgtggaataacctgtagaatattccacaaagtgtggagccaaccgatcggaaatccaggggactacgactaaaataccccacactccatagacgaccgaaggcagaccggccaaaatatcgagagccggaaacaccacccttttcacccaactcttagaattttccgtcaggaaaatagcggtaaataacgaaaccggtaaagtccaaaggatagcgatagccgtcacccaaagggtacccataataaacggcaggaaaccgaaatccccgcgcatcggtttccatttcgctccactaagtaactcccacagggatttgtcgtgtaaaataggcaaagatttcagcaccagaccaataccgatcagcacgaccaacaacacagacactaacgtaaaagtcaacatcattgatccggccatcttatctttgatcaggcggatcctggaagttttttgtacaatcttatcttcttcctccatcattattcctgcaatttgaataattcttcttccaatatatcggatgaaagcccgatatatcccacttcaggagcatattgctgcccatctgtcaaaataaattcgagaaaagcaagcacttccggtttcatcggttttccattcgaaaccaaaaacaggttccgggccggtgggctgggatatttcccttctgcaatagcagcattcaattctgtactagtggcataaaaatcttcttccggatcgatctttccattgccgttcaaatccaagggaatcactgcgatatgccgataaggctttttagaattgatatcgtaagcataggcaatattattaaatccgatccctactttgtcacgttgcaccacagaagtgactccgggatctccgaatacagcggttccttccagatcctcttgtttagctcctaaccaggcagcaaaagtttctgcagcaccgcaagcatccgagcgggtatacacatgtaccggtatcgtactgcccgtccccagcacatcgccccaggtccgggctgtggtatgaatccacagatcctgagccacctgttgctttaaaccggtcgctaatatctgatcgatcaaaggattattcgaattaatagtaggtacgacggcatccttcaccaccgctatcgggaaagcccctttttccagttcctgcggataaatatcccgggagaccattccaaggtctaccaccttagccaaagcatcggtaattcctttaccagccccaccggcagaaatatcgatcctcactttaggatggatcttacgaaactcttccgcccatttcacagccataggataaagagcaaaagctccggataattgaatctcaccttgcaactcccgacgtaattcccgcctgtatctcaatcgtttaatccatccctgtcttttctcctgtgcctgtaattcatctgcaactccggcaaccaatacaacagataaagacaaaactgcaaaaactacacgtatattccgcatcatattttatttaaaataccaaatcttcaacaatttatatgccaaaccactattattcatttacttggcatatttatcgaaaagctatgcaaagctattcatattctgttaaataacaatacctatccaacgctattttaataagcttttttacttatttcacacaaaaatagctccctttcggggagctatatccatgtattatttctaacacattcaatgagggattgccgacctcttgtatctttatgactttaaccgccaaacgaccaggttactaaatttgaaataacatgaaataaaaactatttcaagccacaaagtaaacactatttatttacaatccaaaattattcttcatagggttcgaattcatctttaccgaccccacacaagggacagacccaatcatcaggcaaatcttcgaaagctgttcccggttcgatgccagcatccggatcaccttgtaccggatcataaacgtaatcacatacagtgcaaatgtactttttcatggttctatgatttagtgataaaactatatttcctatattatacgatctatcggttaaaaagatatattttgtcgtctaacatcatacaaatatgcaaatttcaattgaagaaaaacacaaaaaacgaaaaagtttcgagcctcacggcgggaaacttttcactactaactaacctaatacaaacttatgaaaaaaaaatgtcttctaaatcttaacgccacaaaagtaagcttgcaatatgacaagttcgtgacaaactcatgacgttactgttaaatgttaaaacaaaaaggatgccgcaaaagcatccttttttcaatttcgccgaaatattactacttattcacatcatttacaaattgtaaatctacgggagtaaattcgcctgcaattttaacaattcattaataagaggtatgttgcggatcaaaattcgtccaaccgctcatccaattgtccgcctccttgtcactggcaaaagcaccgatataagacactttgtcaaaaccactgctcagcaaaacatcggtaaaatcggcagctcccagtaacggacttccagtcagagggccgtaattcggagaagctgccatactattgggttggctcaacttcagatcggcaatagccggataagcgacattccccgtagctgtattaaaataagtctcagaaaatgccgtctgtgtggcatcgatattcgtaccgtccgtacacaaacctccttgcaggctcttatttttatcacttcctaaaattcccattcctgcaaaaacgatatgattcagtttaaaaacctcgtttttagctgcctcctgagtctgagaacctttatcgttctcgatcaaaagtccgaccggataccccatagcgaccgaattaaaacaactcagatgagagttgcggcgaatttgtatcgcagcctggaattgccctaaccgtgaaccgttattggggttcaggccatttcctttgatatactctgtggtattttgaaaagcaggatcctgcccgaccggtccgacaaaagtcacattactgaaaactgtttttgtaaaaggttcctgagtcgttccatttccattattatcactctcgaaaccattggaaatagactgatcggcaatacccggattccgtactcccagacaaaactgcactttccctgaaaaaccgttatcggtatcgaaatcatcatcccatccgtgataggccaccagatatttacaatttaccgatccgccgaaccattcgaaggaatcatcgttcgaataagacacctgtacatggtcgacctgcgtccccgatccgacacttccgaaagtcaccccgttgatttcctggtccgtatcaaaaggattacctgcaaattcgacccgcacataactcaatactcctgaattatccgcattgtcatttcctccgtgctcggtacgcaatcctccttcaatagtcatttttccctgattattcaccgcttttccgcacaggataatacctccccaatctccgggtttacgcgaaccgacaggttcgttggaagtaaacacaataggagcatcctgtctacccctggcaatcagtttacctccaggctcggcaataatcgctgctttggtggctttatccccttttatgaccgtacctgcttctatttcgagcgacgaaccatcggtaatatacaaccaccctttcatcacatatactcccttgggcaacttatagtttccgtttatctccatctcatccgccccattgcccagctgagtaccgttttcaaacagaatatcactcagattatctccatcatcatcgccgttatccccattaccgccgttatcatcactacaagcagtaattccaagggttaagacaagcattaaaagcatctgccatttcttcaaaattgttttcataacgattaaaattaacttttatagattacaaatgaatactcacacttaaggtaaaggatctccccggtgcaaaacgctttgtggtttgttccctttccacgatctgtccattcgcgtcttcaaacctgggaaattgtttaaacacagcatcctgcccgatgacgtccttcgcatttagtttcacctctacttgttttccgaactttttgctcaatacaatatcgagtgcatcatgaggcatttcgtacatatccgggatatcgttattgatagatcctcccacactcatatccgaccgcccgattccgacaatcctttttcctatccggttataaagcactccggccatcacgcctgctttttccgtctggtaaaacaaccctgcattcaccaggtaaggcgattggccctgcatcggccggtcatgctccaggctattctcactatcgaaagaaactttactctttatccacgacccattcaggttcaacataaaattccgcaaaccgataaattccaaatctttacgaatatctacctccacaccataattccgggccttatcggcattttcaaaagtataggtataacttccgccaccatcccggaaagtccattcgatcggatgccggaaatgcttgtaaaacaaagctacagataccgattcgccactagccggataccattcgtaacgtaaatccagattatgaatataggccggtttcaaatccggatttccttttacatcactgaacaattcgaaatcttcgtacacagacgacgaaacttcccgaaattcctgccggttcaccgacttaccgtaagcaaaacggatcaattgtttatctgtcagattataactgacattcacagaagggaaaaaatcggtattgtcaaagtcagtgtctttagaaatccaggcattcgaactgatataattggtcagtgtcatattcctgttttccagccgtacccctgcataaacattaaaacgctgccaggggatattcaaagccagataagccgcatacaacagattattccctttataactatttttattatccgtatcatcatagagataaagcttgtcagctccgaaattttctgcctgcaaaatattttccaccaccgactcataagcgaatcctgcaggcatatgatcttcataaaaccggtaataataggcccggtttttataatctctcttacaatactctccatatacccccgctttcagggtcggcgtaaatcctccgctttcattgaaaagataattgtaattcgcaccgaaagatacaatgtgttcatccaaacgcaggaaatccctatagatatcgttttggtcgatcctcatttttccatagttcacatcccctacgatatcgttttgctgacgctcgataatccgcctgtccggctggtttttatttgcatacgaataacccagattccaatccagtgtccctgccggcaaatcgtggactcccgaaaattgcccacaataggtactgcggctgccataaatatattctgctttttcctgaatatataaagagctgatattctgccaaccacgacgttcggtatatcggttacttcccaattggttaaaaatattccggaaataaaaacggcttttactccccgtaaaggccagattcagcatcgcccccaacctggcgttccgggtatattggttatcggtatatttatactgataaatcggctcatcctttactttgttatacacaccgaaacgggagttttccatgccgatataacttttaccggtattgctataattcaaggctccggttaaagccagtttcctgtcttctcctcccttgaacacctggccgaacatgaaagagaaacgctggtcgggaaagggctttttatgcctcactttccaatcattgttaaacccctgttttgtcatctcttccaccgaagccgcatcttcattatcgaacactccttttatccccccttttaccattcgcatcccattgtcaaatccaagccaatcggttgcacttcccttattgtatttgaaattcctgaaatgagtccgatcattcacactaaccccataactcagcatatattgatttttttcaggagtatctttcgtactgattttgataaaacctccggtaaaatcggccggaatctccggagaaggcgacttcatgatcataatattctcgatctgggcactaggaacgatatcgaaagaaaaagccctcgaatccgcctccgaactaggaacagcactattattgatccatacattattgtatcgctgggataatccccgggcaataacgaacttatcgtcgataatcgatattcccggaatacgttttacaacctccgaagcatcccgatcctggcttttggtgatcagctgactggaaaccgcactcatcactacaggcgaagccttaacagcattcaccatggccacctcgctgttcatcttacggacagcccgcacagtcacttcctccaatgcttcggtagcagcttccagcacgatcttcagttccacggtacgatcgtccgttatttcaaccccttccaccttcaaagtagtataagacagacaagaaacatgcagattatatttccctgccggtatcccggaaatcgaaaagctaccatccagatcggtagcagcccctttcagcgtctgctcgagcataacagcagcaccgatcaccggttccccactgtttttatccaatactgtcccttttataatcccttcagctttcaacaatgctgtgggacaggccaacccgataaaaccaaacaaacagaccttaaaaaacacacttgacatccaattcatcatttgcaatattatatcttaaatttcattgcaaagatgaaaagaggatgttacagacttgtaacgaagctgttaagtaaaaatgaatagaaaaacaggatttttccgattggtcacataaaaacgacatgccgttgtagtatcgaagtaatcttcggccgtagctgaccggcatttataggcttagacatataggcattaaaaccgttgtccatagccttctgttcatccgatgcataagcaaaagcagtcaccgcaataatcggcacttgcaaagagaacttccggatctcacgggtggcttcataaccgtccatcaccggcatattgatatccatcaaaatcaactgcggttcgtattcccggtataactcaatagcttccttcccgttccaggcatgcaaaagatggtaatcctttcccaatatcgattcgatcagtttaaaattactcccgttatcctcagccaccaaaatagtcagggtcttttgttcgatccgcataggctcgatcttttttccgcctgaaatttttctgccggagcaataaaaggcagggtaaaccaaaatgtcgccccttcaccggtttctgactgtaagccgatttctccccccatatgctctaccaacatttggcaaatcgaaagcccgaggcctgtcccctgagcaaagctgttcagcttgacaaaacgtccgaaaacagcatcctgcttatcccggggtatcccacaaccggtatccctgacgtaaaaatacaactgcccactctcccacagttgatagccgaagcggatacttccctcttctgtaaacttaatggcattggtcaccagattgatgatcagttgggacaagcggtttcgttccaaatggacataacattcctgtaagccgggttcgaaacaaagttgcacttctttggccggatctaattttaaacgcagggaattttccagttcgtccatcactttattcagctcaaaatcagaataaacaaactccatcgttcctgcttcgatctttgataggtccaaaatatcactgatcagttgcaacaacaaagcattgttgttctcgatgatactcacatactcttgtttttcctgtccctcttcagcagaagccaaaattcctgaaaaaccgacaatggcattcaatggagtccggatctcatgactcatattggccaggaaggccgatttcaaacggttcgattcctctgcccgttccttagccgacaataattcggcttctattcttttccgctcggtaatgatcagcgaagagccaaccaaagtcagaggcttcccatattcatcacgggtttcgactgccgcctgagcttcaacccaatctatccggtaatggtcattcactttgtcgatcacccggtattcctctttcacttttgcaatacgcccttcgatcaggtcggcataagctttcttcactttctccagatcttccttatggatttttgaaaaatattgccagtccggcacaaaaagttgctcttcatccacctccgtctcctccctgcttaattcgattggccggttgacatcacagagaatcgtatgagcctgtaaatcccacttccagggcacaatattcgcaacatccaatgccatggaaagcttttggttggtcaagcccaactgtttctgggcatgatgaagctccgtactatccacgcagaatatatctaccccatggccgtcttctgtgacatttactacgacgtcgtaaaaaatatcgatttttttatagtaataggggaaagtcaccgaccgtttctcccaaagagctatattcacaaaatgcagaaattacggcatcgactccggaaagacctcactccccagtttcccgataatctcttcccgtttgaaaaaattattttcaaaataacgatttatatctaaatatctcgtatcgacaacctttccttctgcatccttaatcagctcttcatgcatataaaggatcggcatattatcgatcagatccaagtacctctcattggcctgcaattctctgcgttgtatcatttttatcttttccagtacccgcaaacgatgatattggaaaattagcaatacccccactaaaagaaaaccgatcccgatcagtatatacttatatttctcccaaaaggtaggcggcatattgtaaaaaacagttcccggcggacacaactcaggatcgaggttacgctgcaacaacgattgataattaaacacaggcgtccctttcgggccatagtaaaaagggatatcacgtgcctgacgcccaccgataatctccctgatcgtttcgcaaagatgagcgacataatctgttttattataaataaaacctccgataattcctccttcctcttcgattccgacattcttaaaagaaaacaacggcaccgaagaagtggctataatccgatggctgttagcatacaacacggtattgccggcataaactcttttttgaaaccaggatgaaaataaaatacccgttgtccggacatctatctgatttaaaatagtgaaaagactatcgataccgatatccctggaacatagaaaacggtatttcaattcaggatatccggactccatcaaatgtttcagatcataatcattctgctgacaaatataagtttcatcaccgatatacaatacttccttcataccgggaatcaaccgtttcatcaaatccaggttttcttcgaaatagacctggatcggcatagaggtcatattatatttaccctgccaagcggtcaagggcatacgctcttccggagtcagcggttgttttttcaacaccatatccttatttccggcataatcccgctctccacacaatatgatcgggatatccggccactgacgatccaaatcctcacacagaataaaactggctgtccccaataatacaatcagtttcggaggacgggtctcaaaatccttaaaaatatttttctcaaatgcagccaattcctcttcaccatccatcatcaacatattcatatgctcggtatatacccccaatttttcatcttgtgaagccatactgacaatcggataaatcatgctgttactccaaggagtcgattccgtataagtattgattatcaagacatagttaacatctccctcaacatttttaccacacaaggtatgcacacaacacaaaaggcaggcaatccaacatgccgtcctgtaaatatttttcataaaaattttaaattttcaccctattttatatatcaggatgcgtaaaagtaaggagaaataaccatacaggcaagaaaataccccaatataaaagtccggatactttaaaaaacaaggacttaaatgctcgtctttcaagttacccgaggatttaaaattttcatcgtataaaattagtcatgacccgaagttccggttccggccgttcttcccgtttcactcctttcagcaaccaagccatattccggcccagcatacgcatagtctgaagtccttcggcatcctctgttgcttctccgggccgcatcccatgaacgctattccagtattgcgaagaaactaccggcatattcaggatagtaaaatatttgttcaaccggtcgaaagtggcactcgccccaccccggcgacaaacagccaccgaagctccggctttgtaagccaacaattccgaacaggaataaaacacccggtcgagcaatgcacagagcgccccgttcggaccggcataatataccggcgaaccaacgacgataccatctgcttcctgcaatgcttctctgacctgattataaagggtgtcctgaaatacacaatgtcccaactctgcacacttattacaagcaatacacccttgcaccgcttttatcccaagttggattatctccgtttgtacaccttctttttcaagtgcccccgctacttccgaaagggcgataaacgtattccctttccggtgaggacttccatttattaagacgactttcatggctattcatttttatacctgcaacaaaattaaaaaagaatcatcggtctctcccatttcaaccgagatatttactctatatacgcttaaaaaaagcctctacagtaggtgcctgaaactgaaattccttttccagcaaacgggtaggtttcacacattggccctcggtcagcaaaacagccccctccccataaaacaatcgaaaaaaaacagtcgggagttttacggttaatcgggcatgataccgtcgggccaaagcagcggtaaaagcagcgttagtcgtctgctccggcgtcacaaaattaaaaaccccactccatccgggctggtcgatcacaaatcccattgccccgatcaaatcagttagagcaatccaggtaaaaggttgattcccggacccgatcaccgttgccaatctactctgcaaaggacggataagttgcagaaaagccccaccctcaggggataataccaccccaaaacgcgtaatgatcaatctggccgacttccggatcagtccagcctctgcttcccaagccctacacaatccggccaaaaaaccatcgcttttcacatgactatattcatcgtaacagccccgggaagggtaatatcctaccgccgaagccgaaataaaaagccgaacccggtcagtccggttaatcgcatcgaccagcatacgtgtaggaatgatccggctatcgtacaattcctgtttatatgccgtcgtccaacgatgattgacaggggctcctgccaaattaataacgacatccattccttccatcaactttgccaaatgatcggcatttccccgaccgaaccatttccgtccaagtcctgtcacttcatgcccctgtcccgataaataacgggttaaatgtgtaccgataaaaccggtcgctccactaattgcaattttcatctgcttgtttttctgagttgaacggaaataactcagtaaagtttttgaacaatcgttattccgcaactacaacctcaaaagaaataaacagacgaaaatattttttatattttatccatatgaccaaccttgaaacacgcaaaccatcacagttcgtaacggtatctcccggaacaacaacaaaagatcttcgggcacttcatcaaactcaatcatttctcacgccacaccagccccggccccgccgttagtcagggattctatttattcagataagcatccgctttctctttcatccgggacgcccgtttggcactatcgggatgactagaaaacatctgctgaaatttagatgccttttgtccctcggacaaattattcaacttctccagtgcattagccatcccataaggatcgaaaccatgtttgatacaaaattcaaacccatattcatcggcttcagtttcttgtttttgtgaaaattgagcattcgacaaggcttgggcaatctcccccagttgtgaatcggtcaatttttccaatactcctcctgcagctcctgccgcgctctttgcagcagcagccaaataggcatttttcatggcatccttactgtcggtatgtacgacatgaccgatttcatgaccgataactgccatcagttcgtcgtcatccatcaggtccatcaaggccgaaaatacccgaatactcccgtctccgcaagcaaacgcattgatatccaccacctcatataccttatagttcaatttcaaaccttctatctcccctacttttttcatcagcgaatccaaacgtttagaataagccgatccggggtctgaaaccggattttgctcatccatccatttcaccgactcacggcacaaagcagctacatcctcatccgacaaggtaatggcagaagccacttccgaagccgcattcaacactttcttcgtattgatcgtacggtttccgatttttatctgagcctgtccccagctcacacttccggccaacaccagaaccactaacatccattttttcatttccttcctatttttcatattaaaccgcacaaaaatataaaatagttcttataatcagaatcaccactcgatttctgccaatcctttactccggaaataggcattggctttactgaaatgcttgcatccgaaaaagccccggtctgcagacagcggggaaggatggggagccgtcagtacacaatgccgagtacggtcgataaaagtcccttttttctgagcatacgccccccacaacataaacacgatatgctcccgttcatcattcagtcgccggatcacggcatccgtaaactcttcccagccttttccctgatgcgaaccggcctgatgtgcccgtacggtcagaatggcattgatcaataatactccctgatccgcccagcgctccaaacgtcccgaacagggaataggcttccccagatcgttctgtatctctttgaaaatatttaccaacgaaggcgggaaaggaactccgtccatcaccgaaaagcaaagtccgtaatactgccccggctcgtgatagggatcctgccccagaatgactacctttaccttttcaaaaggacaagtattgtaagcatgaaaaatccgacttcccggagggaaaaccgtataacgcgcatattcctctttcacaaatcccactaaatgctcaaaatagggtttatcgaactcttcctgtaattgtctccgccagctttcttctatttgtactttcatagtaatttgaaatcacagacaccactacatatttcatttatttttgcaaaaataacataataaccacaaataaaaaaatgaatacagggaatcggatctgcattccctgattcggttgaaagatcacctttacaaagaaaaaaatgctccatgcatatttacaccaggacctcatacctacgttccctggtcctgaattgtctcatccaccagataaacgatcgactcatacggttgttcgatatggtcctgcatcgcaatctcacaggtccgtgccaaagaataacaaccgtcgaacgattcatggccaatttcatcccgttcatcccgggttgccgaat

SEQ ID NO: 6141 - DNA, 586 bp, Unknown
  gut microbiota DNA sequence
gcaacaccggagtaagtcccatgatctgacaggaacaggtcggatgaagtaaaatccgatttttcgggcgaataactttgattcggggtaaaacaacttctttgagccattgtgtgatatccatgattttcaattgcttgtatttctcccggttttcgggggtaagtatgtccccaccggtttcaaacaacagtgtatgtgtacacgaagtggtatcacagaatatcggaatccgtcctccgcccgaccatttataaaaactttctatcgtacggttggcggtcaaccgctgtcccgcaggatttcccttatgttcccaaatctgtgaacaacacaacccatgcgcctcttctggcagacttacccgaatcccggctttaccggccaaccgcagtactactgtgatcaaatcgtctttatgcaaacccgaagcaccgaaaatacgggtgacacaagccgggaaataaacaaaatcgggattcgcttcttcccggtaatgtaattttcggggcatcggaaaatgagacgaccaatgaggcacctgatgcgatatcctgtgtaaaaaatcggtagcccaaagcagagg

SEQ ID NO: 6142 - DNA, 448 bp, Unknown
  gut microbiota DNA sequence
atgccgcaaggtattccggtatctttggcatacaggcaactgttgcggttaaaagcggaaacggcttttaaattgcatttgcatagtgaagttaaggccatttccgcccgtttgggaggcagatacaagcatatcgagaaattgataaataaaggaaacgataatgataacctgtgaagaaatatatagcctgcatacaagcaagactccggaatccgatatccacgtagcatatagggatatcccgcttgacagtaggaacggaatgcggaaaaatgatactcccctgcatgtggcttgtacatttgccgatgaggatgcagtacgcatattgttggaacgtggagcggatgtaaatgtaaagaataacgacggagacactccgctatgtgtgttggcaaaacacaattattgtcggcaagaagctacatttgccgatattgccgga

SEQ ID NO: 6143 - DNA, 274 bp, Unknown
  gut microbiota DNA sequence
aggagaccggatgacagaacttaaaataaacacatagcgaaaaagtaaatttgggcaaagcgtagcgaattagctgatagagtgttcgttacgctttgtttttctatggggcagagccaacgaaataccacctcgaagccaaacagcgcaagagttcagttaccacctcattacccccgtaacgggtgtgaatttcttgctaaatggttctgtttctgtgatttgcgtaattttgcatagcagtcggtaactcactaataactaattttgtaac

SEQ ID NO: 6144 - DNA, 446 bp, Unknown
  gut microbiota DNA sequence
caatgaccatgtcgcattcaggtgtttgttgataatgattgcttcatttatccattccagctgttcttctatattaccttcgaacaaacataaattgtttagattactggctatgcttttaagattctttgaggatcggttaatggccaatgcttgttttaagaaacgttccgcttgttgaaattcattaatataggtatgtataataccacggttgttatagcataaagctaaattaagggaatcgttttccgttttaaacaatgaaatggctttatcgcttagattgattgctttagtataatctcccaagttgcagtatcctacactcattaaattatagatatgccctttcaagtcattctcatttttggaaactaatgcgtctgcttcgtataaagcttgaatacatccgtcgaaatctccaagtaatttttcagcttgtg

SEQ ID NO: 6145 - DNA, 580 bp, Unknown
  gut microbiota DNA sequence
ctctgcatctgtcctccggaaagctctcctatcgggcgatttccgaaacctcccattccgtatgtttctaaaagatcattcaccttttcccgatcagccttcgtgtaacccttaaaaattcccttctccgacatcaaaccggacaagacgacctctttcacgctaatcggaaatcttgcatcaaaacggctgttctgaggcaaataaccaaacaacgattgtttcgtaacatgataaacaatttcaccggagaaaggttttagcaatcccaaaatcaccttcaataaagttgttttccctcccccgttcggtccgatgatcccgataaaatcatgttcccgaatggtaagatttacgtcccgcaacacgaccgtctgctcgtatcccgctgtaatcccttttaactccagaagttcattcattcttctatttcattttctgttcaatgatacccaataaagaacacatctcggccttccagtccgggctcaacggatctatggctatcacccctccatcaatctccttggcgatagccttggcattgtccacatcaaattgattctgaatgaaaacaatc

SEQ ID NO: 6146 - DNA, 287 bp, Unknown
  gut microbiota DNA sequence
ttgaaaagtgcttatatttcactgaatactatcatgaataccgatctgcaaaaacatatgtacgtagacgattctatccggctgcatatgcctttgcaatatcaggatttgttgaccgatctgttgcaatacaatactaccctgcaaatcgggcgccgggaccggaaagtctctgaattggacatgaagatcgcccgggccgctttgttccctaaattagatttcgatgccggatataactacaaccgcaccaaatctccggcctcggtcacttccctcaaccgttc

SEQ ID NO: 6147 - DNA, 582 bp, Unknown
  gut microbiota DNA sequence
catttcgaatccttcgaacggagactttttgttcttatcatagtaacccaagtagccgtattgtgccgaagcatacaacactaacggacgtttttcactacgagtcaacggcatgaaaatctttccgctgaatttccacttatgatactcgatccatctatacttcacttgatccttctctgcctcgaaatgacgatttgagaacaaggaatacggcggggtcaatgtcaatgaaaatgtgaattcactacccattcttgtaaatagcgggttgtcaatagaacttctcttgataaccgttgcgatagacaagttattggaattaccatcactgaaaatataataaggccaattcttcaactgatagcgttggaatgaaatctcgttatacatcgtaaaccagttatccggccaattaatgcgtcgtcctaaccccacactaagaccataagtcaacatcaactgacgagaatcatacatctgggaagtattactcatataataagagttccggtaactactggaatatcccgtttgacgagagaaatacaatgatacactcaatgaattcggctttcttcc

SEQ ID NO: 6148 - DNA, 417 bp, Unknown
  gut microbiota DNA sequence
ttatttataacactcctggaaagaagtagcggacaaaattttccggaatattttttcagaaaaatatggcagcctctacagccggaacatacaggatactggagccttaactctaaaatagcccagaaactccgtcctcgtgggctattttcataaagataaaaaaagcagtcacaatataaatcatgactgctttcataattcggcgccaacctactctcccaccataaggcagtaccatcggcactcaggggcttaacttctctgttcggaatggaaagaggtggatccccccggttatagacaccttttaatatcttcaggattttatcctgtttcattacaatttcttcagttcccgttacatatcccaacaacccacagcctccgctgagaatttgacatttacaccggaaa

SEQ ID NO: 6149 - DNA, 1499 bp, Unknown
  gut microbiota DNA sequence
ggattacccttttttcgatatttttgtgacctatgtattattgagatgaaagattatggatagagtgagacgatttgcggcattattcgatatggatggggtggtgcttgacacggaggggcagtacgataatttctggcgggaacaggggaaacgttaccatccggatatgccggaatttcataaagtaattaaagggcagacgactgaactgattttgaagaattatttcgaaggtgatgtcgctttacaacaacaggtttcacgggaacttgacgaattcgagcgttggatgaattttccttacttccccggggtggaacaatttatcaggacgttacagaaacatggggtgagaacggccttggttaccagttcaaataataagaaaatggcttacgttttgagggttcacccggagtttgccgagttatttgaatgtatgatcacggcagataagattacccggtctaaaccggatccggagtgctatttgttggcagcacgagagttacagatagaaccggatgattgttgtgtcttcgaagattctttttccgggatagaggccggacagcgtgcggggatgaaggttgtcggtttggcaaccacgaatccgagggagaagatacaggacaaagtcgatcgggtgctttccgatttcacgggatgcgtgtatgacgagtttgttagcttgatggggaagtgagtcgaaggtttataaaccttcgacttattatacgatccccgagaatcccataaatgccatggccagtaatccggctgtaaccagtgcgataggggttcctttcattccttgaggaatggaggatagttccagttgttcccggattccggcaaagatggttaaggctaatccgaaacctaaggcggttgaggctgcaaaaacaacggattccagtaagttataatctttttgaatcaccatgatggccacaccaagcacggcacagttcgtcgtgatcaagggtaggaaaactcccaatgcttgataaagcgacggacttacctttttcagaatgatttctaccatctgaacgagggcggcaatgattaggataaacacgatggtttgcatgaatccaatgccgaacgggtcaagtacggttttctgtacgataaacgttaccagggttgccagaatcatcacgaacgtaacggctcctgtcataccgagtgccgtgggtacgctcttggaaacccctaggaacgggcagattcccaagaattgtgccaacacgatattgttgacaaatactgcggctataaatataaaaacgtattccatgtttctaattttagattttagattttagattttagattgctttttcaatttacaatttacaatctaaaatttacaattagttggtttttcttattctgttgataaaagcgatcaggtaacctagggcgataaacgctcctggggccaagacgaaaacgagcattccgtagttttcattgtagagagtcat

SEQ ID NO: 6150 - DNA, 1114 bp, Unknown
  gut microbiota DNA sequence
gcttgtacgagaatttgaaagtggtaattggatatgacgaggaacctttggtgaatgggcagaatattgaggtggattcatttcggatagttcctcttgaaactacttccggtagtgtcttgtctcgtatagaccggttattagtgtctgatagccttatatttatacatgacaatgaccggcttttgtgttttgattattctggaaaatttttgtatcccataggagtaaaagggcggggagccggagaatatctacgtataagtaccatttttatcaatccttttcttcatacaatcaatatcgtggatgaagtcttggataaagtgttgacctatcgcctggacggcacttacctttatatgaaaaaatacccatcccgttccttttacatggctcataccgcttatttggcagataatgataagttgttatgcaataactatatttataataactttaatcaaacctattccatgattaatatcgaaacaggaataagtcaattcttgtgtcgatcttcacttcatactaaaaatacggccatgcctacgggacaggaaaccgttgctttcaataatgacacgataaagatgcttcttccttttgacaataagctgtatacttgtaccgattccagtttgattcctattatttctatccggatggataaaaaaatcttatccgaaaaaagattgaatgccgaaacagacttttcaataatgacctactttaacgtttctgaagaggggtattttgcgggtttcaaaagtatttgtgaaacaagggattatattttattgaatgaagcgggtgaaaatcagtattttttggtggataagcggaaaaatgcgggtagacgctacttttataatgatgccggcgaacagaaatatctgcctctcctggggatttgtacgacagatggggattatttggtcggtacagttcctaatttcgtgttaaagaattttgtaaaacagatacccgaaagcgtttccgggcaagaattgaacaaattgagagaggtgggatttgccatacaggaagaagataacccttgtattttcttctataaactcaggagttaagtttgaacggaacggatgaacaa

SEQ ID NO: 6151 - DNA, 542 bp, Unknown
  gut microbiota DNA sequence
gaaaagtccttttcagaagcgtagaggatgcgggcgttaggataggccgcctgataggtggcggcaatctccgccacattcgctttcagcccgataatcatcggcttgtgcgccaagttcagacgcttcatctcatgtgccgctatgcacattatcagcgtcttgccggttcccacctcgtggtcgcagatcccgccgccgttctgtttcagcatccagacgcaatccttctgcgacgggtaaacgctcttgattccccggcttgccagccctttcaggttgaggtcgggaaaagtctggtgcgagccgtcatacttcgggcgcacgaaacagttgaacttgcggttatacatcgtcgtgagccgttccttgaactgcggcgactgttcttccaaccattcggagaacccgttacggatttcgtctatcttcgcgttggcgagctgtatgccctcgctgtcgcgtaccttgatgtcgttgccgttctcgtccttgccgatacttttcatcatgtcggggcaggtgttgtgcagggcgtgctt

SEQ ID NO: 6152 - DNA, 661 bp, Unknown
  gut microbiota DNA sequence
gccgaaagtgaaaaggggcagaagataaagagcaaagcaggagagctgtttgaaaagggaaaggaaaaagcccacgagttcgccgagagcgaaacgggcaaaaaggtaaagaacaaggctgaaaagctccttgataaaggaatagacaaagccgaaaatgtttacgaaaagcataaggaaagaaaggctgaacagaaagaacagcctgaagataaggaataaactaaatttggtaaggaaagtgaaatgagcagttttattgaaataaaggatctgcacttttcctatgtgaacgaccttgaagagccacctgttaaaacggaggtgcttaaaggcataaatctgaacatagaaaaaggcgagtttgtggcagtgcttggtcataacggctcaggcaaatctacacttgcaaagtgcataaacgctataaatcttcctgagtcgggggctgtctatgtgaacggcatggacactttggacgaaaataacctcttgcctataagagaaaaggtgggcatggtatttcaaaaccctgataaccagatagttgcaactatcgtggaggaggacgtggctttcgcccttgaaaatatgggcgtcgagccgaatgagatacgcaggcgtgttgacgaggctcttaaaaccgtcggtatgtatgaat

SEQ ID NO: 6153 - DNA, 1176 bp, Unknown
  gut microbiota DNA sequence
cgtttgcaattatgacggggaagatgacaggtggatttgtgtggaagcggtgacggatcgggatgaatgtgaatcgactaaatttacgatataaataaaataaaatgaaaacaacaccttttacccattttcatgaagctttgggagcacgtatggctccgtttgcaggatataatatgcccatcgaatatccgacaggaattaaagaagagcatctgaatgtccgtaataaacttggagtttttgatgtttcccatatgggagaattttggattaaaggaccgaaagcttttgaattggttcagaaattaaccacaaatgatgtggccgctttgatagacggaaaagtacaatatagttgtttccccaatgataagggtggtattgtagacgacttgctggtgtatcgtttcagtgctgaaaaatacctgctggtagttaatgctgctaatatcgaaaaagactggaactgggtggtaaaatacggcgcagaactgggtatgaaaccgggcgtcgaactggaaaatgcttccgacaatatttgccagctggctatccaggggcctttggcattgaaagccatgcagaagctgacctcggaaaatgttgtcgatatggagtattatacttttaaagaaataccgtttgcggggatcgataaagttattttctccacgacaggttataccggttctggtggttgtgaagtttatgcttataataaagatgcagagaaattgtggaatgccgttttcgaagccggagcggaattcgggatacaaccgatcggattgggtgcccgcgataccttgagactggaagccggtttctgtctctatgggcatgaaatcgacgatgatcattcgcctatcgaagccggtttgggatggattactaaattcgtgcccggaaatgattttatcatgcgggaataccatgaaaaattgaaagcagataaaccgacccgttatatgaaaccttttgaaatcatcgaccggggaattgcacggcaaggatatcctatcgaagatgccgaaggaaatgaaatcggtgtagtatgttcgggaacggtatctcctttaaccggaaaatctatcggtactggatatgttaaaagcggttttcataaattagatagtgaaatatttatccgggtgagaaataaggcgttgaaag

SEQ ID NO: 6154 - DNA, 447 bp, Unknown
  gut microbiota DNA sequence
atgaagagtttgatcctggctcaggatgaacgctagcgacaggcttaacacatgcaagtcgaggggcagcacggtgtagcaatacactggtggcgaccggcgcacgggtgagtaacacgtgtgcaaccaaccccgtaccgggagataacccgcggaaacgtggactaacatcccatgatactcgagagccgcatggctctcgatttaaaattccggtggtacgggacgggcacgcgcgacattaggtagttggcggggtaacggcccaccaagccgacgatgtctaggggttctgagaggaaggtcccccacactggaactgagacacggtccagactcctacgggaggcagcagtgaggaatattggtcaatgggcgagagcctgaaccagccaagtcgcgtgagggaagaatggtctatggcctgtaaacctcttttgtcaggga

SEQ ID NO: 6155 - DNA, 742 bp, Unknown
  gut microbiota DNA sequence
acggtgatgttattatggtaggctgctatattgtctttatgacaatgagcggacagggctggggagcggtcccggcagtggtactttctattatcgtgtgtaccgtactcggcattgtgattgaaaagatcgcatacaaaccactcagaaaggcaacgcctctgacagttcttatcactgccatcggtgtcagctatttcttagagaatgcagcattactgatctttggcgctgatacaagatcgtttacaaatgttgtaacacttccggcattgaaactggcaggtggagcactcacaatctccggtacaacaattgttacatttctggcgtgcgttgtgatcatggctgcactgatgctttttatcaagaaaaccaaagccggtcaggcaatgcttgcagtatctgaggataaagatgcagcgcagttaatgggagtgaatgtaaatgcaacgatctccctgacatttgcaattggttccggtcttgcagcggtagcaggcgtactgttctgttccgcttatccgacactgacaccgtatacgggtgcaatgcctggtatcaaggcgttcacagccgctgtattcggagggatcggttccattccgggagcattgatcggagggatccttcttggtgtgatcgagatcttaggccgcgcatatatctcgtcccagttatccgatgcgatcgtgtttgcagtcctgatcattgtgcttctcgtgaagccttcgggaatttt

SEQ ID NO: 6156 - DNA, 352 bp, Unknown
  gut microbiota DNA sequence
aagacatgatgtaaaaagtaaagaacaaccggtaatgaaaccggtaaactgaacgtatataccacccatacatggcaagaccaaaagtgaacgggcaattagtaatgctcggctatgacatcgctgcctgtacacctgcatcctatcaacgtcatcgtctatgacgaccctaagaaatctaatcttgtggctggcttcgtacttagatgctttcagcacttatccaatcccgacttagatacccggcaatgcacctggcggcacaaccggtaaaccagaggtcagtccaacacggtcctctcgtactagtgtcagagccacgcaaatttcatacgcccacgatagatagaga

SEQ ID NO: 6157 - DNA, 566 bp, Unknown
  gut microbiota DNA sequence
gatattggtgttatctcagtgcgagaaatacctttaaactttgttttatcgccaggcttttgccaacgatcgtacaaagctcgtctatcctgattctgcgacaaaccggcaactgaaatattctctactttttcatataaagtactattaaatctttgaccgcctaaactataacgaatatgcaagttcagagaaaaacctttccaatataacgaattactccaaacaccttctacatcaggatttgtattacccacaacgacttcattatcgtagctatgttgaaatgtaggctttccatcctttgtcaagaatatttccttacctgttgcaggatctatacctgccgaacgcaccgcccacaacgctgttggactacctccatcataatatcgagtcaagttctttgacaaattttccttgttatactggtttaattttctaccaatcttatcataatacgttttaacacttctgaaagaaagactcatcgtccaattaatacgttcttgaggacggtagataatagcatatctgacagttccactgacacctttatttacttg

SEQ ID NO: 6158 - DNA, 805 bp, Unknown
  gut microbiota DNA sequence
ctaatatttcctttttttgattcataatcactaatgggatgcagatagcaacctgttacggttgcttatctgcgtgttatccgcataattatttctatttatacaaatggttaatcccattcgatttcatctcctttctctcgaagaattttatatatttcttcttcgttttctattaaagagatgataatgtcggcaaagcgttttgctttttgctcgttttctgcggtgtcctcaaaataagctgcgtaagaaccagcttcagggtcgctttccatactttccaaaatgtctggtgcattttcttccagatagtagttgaagaaggcatcccagttgtaaccattcatgtacgcctcttcgtttatctcattcatttgctctcctattgccaatgttttttcaacctcattttggaagagcagaacaatgttaccagaaccatttgtgtaaatttgaacatactcattattaaagatgtctctttcttctgttgttgccataatcttttaatttttaattgttttactattgcggataacgttatactatcagccgatttggctgttattttctttaagtatcagacctcgtcttcctccatcaacagatcgtccaacgggcttttgatattgcttttgaaagtgtcggctatgtggacatacctttccgttgtcttgatgttgttatgtcccataagctctttcacaatcttgatgtcggttccttgctccagcaagtgggtggcgaacgaatggcgcagcaggtgcggataaatccgtttcgtgattcccgcttcccgggc

SEQ ID NO: 6159 - DNA, 1189 bp, Unknown
  gut microbiota DNA sequence
aagtatgcactaaattaattccgccaacaggtaagataagatattttgtggcaatagcgtttctattttaaaaagcttttatttttgcatttgtagaagtaaattggattacgattatgaccgattatattcttataacttcagttaccgcagaaaagctgtttggcatatttgaagaatccgtgcgtgaaacttgtgctaaggattattcagctgttcaactagatgcatggatagcacgtgcaactcctgcacgttggcagcaacttctatcgggagatttacattttatagcagcagttaatcaaacttcaggtgaattggctggttttgcatcgattaatcctgacggatatctgcatagtatgtttgtgcgccccggatatcagaagaaaggcgttgcttccttcatgcttcatgccttggaggattgggtaatgcgttttcaggcttctgatatctattcggaagttagcattactgcattaccttttttcttatctcagggattttctatagaacgggaacagactgtggtggtaaatggagtaaagatgtcaaattttctaatgagaaaccccttgatatgtcagccttctgagacagattacgacgaattgctatgtgtttgggaggaagctgtccgaagtacacatcattttctttctgaagaggatatacagtattataaacctttagttcggatgatttatcttccgggagtagatttatattgttttcgtaatcgggaaaggagaataacggcttttatggggttaagtaatgaaatgattgagatgctttttgttgctccacaagaacaagggaagggatttggaagtcggttaattgattttgccataaaagaaaaaggtatttataaaattgatgtaaatgagcaaaatacaatagcttctagattttatcaacataagggttttaagattgtttctcgtgatgcatttgatgcagcaggaaagccatatccagttttgcatttagaaatgaaatagtatggaaaataatgatagaaaatgggaagttctccatagcgaatatctcattcaacgtccgtggttgacggcacgtcgtgattgtgtccgattgcctaacggagtagaaaatgatgagtattatgtattggaatatcctgattgggtgaatgtgattgccattacggcagaaggta

SEQ ID NO: 6160 - DNA, 212 bp, Unknown
  gut microbiota DNA sequence
tctcacgttttccgttgtttgtattaaagttacagactacttcccttcgccatgtacaaggctttcccctgctcggactactacggaagttccgttaccatatcggatattcaaaagctttcttcatagctgtttgttccagcattccgacttaggtaatccccagttagttctcttaataactattagcacgacatactgtcggatgcgac

SEQ ID NO: 6161 - DNA, 537 bp, Unknown
  gut microbiota DNA sequence
atccgtgccgtcgccaagcgttgcggcatcaccaagcatatcacgtggcatcagagccgccacacggcagccacgacgatattcctctccaacggtgttcccatcgaaacggtcagctccatgctcggacacaagagcataaagacgacgcagatttacgcaagtgcgcccagaatggtcgcttaataaatacttctttagcaagaagttaggattgggttcgatataatcttatcgtcaatcagtttatccaaaggggaaacccgatggggagtgtagcatactgattaaagctccaagtccactaatagtcaagtggcgactgaggggcaagacgaaaagacatacataaggatgaagccttgattggttgaacgatagttcggtggtaccaaatcttgcaacaacggaagactattatacatacgttgtttcatagtaccctgcctattttgagcgttagtgcagggcataaagaaccgactatgacacagccgcaataagcggacaagaacgaaagtcgcatccgacagtatg

SEQ ID NO: 6162 - DNA, 137 bp, Unknown
  gut microbiota DNA sequence
aggctttcaacgaaggtatacgcctgaaggactgtatccgcatgcagcagaagctcatgaatgtgagggtaagatgcgtggctgccgattccatatatgccaataatgccaacagaaagttctgtacaaaatatgga

SEQ ID NO: 6163 - DNA, 137 bp, Unknown
  gut microbiota DNA sequence
caagcgcggcctccgcgcttctgatctggtctgctccccggacgtggctgacaccatcatcaacgacgaggccgtgcagaagctcctcgacaaccgccgcatcgagatcggcaacgtggagcctgagctgctgcctg

SEQ ID NO: 6164 - DNA, 7576 bp, Unknown
  gut microbiota DNA sequence
gaggagttccgccggtcagtgaaggaaagccttaccggaccgttccaggcgaaccggtctgacggcacaaaacccggaatcggaatagaaagaaaaaataaacctacctataacttgagattcgcaacttcttttcaataggtcgttgtcatatccgtagggacacaaatataaaaatcggcttttcgcatgacatccttatccagtttatccgtcttttcctgacgcaccacttcaacggtggctattttcaaaccggggcgataccggttgagataagtgatgattccggcttggttagcagaatgaaagctgccgttcaagtggacgaagtacgatccgatgttctgagcaatcgaccatcccatcgttgcatccttcaaagcctgagctttggccagcttctccgtatcctcttttttagctcccggcatttccatcgaacggaaatatgtttcaaccccttcattccggacataatttaaaggcagcggtgcgatataatttttcgcttcttccgacaattgttccaaagccccgaatcctccgcgggataccatagcggcatacctgcggggtacattcgtagcaacgaaaggaatccggttggttttagcaaactctacgatctttttatagtcggtcggataattcggccatagttttgcttccttagtgaaacgctcggctgtaatcaatccactcaaatattcatccaacaccagttgatcgtcccgttcgaacatttcagccccgatcatcaaccgatctttatgaagagcatatagatcccggacaatctcatattccatccaatgtgctatcggacaattgtgtatctctccgataaatacaacctgttgttcacccaaaacactcatcatatgggcatagtcggtttcctgcccgtcggcatcgaataaagtataggctcttttctcctgagcaacgaccaagccgccagtcagacagaaccaaagtattattatcattcctattttcatcatctttctattattcaggcacatagataatttctccgttttcaagttcataagctataccaaccctttttcctttcgagccggagctttgttcgttcgaaggcgtatatttattgattttatttccctctttcatgataatctccatattgtctttcccaggatttttcacgatagtaaaatcttcctgagtaaaaacttcggtcatattcatgtgcatcaccattgccaccatcagggctaccgcaaaaaccatagccacatcgaacaggttgaccaccacactcagcggatcggcatcttcctgaacggcaaatttgctctttcgcctcgctgttctcatgcttctgtatttttctcgtttaacttccgggccacataatccagattattcacatcttttgcataccagcgttgtttaaattgcaacgacaccaaaccgacggcactaactaccaaaccgacaaccgtagttgcaaaaaccacctgcatattataagccataccggcgatatctccggtagaaagtcctaccaaggcagggctcatagcaatcaaggtgccgatcaatcccaataccggtcccatcttagccagtaacttcgaaagaataacatccttctctgcatcgttctcaaaattcgtgatcagataatccgaataatccggactgggaggtgtggtcaataaatcacggagatagcggatatacaaagagttatccctaccgggtaaagcacctttcagttcaccgatcgtatcgggcgtcagttctttgatcagtctgttcatctgtttgtcatttttccgtttggtcatgtattgattataaactcctccgattagcaacaacgaccggataaacagtaataataaaagaataatatccggtataagcaggctgttggccacccaaaaaagcacttgtgaaatagtttccatagattatagtttaatttaaatattatcgattatttacgagaagtcgtttggtgggtacttcgtttctgtaaaaggacccatttcaatttattccaacccatacccagcaagaaaaagatcagaaacaagccaaaagcaaaagccaatgccttccaatttgtcggttctttaactgcctgataggtaacatttccattcactgtagtcagcaagccgatgatacaaacaaaaagactaacgagaaaatgtacttccagccgcaattctttttcaggtaaaagatacctgaaaaagtaacacagcagaggaatcatcaccaccactcctatagcaaaaacataggacaggatcgaaaaggatatccccggaaaactaaagatcagctcggtctgtaaataaaacaggacgggaaaaataagcaaggtcggataccatttcaaagacttcacccaccacttttcctgttggccgaaccatccccgcaatacagccacacaatacgcaaaacaaacgacagcctcgagcgtaatgatcactgccatattttgcaaagccactgtattctgaaggtagtcggccagctgggttttggattgcaggatagcaaccggataagtagcggtaatgaaaataccacagatcaatccgaacaaagctgcctgccagcctttccaaaaactaagcttcaacaggcaattgaccaggataaataagataagtatactgataactaattccatatcgatatttaattcccttttctttttttcttcaaaaccagcaacagtatcacaaacagagcgaataccccaccagcgatccatacgccgttcaaggcatttttctctccccgttcagcctgagctacctcatcttttttcaggaccattccttttttatcggtagccacctgagccgttttcatggattgaatctgctctttgtaaaccgtggcacgttccggctgtacccggctggcgatataatcctgcagtttggcattccctccggcaaatccgctcccggccgatccgaactctttcaccagatcggtatgcaaatttgccagggtactgatctgttgttccgaagcctcccacatccccttccgggcagtctcgagcatcactgctgtgatctcctgcaaagcggccggattttgttgtttgaaaaaatcttcggttcccaacttgtaagaatccgtcacataaacatcataaatctgattccacatagcgtcgtcgattacttcaggcttggtgacattccacccgtaagtgttcgttaccacttctgtaatctgtgaagcactcgacgcccctcctttcatcacttctttgatatattccggattgaaaatcgtcgaacgcgattccactccgatagcctccttcaaatcctgcattctcacccggttgcgattccggtaatcggcaaaataagcctcgggatctttaccggtgacattacgtacagccaagttcatgcctcccataaactcatatacatgatccaggctcaatgctccccaggtattgctttgccggggttgaacgacaacatccgtatggtgtaatacggcccgcaacaatccgcttttcatttctccccattctttctcacttccgtagacagcccccatattattgatgtaggtatcggctatttctttttcatcttcccatttatccccactggtgatcattccctgaattccggttccgtacatgccgttcacaccaccgaacactcgttttgcagacatttcgcgggcttctttaggcgaaactccctgttccaccagtaaccgttccgtctctaccgtgctttccgccacccgattgtcgtatttatcatttgcagaagcggccgccatttccacagctctcgagatcaacgcaagccgtgaagccgctaaatcccggaactggccggaggtctgaaccaccacgtcgatacggggacgtcccaaagtttccgaaggaatcaaacgcaggtccgacacccgtccataagcatcacgcaccggctctacacccaacatataaagcacttgtgctatagtcgctccttcactttcgataaattcactgctccagaaagtataactcactttacgaggataatcaccgtgagtcttccggtattgagcaagcgtattttcgaccaattcttttcctttcgtccaagcctgttccgatggagtggcctcggcattgacagcatataaattacgaccggtaggtactgcctgcggattagcgactgcatctcctcccgaagtgggagcgatatatccacccgacaaagcattcaataccgactgcatttcctgctccggactattttccaaagccagcttataattcacaatattcgtaatcgtacgttccacttcggtgatcgcccgggcttccgctttctgttcattggtatactgcactaccggtttcgccttacctttccccatcatcccccttttcggaggagtaagaatcgtatgtgcttctttcaatttttcaggagtgatccccgcgatctgacaaaccagtgcctcatcggcttttttaccgtccagtacctgactgaccaaccgtttggccggatccagatatcgctgagtaaaaaacaccttactattcaattgtttatcagacacttttccattttgtttatccaaagctgccaagctataagctatcggatctgtgctcatcgccaaaaccgatgaacgaattttttccggggaataaggaataccggtcgtataaagctgtccggtcattttttcattggcaatctcctcggcaaaattctcgatacgctcgatctcctcggtcgaatagggacggtccaacaggctatccaaacgcagttcccggtgtaatcccatttccaccgcaattttctttacagccaaagaggcctgtaattgcccggattcatctgttttgtaataagtctgaatctcattttccagtttcttatactgtccccgggtcttactttccataaaaggcggagtcaggtaagaaatagtcgttgcataagaacgccttttagccatcatactctctcccacatttccgatcgtataataataaaaatgagggacagtgcctaccagccggtccggccagtcgtaactactgagtgccacctgtttctgaggagtaaattccagactaccgtgtgtcccgaaatggatcatcgcatcggcaccgaaagcatatcgggcccacagataagctccgatataggtatgcggcggtgcggttttagcgccgtgaacaatagcaaaagcatcatccccgacagccgccatcggctgaggcaataagaccacattgcccagatctatccgagccaccgccagataggactttccattttctaccgtactcatatagtttcccggagcttctccgtatatcttcaccacatctgcatagagcccttgcggaagagcttgtttcacccatgattcatattccgacttttccaccagagcgggatgaccgttcttcataaaatcgtcgaaagcaccttctgcataagtactcagtacagccccttgtgtcatcagcaacttttcgaattcattctcggtagccggaaggttttctactttatacccttcagctttcagtcttttgatcagattataaagcgaaggtaccgtctccagaccctgtgctgtcagcgaagattgtcctgcccctttgaaataatagatcgccacccttttatcggcattcgctttttgtttcaagcggataaagtgactgacaatcccggtaaaattctttaagcgttcggggatcgctttgaacagatacaccccgtctttatccaattcctggtcattcaccacatagggatagatcgctccatccaactccggcacaacgacactttgcgacataaatccgccgaacatccccatcggatctttttcccattcctcccgggtttgcaggatcgacagaggtgaaaaaagagggatattccgttctttcagccattctacagctgcatcggcctgccccatcaccatacgcccatgggcaaaatgaatcaccgcatccggctggatttctttcaggaaagccaaccgtttcatataagaggaaatcggatacacattcaggccggcacgctgaaatgaaacgatcagactgtcgatattatcccggttgccactgaaaggatcgttcaagccaccgacaatagccactttgggttgcccttcccgatagaaaccatgtccttttatataattctcataatccgtcactgtagagaaagaaagattttcatctaagtggaaaagtacatccgaagcactctccaccgcagtgtcggccggagtgacgaagaaaagcttccggtcgatctgccggcgtatataccgggccatattccggtaattctttttatttccattcccgatataagaggttatatcagccttggtgatactatccaggttacaaatattattttccggattcgtagctgcataaatataaacaggagttcctttatcggcagccttttgaagttgttcccgttgtccggctgtcatccgtaatcccataccgaaacccaatacaaagtcataccggtccaggcgtcccaattcctccagagggacttcttcatactttataaactgatcttcattcgattttattaagctggtcgtttgaaaattttgaaaattgaccagtccgatccgggtagtagaagcccatttactccaagccatccagccacacaacaacaccagaagaagtataaccgttcctatccactttttgttttttgtcatcttttaaaatttaaactttcaatttcgctttttcacaccatttggccggcagtcccgggaagtccggatctgccagccaaatctgatcgctcatgtcctacattatttcaacaatgcatattctatttcaggccgtccgcgttcggtgccatcggtaccggtcccgaacttcgtaaaacggagtttataatagtttccataactatctttcaatacataaaaacgatctgttttcacgccggcattcgtcactcccggcatagcaggtgtacgccaggtagtaccgatcacattggctttcttttcaaaatcggccttcgaggttatatccgttaccttaaaattatcgtaggtagtctgttcatccaccatgaccacggcagtctctactcctcctacactattagaagtaaccacatcctgtgaaaaagcagtcacaggaccggaagccatttgtgaaacggcagcagcataggcccacatgatatcccattttttcccttcggcctgtgcatccactttctcaccggattcgagtgaaagcccgacaaaattatagatcggatttttcgctatttccacggtcttcggtgtcgtatcccctacttttccatattctacccggtatccttcgccattacgggttactttcactttataccaaagacttctattttctgtcccgtcggtattggtcttgttatcggcagaagcgacaaaaaagactttattttcagctgcattttctgcaatcatcccgaaagctgttttagtcaaatcgccttccacatcatct

SEQ ID NO: 6165 - DNA, 6170 bp, Unknown
  gut microbiota DNA sequence
ataccgattactgaattaattccgaaggtaagggttcagaaaaacagctgtttgatagaagtttatacctttcaggtcacagttcgttttccatgcagtgataacgtgagtcggaggtgttcgtgttcggggaccattggagctctgtcgggtgtcgtcttgctttttctgaacgcccgaccggtggtgtctgacgaacgtagtgaggagttccgccggtcagtgatagaaagggctagacgaccgacagaagcgaccgggtccctaaacacgaacaccgaagacgaataagtaacgacagaataattctaccataagtttggaaaaacggaaaatgaaagtgtatctactgccacattttcgaagcaaaagactaaattttctatttcatccgataaaaatacaaccagataaaaaatcctattttccgaagcacgatagtgatccagatgattaacttcctgaccataaaactacgaattaaatccttccgccatatacgctacgaaagtaattaccgtatttcttaaatactttacataaaaaagtaaataaacagaaaagaaattaacaaacctttagcaaccgatttctaagaccgattcatgcggtcaccggattttcatatgtagaataggaaaataattccagaatctctcccctactattcttttatatcaccgatcagtaacaggggggtaaggttccgtatcggtataatccaaaatatcgatatagaatcctgtaatttttttcaactggaaatccggtttttcaaacagataatggcctagaaaacgggattcggagtacatcatatcccctttgtttttttcttttacggccatagggtctataaactccataagccttatgaactttagaaaccgaagttatcgttccgataagttttttactgaacgaccccgacgacccaggcaaacagattagctatcagtttcgacgcattgctattgatggttcctttcgaattgttaattccgctattactattatttgcagaaaagatatcgatatctccgatatagataatccggcgagacatatcgacgcccaagacaatgccaccgcccggtccgttcaatagaggggtaatcccttctgcactcccgggaccgatttctccatgagtaacgtcataattctgaaatttgaaatttgcatcgacaggagtataaggcgtgacagtaaagggccccatatccgtaaaaaaatcagaagccgactttccggccaacggatatgaaccgcttttcggtgaagtttgcatcaaatccggagtacttccgagaaattcctgcatgataggagtattgactccctgggaatcgaaagacaaaatcaatacccgttttgcagaagccttcaaccatctgccgacgggtgaaagatcaatccttaaatcaccattactgacataattgaaataaataacatcggcaagtgctaaagcagcatcgtttatactactggcagatacattcgtcaacagcaaattaaagcctccacaaatgacagtaccaccagtaccgaagttagccggattattcagaatcccctgcaggcctgctccccggctttcaggcgaaatattgggtaataacaaattttctcctaaatgtcctaaatagcttctgaacgaaaccatatttatcgtccggcccgaaatatccacaatttgttggcgaatagtcatcaatatacgccaacggctggcattgatcacaaaatatgcttttcgttcatcactgtcgctgttattactttgcaatgcagtgaccacgatatgcctcccgttattcgttttttccactttgaaatacgaaccggtaagcgattgtgcagctgtccccgacacattgccctgttcatccgaccattggaaggtataatcggaaagatctgtatcgacctgaacggtcaacgctgcattctgtttacttcccaggacaacctcgcgtgtagatactccaaaatgatgatccgtatcgaaatacatgtctgtcgtcgactcgtcccaggattgtatatccagattaatttgtgcagaacgattactggccgcttcatcagccgatggccaacccggcccggcaacgctccgtatcgtgaaaacataacgatgattcctcaatatctgaccgaaacttccctgagtatcgtccggatcaaaatcaatccggtaataggtcacttccccactacctgcatactttcctccaacgacaacacaagtagccccgttcacccgttcagactcggcaggagaaaccgattccgacaaataaagtccggaaaccgcctggttaccacttactgccgagaccggggtattgacctccatccggctattcaccggaatacttggagcggtaacaacaggaagatcctgattcgctatgagttgtatccggctattcacccgataagcttgtatgcttgtcaattcaaaattcgtaatcccaccgaccaacacatctacccgggcaacagctcttaacatgctcacaccgctgatttcttgccggtaattcgcatccagccctgaaaccagccggtaatgtccggacatcggtaaagtagtgaaatttccaccgagggggaaccccagctgtaattttgtccgtacctcgttttcggtatcaccgacctgaggttcattcgccaatactgctgctgtagcattagcaacaatataaaggtccaaggttttatctgttgcaagcaaacgggcactgaacgaagtggtcgttcctgaatttgtgatcgaaatgcccggaacccggtatttatatcccccctcttcgaaaaccaacaactgaatttcatctatttctgtctcccgatcattcccggccttacttcggacctctttaccggaataaggtctggaaacaatcaaacgcacccatacctcattttctccggtatactgctcttccacttcttccagtcggtctgtacaagatgtaaatccgaacaatcccatccataaaatccatattagaacgcccgttcgcctcatattatatttcctcctctaactctgtttttttactgataaacgaaacttttctttcttggttatgaaaaaacttttcttatttctctaccggccaccgctcaatagcaaataaaatttaatgaaacagacgaaaagtcaaaacttcaggaatataaaacaaaaaacaaaaatcccagtaaaacccttataaattgacaaactaaaaaagaatacaatgagaaagaattgtttgtttatgataatgttcgctgagggtgtccaaaaaggcaaaatacccccttgtagaatcggatatttgatttcagtctccaatagggatacgaataaatcgagggtgccaaatactttttggacaccctcaaaaacgatgcttcgccggccgaaagcgacctgcccatagatcaaaatccgacagaggtattcgccacattcaaaatcaatgccccggcaaatatgcagaccaaagccacaaacagcggtaccgccgaggaaacggcagtaaaaaccctccatgtttttatttatgatgtcgcttctcctcacgccccgacaatcgcatctttcagtaccgacgccaataccctgatcaattcaggtaatagctggacagcttctaccccaatccggaccttaaaagccgataaatatatctttgccggcatcaacctgactcctgccattatcaatgaaattacctccagaggcctgggagctttcagttataaagaattcgaacaaagtatctccgacttaaccaatccaaccgatggtttcgtcatgttcaacacgacatatcctgccgtcactcccggcgatgccttagccacttcggccgaagcggccaaagcgaatccgatctctatccctgtttcccgggtagtggccaaagctgctgtcgttaaaagcacttctttcgtcgtcaacggcggtgggactatgcaaaatatcacctatggctggagaaatataaaccgacgcttttattttatccctaaaatcgatggagggatcatcaaagattacaattgggatagctataatgtaaatgattttgttcgcggaaccgatcagattccggtaaatgaagcaacggccactcccactacttttagttatgctcttgaaaattcattcaattatatccccggaagttcgttggtcgaccaaaccacctttttaagtatacaggggcaatttcttccgacccagatttgcagaatcaagaccggagttactgctccccagggagcgacagacttcgaattcgtcaataacccgaatggttacgggacgttttatgtcgtacgtaccgacgatggtagcagtaactatttcattaccggcacagatgcagaaaaatatgccgaattatgtattgcccatgctccggatatgccggcacttaccggaggttattccttgagtgacaacaccttcaccaacgggatgtgttattttcatgtacttgtaaacagtgcagccagcgggcaatacggtccctatggaatttaccggaaccaatattaccgcatgaccctcaattctattcaagccccgggtaacccgaacgataatttcgaccacaatcaggttatcagccccaacacttgggttgacgtaaatatcaccgtagacgaatggcaggaaatcgatgaagattgtgacctataaaataaaaatacagtacaacctacggataatgaaggtgatcccaaccctgtcgtttatcacgttaatctttttatccgcaggttgtatacgtgaaaatcgttccggctgcgggggatatttgtcattgaaattccgctacaccgattctaatggtgctcctttgacgccgggatttcccgaaaccgaccatttgtcggtttttgttttcgaccggcaaggaatattcgtatgtgaacgaaaagattcggctttgcaactcgatcactacatgatggaaatgccccttccccaaggccgataccagtttgtcgtctgggccggtttatccgaaagttaccggttatcttcccatgtcccttcacaaacccatctcgaagatttcggattacagttaaaccggacaaccgataatacagtccctattctcccttcattactctatcatggcctacatgaaacgatcgacgtaaacgccgacgaggaccaggaaatcacagttgatctccggcggatcaccaacaatatccacgtaatcgtccattatgccacccccactctacaaccccggatcagtatagaagataataacggtaattatgattatcaaggagaaactctatccggtcaaccgataagctacctcccggaatattcccaaccgtcggattctccgaatacctggatcgccgatttcaatgtcatgcaattacaaaccgatagtgacacccggctaaagatatacagtcccgaaaaggagcttcaatacaatgaaaaactgatcagcggattacttgccgagaatcccgatattgattttaattccgaccatgacttcactatagaaatcactttcgacagttattatgtacccgtcagtatccggatcaatgactgggaaatcattatcgaggaagctgttttaccctttttcagcccgataaagtacatgcctgagcaacggatgtccggcagggaccaacggatgatcgaactccccgattttttgcaatccgatcttttgcattaccctttcggagcgtctgttgggtaaagaagtaaaggaataaatctccggtagttgtaattgcctgaaagcataatccagacaagcccgggcaccttcggtagcatatccccgtccccaggagttttcgcataagcgccaaccgatctcgatacagggacaaaaatctgtttcaaaattcgtatgatgtaagccgatataaccgataaatttcccggatatttttacttctgcagcaaataatccccaaccgaatgtgtcgatttcccgtcggatgcgttcataaaaatcccggctttctgtgtcggtcagtggtttcagaaaatattccatcaccttgggatcccgattcattcgagaaaaaacaaccgaatcctcttctctccaatcccgtaaaaccaatcgctctgtttctaaataaatcatgta

SEQ ID NO: 6166 - DNA, 43096 bp, Unknown
  gut microbiota DNA sequence
aaatttctcaagttattccagtgaaatccgctctaaatcatccggcacataaaccctgccggtaaacaccgaagaggcttcacgggtatatgcttccttacgttcagccagagtcttatcttccgtatgatacaggactaaatgttttacccccaaagcttcggccaaacgaccggcatccaaagcagtactgtgatgtttttcataaggtgaaaaaatttcccggtcgcgatacaaacaaaaagcttcggccagtaaccagtcggcctgttcgacatatttcttacagacctcattataaggttcgtctcccagacaaaccagcacctgtccatcgggtaacaaaacccggaatccgaactgcttcatcttggtagaaagaatatcgaaaaaacagattggcagtcccaggatttctttccgggtaccgtcctttacctcaccccaaaagatacgttcatctatatatttcaaaattttcccggggagtgtcaaacggcaaaaggttctcagtgcatcgatcacttcattatgcccgtaaacgataaaattccctctatatttatcattcgacatcaaagtagctattttccggataacccagatcgctcctaagatatggtcggtatgggcatgtgttacaaacatctcacgaatacctgtaaaaggaactccggcttgctccagctgcttgaaaatgccgtttccgcctcctgcatccactaaaaaatattcttctcctgaagagagtacaaaacaggtattataacaacgggtcaccatggcattgcctgtacctaacataattaattccataccgatcagattaaaatcagggataaaaatacatcattttattcctttttctgcctttcgaccgaaaaatcaggtggtcgaagcagcatttttctttcctccgatcatcaagacggcgatcgcagagctgacaaccataataattgccgtagtgtgcaggatatttcctattccgactaaaggcgaaacgattcctcccgccaggaagctgacggccccgaataccgccgatgcagccccggcgttctgccgttcggagtccaacgccaaagctgtagaagtcggcaaaacaaggcccccgaaaatcagattcaaaaaaagagccgtttcaaagtaagcgatcggcatttcataccacaaagtcagtccggtaaatacagccaacacaaacgaaccgatcaccccggtaaccatcccctgcctaatatgccgaaaacggccggcaagcgttgttccgataatcagtgcaattgcatttacagcaaaacacaagctatataacagaggggataaccgataatgttcctgtaaaacaaagggagaagaagaaatgtaagcgaaaatcattccaaaaacgaaagcttgtatgaacacatagtccataaaccgacgttttttgaaaagaggcagaaaagtccggaaagaagaaaaagccggtacatcgatccgacgttcaggaggtaaaggctctttcaggcgcaagcaaagtaaaagcaacagaactcctaaaaacagtagaaaaacaaaaatacccaaccagttggtaaatttcaacataactcctccccccaccggagccaatataggcgccaatccgtttaccgccgaaatcatagcaaaagccttcgccaattctttaccaccataacaatcggtagccaccgaacgggaaatcacaataccaccggcccctgcaattccctggagaaaacgaaaaaagataaaagctccgatactccaagagcaaatacaagcgatggtcgaaaaaataaaaagccataaggaaagcagaagtggcaattttcgtccgtatttatcgctcaaagggccgacgattatctgtccgaatcccaatcccagcatagctgtcgtaatccccaattgcaccatagaagccgttgtatcgaaataaacggtcatagaaggtaagccaggtaaatacatatctgtcacaaaagggccgaaagcagccagaatacctaataaaaccagtaaaaatgtctttgaattttgcatatcttcctatttaaaatcacgctacaaagttctatcgatttcctcattcccaaaagtttcatttcctatgcaattggttttatttgaaaataactttatctttacaacatgctaaacaggattcattcaccccaggactgtctttcctctctttgggacaaatcgtttcttcaggagagaggaatagcttctttttttttgactgaaaaaaatacgttcgaaaatactcccttattcgacggaatattccgttatcttttaattcaaaaagggacggcacaaatcacgattaccggtttggaatactttttaaaaccttcctgcctggtggttcttgccccggaatactattgtcaatttacagagatcggttctgattttcaaggcagtttattgttagtcgataaatcttatttagacactttacccgcctccgacaaaatgtaccggcacatcacgaaagtcatgctacaacaacggcaggtcaatcttttgaatcagcaacaacatcgggttgtatccgaaagtatacataccattcaggaaaaattaaaactgacccatcaccacctaaaacacgaaatcatacaaaatgccctggtaacctttcttctggaactcagcaacatttggatcgaaaatcattggaacttgctcgatgaaccctatcaaatcagatacgaatatatcctgaaacattttttcgactctctgatgcaaaattatcgccgggaacatttagtaccgttctatgccgatcaactgaatatcaccacacaatatctttcttcggtcattaaaagcctgaccgggcgtacgcctagtcagtttatttttgaaagactttattgtgaagcccgggctctactcgatcatcccgatttatcgatcaaagaaatagccgaactattacacttttccgatcaatccgctttcggtaagtttttcaaaaaacgatacggacaatcccctgtcgattaccggaaaagacaccctatttaaaaagccaatcttctccagacaatcggttatacaactttttcctcacgttcattcataatctgcggcatattagccaacgcccaaccgaccaggccttccagataaggaatcaaactaagcccccggggagtcaggctatactccacccggggaggaatttcaggataggctttacgcccgattaaaccgtcggcctccaaagtacgcaaagtcaccgagagcatacgttgggatatatcgccgatacttttctgtaaatcattgaagcgcattacttcatttgcatccagcgtaatcaatattaacatcgcccatttactactcaaccggctcagtatatcacggatcggacaattctcggtatgatgaaaatttttcatttttttaactttttacaatcagctgtttttcaatattagttacatcgaggtaatttactaatcttcaagtgcgttcttgcatgttcaaaaaacaccgcttacctttacatcacaaaagtaataaacttactaaaaataactattgtctcatttataaattatacgactatgtcaaaaaaagtagcagtattagcagtaaatccggttaacggatcaggattattccaatacctcgaaaccttctttgaaaaaggaatctcttacaaagtatttgcagtttccgatacgaaaaccatcaggaccaattcaggtatccccctggaagcagacgatatcatagcccatctgtccggtcattccgacgaattcgatgctttggtattttcatgtggtgatgcagtacctgtattccagaacaatgcgacccaaccttacaatgtcgatctattaaaagtcattcaggaattcgccactaaaaagaaaataatggccggacattgtgctgcaggtttaatttttgaaattgcaggtatcacagaagggaaacgcctggccattcatcctctggccaaagccgctattcaaaaaggcatcgcaaccgacgaacctgctgtgatcgacgataatttctacacggctcaatgcgagcataccctcccggtattaatgccccgcttggtagaagcattagcataacaggcttccggcagacgtttttatcgtttagcattcctctgccattgccggaagggaattagtttataaagttcgtaaagaactttataaactttataaactagagaaagtacggtataccaacaccctggcatcttcttccaggataacggtaaactccttgccggtagcttcgttcaatgtcgcttcccaccaatacaggagacgccttttttctatcggataacgaagtccggatacagaaatcctaccattaggatacaatgaaaacaaggaaacctgttgtcccggttcactatccaaagtagtcgtccggtataagggtgtaaaccatccgaaatcggaaaccatttctacccgttcgaattcagtcacatactgggccagcaaagaaatattacccaaggtatgatcttcacgcctaccggtagcccccagaatcaatacttcccggaagcctaaagttttgacataattcacagccttggtcaagtcgttcgtctcctgatctttcacccggtgaatccgatcggaataacggtttcgaaccggttccggcaaactatccaaatcaccgacaaccgcatccggtagccggccattctccaatccgatcacagccccatcacaggcaacaacaaattcagcctgcctcaatagttccaatgcctgttgccctgtcggaaataaaccgtttgcaacaaccacacatttatatcttttgatcataccactttcctttctttttccaattgatccatcctacaatcgctaatacgccataacatacaaataaaaagcaggtcggatacaaagcccgctgataatacaacaatgccgacaccccgtcgatcaccacccaaaaccaccagtgttccaatattctccgggccagcatccacgttgccgtaatactcaaagctgtggtaaaagcatctccggccgatacgggcgaatcggtataatccgacaaaatgaaatacaacgtaccgtacaaaaaaacagttacgacagtaatgccccatatcagcctgatattcaaacgacggtacaatatcagcacttcagtgccttcctgtacagcctttcccttatgccattgccagaaaccgtatatactgatgcagacataataaatattcaggctcatgtcggcatagaatttagagaagaaaaaaacaaagatatagacaaacgaagtaacaaacccgacaatccacattgcccgatgctgaacgatctccaaaccgagataaagcaaacccgtcaatacaccgaaatattccagtccttgttccatgcgttttccttaaatatacaactgcaaaagtaagtttatttcgttacttattcgtctccggtgaccggaattgtcgacccggtcacttccaccggtcagtgaaggaaagccttaacggaccggtccaggcgaaccggtctgacgatataaaaaacggaagcggaatagaaagaaaaaataaacctagaatcaaatcggcctataaagtctataaagttcataaaatgcatcgaccggcgttctttcccgatcatttaaaatcaccgaacaaatgtctcaaagctatcagcgggtgataaaataacattctcggaccggcatagcgcatcacctgccgcattttctgccgcataccgggtttatagcaatgtattttacaatgtttacacgaagttttacgttctccaaacggacaatgctccaaacgggcatgcgcatactccaacaaagcccggcactcctcgcacaaacaatcgttcccttcctgcttccggcaatacaaacggaccatcatcccgaccactcttttttctctttcaatccgggacatatccatctacaaatttccgatattgtttttcaacttcctgcaagagctttaaaggacatttcgatcgtttatcaaaaaacgaaaccgttaccgtcaacccttccttttttttcaccttgctccaattacctataatctgtccgccatataaaatcaccggataaaacgtcccccacctgttaaaagctttcgaatggtgcttttccggaataacgggagtccggtctttatagctcaccaaatactcatcgaaaggaggaagcaattggatcagatctctattttccgttttccgacaagctgcaaacacccaaaacgcctgtccttcaaaatgttcttcaactagaagttctttaatcgaaccgatcgcctgttgggcttctgtcaccgtcagtcccgaccaccagacgaaatcttttagagtagcaggagaatgactacgaaaataattgacagccagacgcgccaaagcttcttccctgggcaaggaggaggcaggggccacctgttcatccagcaaagcataaccgggctttccattcttatccgcaccgctacatacaatcccttccatttcggcccggagcacataacgtcttacccgatcgccggtaacagggacaccggcatgccccaactccatttctatctcttcacgcgtgaggcagtttcctccggacagcatcttaccgatcaaatcattacactgagtatattgattttctgaaatgtccagtccactggctttcacccaggaatcgatcacctttttgagccgggaagaagtgagttgcaacatccagcgtaaatcttttccggcaacataatgccaggtaggacgcataatgtgagtccgcacaatttcccctttcgccagggcctcatttacttgcgcaatcgtagccgacttcaaacgcagcccgacagcccatttcgacatggtataatcttgtgcctgcatggctcccatccaaccgaccaaatcggcaggatgcccgaattcaggttctgccaactgatggcatgccatccgaatatctgtcaatgtacccattttatccgatctttaccgccgcaagttggcaaaattgtctgagaataatgcatattcaaatcataattttccggcaaatttaccgaagtcatcactgaaatcactatttttaaaacaaaagattttcgtaaaaatgccaggccgatcatgctacgctgtggaccgatgacatattcgtaggtttattttttctttctattccggttccgggttttgtgccgtcagaccggttcgccaggaacggtcctgctccaatggtcttccggcataaaccctgcatctcacgttaacacgacctggcaaaggaaaaattagaaaaattttatagaataaaacaccggctcacctctatcggattatggatagttgggttactttaccggaaaatcttttttcgctgaaatttatggttttcaggtccggtttagcttgccaggcagtgataacgggagtcgaagatgttcgtgttcggggaccattggagctccggcgagtgtcgtcttgctttttctgaacgcccgaccggtggtgtctgacggaaacgtaacgtaaagttttttgcggagtgaggagttcctccggtcagtgaaagaaaaagccagacgaccgacagaagcgaccgcgtcccccaacacgaataccgaagacgaacaaggaccggaataattctacataaaaaataaccgagaagttatcatttggtaattttttaccctatagtttgccttacctttgcgacgaaattcaaaaaaagaggaatatgagagacagtattgatttcggaagcatgaacatttcgaccttgttcagaaaattattgattccgacagttttaggaatgatattttcagcagtatttgtaatcaccgacggtatctttgtcgggaaaggaatcggtagtgatgctttagcagccgttaacatcactgcccctttgtttatgatcacgacgggtatcggcctgatgttcggtatgggcgcatctgtagtcgcttctattcacttatcccaggggaaagtaaaagtagcgaatatcaatatcacccaggcaatcggattcgcttctttactcattctgattctgtccgccctgtgttgtctgtttttagaacctttggcccacttgctgggaagttcggaacgcctattgcctggcgttatggaatatatgatctggtatattccttttctggtattctatctaatcctgaatgcagggatgttcttcatccgtttagacggttcccccaattatgccatgatgtgtaatgctatagcagcagtaaccaacatcctcctcgattatattttcatcttccgtttcggctggggactgatgggggcagcctttgcaaccagtctcgggacaacgatcgggggactgatgacagttggttatctgctgcgccggtcacatactttacatctgcaacgaatcaaattaagccggaaaagtatgcaacttaccgcccggaatatcggttatatggttaagctcggttcatcggcctttgtcaccgaactatccatcgcctttatgatgtttctgggaaattacgtattcatcagtcatttaggagaagacggagtagcagcattcagtatcgcttgttattttttcccgattatttttatgatatacgacgcaatcgtgttatcgggtcagccgatcctcagttataatttcggtctccgggatacatcacggatcaaacaaaccctccgtttgatgtacagaacagcactcctctgcggaataagttttttcaccctcaccgcccttttccgccaccagattgtcgctctgtttatcggaccggaatatgcagcttatcagattgcagtgaaaggtttgccttactttgccttcggctttatatttttcgccgtcaatatgattggaatcggttattatcaaagtatcgaacgggcacatcgggctaccgtcatcaccctgctacgcgggatactatttatgctggtgggcttcctggtgcttcctatattactcgatgtaaaaggaatatggctggccgtccctctggcagaagtactcacccttctcctgatcggcagcctttatctgcacgaaaagcagaaacagaagtcttaaatttaccgaaatcggctttactcctgtggagaactttcggtcttgtccgccgcccttacgactaccttaatctaaaattaagcactatctttgcagagcaaaaagaacagatcaactatggaagtctttatcgagaaattctgccgaaggtataacctttcagaaacggatgtaaaagcattgacagaacaaatgcaggaagtacgttttagaaaaaaagaagctattgtcattgaaggagaacgcaatagcaatttatacctgatcaaagaaggaatctggagaggacattatctgaaagacggaaccgatacgactatctggtttgcttctgtcggtgaaatagccttttcgatctggggatatgccgacaattcgatctcccaaatctctatagaagcctgtaatgacagtatcgcatacagtattccgcgccatcttttaaccaagttattcgattcatcccttggattagccaacctcgggcgccgtctgatggagcaacaattgcttaccactgaaaactggttactcagtaatgacagtccgcgtgctaaagaacgctacctgactttaatccgggaaaccccggaattattgcaacatgtcccgcaaaaacacatcgcttcttatctgtggatcaccccgcagtcactgagccggattcgggcaaaaataaagctatagagcaggaatttcgtgtttagaaacttttagtttgttgagacttcccaaactgctcacctcacttatccccgtcaatcgatcttatgccgtacgacagtgattttccgcttttcgatccggagatatccttcatcggccaattccgacaatacccgggctaaggagggacgtgccactcccaggatatcggcgatctcttgtcgactacgcggattttcatgttcgcgaagataagccagcaagcgggttttcaaatcctgtaaggcaaaagcattcaacttacggctcaaaaaaatactccggtcggaaatgatccgcagaaaattttgcatcactatcttttcccgatgcatcaggtctacaaaatcagtccggttcaaaaccagcacttcacaatttgttaaagtggtaatatttaccgggaaacggttgtctgtagcaaaaataaaagccggagccaacaaacggggagcttcgatctcctctatcgtcacctgtttcccctcttcattcaccatattagtccgtacccggccactatacaacaaatacaacgactgacaaaccgtcccctgtaaagcaataaaatcaccgataccaaactcacgcaaagcattcggagtacgaccgataaaattttccaggaacctttctgaaagccctctgaaaaccggagcctctgccaatttcttataatccatcatccgtcttgtttattatttattatccttctccctgcaaacaccttttcccccaataacccaacaacttcataactctataactcagtaactcaacaactcagtaactctataactcagtaactcaacaactcagcaactctacaactcaacaactctcctccccaaatatagcacaattcccctccatatttttttccattgtaacatttgtgacaattcttctgtaataagattccgatttttgtcattacattaaaacagacaaatatgaaacgcacgataattaaaatcgacgactcccggtgtaatggttgcggtctttgtgtaaaaggttgtcacgaaggggctctgcaactgatcgagggcaaagccgttctagtgagcgaactctattgcgacggtttgggggcctgtttaggagaatgcccgcagcaagcgatagaactggaagagagagaagccgaagcttatgacgaacgtaaagtgatgcaacgcctgctccccaaaggagaaaaagtgatctccgctcatctccgtcatctggcaactcagggacagcaggattatctccaacaagccatcgacgtattggaggaaaatcatcttcctatacctgttccggcaaacaagtcaacatcccaaaattcctttctgtttcacgcaacgccgacttcagccaccggaggttgtcccggaagccggaatataaccttcactccacaatcacaaaaacaagccatcggtatcccggcatcggcgcaaagccaaacggataccttcacctcaccggtatcgatgcccagcgaattacaacagtggcccgttcagttacatttactgtctccgaccgctccctggctgaagaaggcgaatctattggttgctgcggattgtacagcctattctgccggggattttcataccaactggcttcgtgggaaacgcctggctatcgcgtgtccgaaactggatcatggacaagaaatatatctcgaaaaattgattacgatgatcgatgaaggaggaatagacaccctgaccgttatgatcatggaagtgccttgttgcagtgggttattgcacctttgccagaaagcccgtcaaaaagcaaaacgcaacattcctttaaagatggtcaaaatcagcctacagggcgaaattttagaagaaatatggctataagattactttttacgtataaagtaaaaggtatacaaatcaataaaatgttatgaaagaatcgatgttttgttttcaatgtcaggagacagccaaagggacaggctgtacagtccgcggagtatgcggtaaaaacagtacaacttcggctcgcatggatttgctgctctttgtaatcagaggaatttctattgcagcccacaccttacgtacgcaccggatattacccgatccacaagtcaatgcttttgtcatcgacgccctcttttcgactattaccaatgctaatttcgacgaaaaaagcatcaccgaacggatcaatcgggggttcaatcttcgcaaccgtctggttgctcaggcatcgtcagccggcatcacctttccttcggccgacgaattgacctggaacggagccccggaagcttatgatgataaagcggctgaagtgggggtattacgcgaaccgaacgaagatctgcgttcactgaaagaattaattgtatatggactcaaaggaatggcggcttataccgggcatgctatgcgcctgggatacgataatccggctcttcacgaatttatacaacgtaccttgtccgatatcgctatcggtaacctgtcggtcggagaactcaccgcccgtgtcctgcaaaccgggacattcggcgtacaggccatggccctactcgaccaggccaataccggaagttacggtaatcctgaaatcaccgaagtcaatctgggcgtccgttctaatcccggaatcctgatcagcggacacgatttgaaagatatggaagagttgttacggcaaaccgagggaaccggaatcgacgtgtatacccacagtgaaatgttacctgcccactactatccggcattcaaaaaatacaaacatttcgccggtaattatggaaatgcctggtggaaacaacgggaggaattcgaaacttttaacggaccgatccttttcacgaccaattgtatcgtacccccattaccggcagccacctacacagcccggatgtacacgaccaattcagccggatatcccggatgtaaacacatcgtaacagatgcggacgggaaaaaggatttttcggaaatcatcgaaaaagcaaaaacctgtaaacctccggtagaaattgaaaaaggaaccattgtcggtggctttgcccatcaccaggtcattcaactggcagacaaggtggtcgaagctgtaaaaagcggagctatccgtcagtttgtagtcatggccggatgtgacggacgcatgaaaatacgggaatattataccgaatttgccaaatctctcccctccgatacagtgatactcacagctggctgtgccaaataccgttacaacaaactgggtttgggaaacatcggaaacattccccgtgtcctggatgccggacaatgtaacgatagttattcactggtacgcatagccctgaaactgcaagaagtattcggactgaaagatatcaatgaactccctattgtttacaatatcgcctggtatgaacaaaaagccgttatcgtactactggctttactgtcattaggtatcaaaaatatccatctgggaccgaccatgcccgctttcctttcaccgaatgtcgccaaagtccttacggaaaaattcggtttgagcggcaaaatttaaagcgccggaaaatgaaagagtaacagcggacaaagcgataaaaatcaaattcagatcgctttatccgctgttactgtcatcatctaatacaaaaggctgtcacggagaaactccggttttcttttctgcgtacaaccggaaaataaaaatttatatcatgacagcaaatcgaaaaaaagcacccgaatatctgaaagacgatcatcttagtgtcggtacaaaagaatatctcaaagtattgaattcaggtgacaagccggtggaatcgctctctgttccggaagccagaaaggtgttggtaacagcacaagccagcgtaaaaacagacctttccggcattgaagaatcggaaaaaacaatcacagtggacgatcacatgctccgtctgaatatcctccgtcctcaaggttctaaggaaaagttaccggtattcatcttcatccacggtggaggctgggtattaggagattaccccacccacaaacgtctggcccgtgatctggtagtcgagtccggttacgcctgtgtgttcgtcaattacacgccttcgcccgaagccaaatttccacaagcgatcgatgaaatatatgcagcgacctgttgggtggccgagcatggggatgaaattcatgtagacggtcaccgcctcggtatcgtcggcaacagcgtcgggggcaatatgactatcgtcaccagtatgctggccaaagagcaaaaagggcctgaaatcaaggtacaaatcctgatgtggccggtaacggacgcgaatttcgactgggaatcctatgatctctacggagagcaacgtttcctaaccattcccttgatgcaatggatgttcgaccaatatcttaccgagcaagacgaccgcctgaatcctcatctttctcctgtacaagcctctaccgaagagttacaaggtcttcctcccaccttgatcgaagttgcagaaaacgatatccttcgagaccagggagaagccctgggccgtcgtctcgacgaagcaggtgttgatgtcaccaccatccgtttcaacggcgtgatccacgattgggggatgctcaacggattcgccactttacctcctacccgttccctgatccttttttcagctgctatgctcaagagatacctggaatagctccctccccccccacacaagccatgcctttaggcttgtggggatcagtgtccctcgcagggcccgaccggtcagcgatctgtaaacccaaccacccaggttgacacaaccgcttatcgatcctttaggggtaaactcacttcttacctcaccggcgtatagtcgataaccgattcctcttcggtcgcttccagtttaaatatgacaggacgcaaaccgtcattacaactacatatagctaccccgggttttctgatccagtcgccataataaaacaatgttttacccgctccatgcgaaagcgcaaaaacatattggtagatcgctttccaggcctcatcgcaaaagccctcgggtttagcatagtcggcataaaatacctgcccggcttttaacatcggacaagccttcaaaccttctgctccgtactcttttaccaactcttcgtccaaagtggttttcaacaccgttatctttacttttttcatcgtattccgatttcaaattattaaaccatcttatattcaataacgtaccgtacgacgaggtgaaccgctccaggaacatcccaaacaataaatcacagtcaggtcgaacccttcgagactctccccctccttggcggcaataacctcaaactcaactgtcacaaacaccaaacgccgttcttttttctcgttcaacacatagaaattcggtattttacattgcggacacaaacgtcttttcatataactatcctttttattttctcactctatatcaattataaaagcccggtccctgccagcttccgtaaaaacggattgcgaagacaagcgacaaactgctcgtaagtatataccggccggaggatgactggctctccggcaggtgcagtcgctgaaagcagatccgacatccggtgaaataattcccaacgcagatgagaaagcaaagaatcctcgatccaataagaaaaaagggtattcggactatttttttccaaagctttcatttgcttgtaaagaggatatccgtcggatacatcgtgccataaatccacaaaagcatggtcgtaatagccgtcggacatgcaattcgtcgcaaactcaaaagcatcttgccgaacgatatcgatcttctcctttttaggaaattgaggaaggatatgctcccggaacagagcgatgacattttcgtccctttcgacaatagtcagcgttttcacttccggtttttcagaaaccataaaagcataataccccattccgagtccgaaagcaacaacctgccccgctgccctggctatgggttgccgcatggtttctatttcattcggtttaatagccatccactcctgcccgtcctccatgactgccgggaatgaaaattccgtatcgaaaaatccgatctgtggaatttctttcaactcttcatcggtccggatatcatcacaaacaaacgcttcatagggtttatatttttcaatggtcagcttccaatttccaaaatgagcttcaggaatccgaatttgccggtaataaggattcatccgatattcctgcggatcgagccggcggataccggacctcagataagctgtcgacagataacgatcccggggattattttccacatccagtccacaagcagcgaccaacaagctggtataggcttctgctaacgtaatttcacactcaccggtgatcccctctatcagttctttcgtgataaaatcaggacataccgtaagatatctgctcattaatcccagcacctcattattcatctccaaaacctcacccagattttttactttccggcggtcgatcggacttaaatcgatattcattttctcctattctaaaaattcaatcttcactcctcagaagtcttctttcctactctcaccaccacttttccaacttccatcaacttttgtgcctccggtatttcttcaaaggaaaatgttttgtaaatatacacttttaatatctctccgacaggattaacaaagcatatacgaatctcccgctaatcaagttaacgcctaatgtcattgaaaaaactttctttgtataaaaaataatcactatctttgccacgaaaataccaccgcagtcaaattgtttgtccggataccgccggatatccggactgccagttaccgttaaatttatttatcactgtttgaagtgaaaccaagatccgtaatgggtccggtttatatcgttctttgacatatcctcatctatcagcccgtaaatagatttatcgacaaaaagtaaaaaccatcgattaaaaaatcttaaaattatgacatccgaaatattatttcaagaaaataccgaaatcgactcaatacaacaaatgatcacaacaatccataaccatatcgccgaataccgatccaacctctcccgaaggcccaacgtctatcgccctaaaatagccgaattacaagctaatctggctcaaatttactggtatgattataaagattaccattcagctgaaaagttatttcttcaggcattggagaactacgaaaaatattcagggcgcagaatcatcatacagagtcataaattgaagattatggactttttagtaaacctatacaaccgttcgaatcgtttggaactttccgaacaaatattactgcgaatgttggaaatacaaaagaaactggcagaaaactattggtggatttacctcgaagatgtagcaataacccaatggcggctaggcaatctatatgtcgacatgcgacgcttcaattcggcggaacggctgtattcggccagtctggatacccgatccgaattcgaccgggaagatatataccggtatcgtcctgcaacggcacaatgccagcgaagcctgggaaaactttatgaagtacatttaaaaaactatccgaaagcagagcaatgttaccgcaaatcgatcgaaatattacaagaactctgtgaaaacgaatatgaacgctgcaatttcatccgttcattacaacattcccaacttcttctggcccatctgcatagcgatacctccagcgaacaggatcgtccggcaaactaaaattccgcattttacgatgccggcaaaagctacgatcgaataagtgtaatctatcgcccctccaatttccagtgtagtgaccgtttatccgtcattaccgttttatccgctcaaatccttaacaatccctggcaaagggctatttccttcgggtcacccgtatgtttaccttccacatcggaaagctttacgacaggccaaaattcttttcctccctgaggtttacactcgaacattttgattaccatgttcagcggttttactccgacatcattagacaagaaagtaccgatcccataaacatcatgtaatcgtccgttcacaaaggagcgaatattttctaccccttccagatcgagagcatcgctatagaccacggtctttgtccgcggatcgatccgtttctcccggtaatgtttcaaagctttctcggtaaatacataaggatcaccgctatcccaacgcaacccgtcgaatagcttagcatactgcgtatcgaaactgctgaaaaagttatcggttgtataggtatccgtcaaggctatccccaaatgcccgtcatacacatccacccaattagccaaagccagagcattggcagaccgatagccataatgtgccccatggtacataaaccattcgtggggatgagttcccataggagtaaggttatacttcatcgccaggcatacattactggaccctttcaagtatttgccggaatactccttcaatattccgatcacccgatcctgtacctcgaatgaaaagcggcgccgtgtgccgaattccgatatttctgcaccgatctctgcaaaacgacgggctttatggatcgctttttcttccacctgccgggcaaactggccggtcatctgaaaataaagttccgatatcatcgccattaaagggacctcccagagtaccgtacgataccataatccacggatctcgagttccaggctacccccattttgcagaatccttacttctgaaggatcgaaacgatatcctttcaagagatcgaaaaatacagaatcgaaataataacattttcgccgcataaaccgttcggcctcgtcggtcaaagtcaatccgcgcatctcttccacttctgcctgtaaagcttcggcaaatcctgacgggaaatcggtttctccccggttgacaaaacgatatacgacttcggcatccggaaatttcttctgaatggcattcatcgttgtaaatttgtagagatcgttatctgtaaaatctttgattatcatatgccttcgattaaaaattcgacctcagcgccgttgtcgttgtaaaacgggcacctaaaggctcaggccagatcgtatgtacataatgcctttaaatagtccggcaccacttgtccgtcgaccttaggcttccatacccccagcttccgcctgaatccgggtaatcttcattattcccattttaaataaaaacccttttccgtaaaataccgatattttacccgatcaaagcgataatacctgaccttcctaccgttcttcgcccgattttcctgttctgcatcgaccaataatccggtccctaccatctttctacgaaaattatcccggtcgagtgtacactgtaaaaccgattcgtataaatgccgaagatcggccatcttaaattcagggggcaacagatcgatcccgatcggccgataccgggcttttaactttaatcggtcggcagccatttgcagaattcgtcgatgatcgaatgccaggggcggtattccggacaaaggaaaccattgggccctatcggcatcgtcccctgccttcactttacaatcctcccatctgaccaaagcataataagcgatactgacaacgcgataacgaggatcacgatcgacatccgaaaaagcatataattgttcgaaattcactactttcaatccggtttcttcttccaactccctgcgggcacaggtttctgcatcttcatccatatccataaaacctcccggcaaagcccatttccctttaaacggttcgttccctctccggatcaataataccctcaactccccctcgccgaatccaaagataacctgatcggtcgtcaacgcgggacggggatatttataacaatactggttttccatcatgcatctgccttttatatcacaaatgaaagaaataaaaacaacaacacaaaaccagtcctaaggttcaacaaaaaaatgtttccagctaacctataagttttctttctgagtttaccaggactcaactcagtgcccggccgggatacaaaggtaagaagcccgaatagccgataagattgtattcaaaagtataatacagcgctccaggaacgggagcgattgtgtgggagctccacacaatcgccacatttccttgatctataacgaaccgatccgtttattcaaagcattttcaaaatttttcagtataggatcaaccggattaaaaagctgacggaatatatgtaatccttcttcacactgagctttatttccttttgcacacaacatcgcatttaattgcatcgtcaatccccaacggtccgaagcaggaagggacataaattgttttttaaaaatagaaagtactttatccattttatccatccgaaatgcatcgtaataatccaatatggacaacaaataacttttccgttccggccgaacaattttgatatccttcctcagagtcttaaaacgtccggcatcatattctttctcatcaaatacaagactattgacagtattgaataccggaacgtaaagtactttctgaatccatgcttccagttcctccggagcaatataggcagtaaataattcccggtgttttgcgacaaaatggaatgtatacgacgaaggatccgacaggtaacgccgaatcagctgccagtcctcttcgttaaccgtctctccatttttccggcaaagctcatccaatacggccggaattttatcaaaccgatatcccccccccaaagtcgtaatataccggcgaaggaaatcagcctcccggtcacctgtttcataacgtttctgcatccctgcaatcgaattttccggatccattccttcccggatcagccggataaattcaccggcatcatgtccgccaacgacccggtgtacctcgttccctgctgcatccagcaataaataagttggaaatacctgcatcccataacgcttcaataactcccgtccctcgcccttttccatatcaaatttaacattgataaaatgctcgttaaagaagtgccccacttccggatcggtgaagacagtagtattcatcattttacaaggagcacaccacgaagtataaccatccaaaaagatcagtttacccgtcgcttcagcctcttgtaaagcatcctgaaaactaccggtcctgaattgaattcctttgccggcagccaataacttttccaactgttgcgtaatctcttcccggcgcaactccttcgccttgatcaaaccgtctttaccaatgataaaacaatcaggcactccggcaatattatatgccttagccaccggactcttccaggctttcagatctgtcaggcaataccagggcacagcatgagtttccaggtccttcaaccatttatcccggttatcatctaaatgaatggtgataaacaccacactatctttaaaccgttcataagcctgccggatggaaggaatttccttcttacaccaactacaccaggatgcactgaattccagaaaaatatattttcccttaaagctagccaaggtatactcttttccctcccggtcgaacaccttaaaatcggcagcaggcattcccggacgcactttactctccttctctaaactttgtctcacttcctgtaaacacaaaggatcgaatcccggttcaaaccgattcaatacttttccggtattttcaaatcccagattaaataccaaccgggtaaccaactgtgccgccgcttcactttttttggcatctgcacggaaagccaatacactatcaatggattgcatcaataacttttctctctctgccgacagccggcgtactccggcaatatctccctccataaacttctcaccgatagccatattcaactcacccgaagctttatagcaggataaactcaatagataatcattataagcacgcagctcatcagacacctgctgttgtgcatatatttcctgtatacacaacaagaacagacaaaataaaacaactaatcttctcatcaaattttattccattagatattattcatacttccaagaaccacccgatttatatatcaaacctttgacttctccgggaatttgtttcacatgctcgaactcctgtccatccgtactcgtccaatagaagtcatgagtatttccattttgtacacacacaccgaactgttctccataagaatcaagggtaaaagctgttattgttcctgttttaaaatcggctacagctaccggagtatcgttcaattcaaaattataccggaaaatttgtgctccctgagaataataagcctccttcgttgtatatcccactgcaaaacgggtcttttcattcacaactgccggaaatacatcctgtgcaattgttgtcaatgtcggttgtcctcccacgatcccgaattgaaaacgctgagtataatattttccatccgacttatcccgcaaaacggcataaaacaaactcttcccctgctgctgagaagccggagccagatagatcaactctttatcaggatcaaccaggctgaatttttgtcccgcatcctccacctgatctaatccccgtaactctccgttatccaaaaacaaatatcttccttcattttcttcataaaataaagcgacattataatcaggagggaaactataccccaccacagaagagagcttataatccccgtagaaaggaaaatccggataccggtcctggtacaaataccctccgggagaataacggacatacaatttcccggacccggaaaccaaacaggaataattctttataaaacaagctgccttaatttcttgcaaatcttccggcaagcttccgccgacaaattcctctccggtccacacctctttccgaaggttactccagtctaattctaccggtccgtccgatcccggccctccggccatcaccaatacaccgtttgcattcaaaccggcatcaaaatgttctaccactccataagctttaggccccaattccctgttattaactgccgtataaacattctgaaaaaactttttactgctcgccaacatgttcaactccgcttttccttgattttcagtcatccacatccaaccattcgtaaaattacttagcaaagtcacccgaaaacgctgactatatgagattcccgtacgttcgtctttaacgataaaagcaccgaaaatatcattccacccttggggttctatcccaaaagtaacattcagacatttttcagtagaaaccacaaacgtatccagcttccattgataggacagatcatcatgtgcctgtgtactatcggtaaaacgaataatcggttccggcatcgtaaaaggttctccaaaccagagttcatattttttattttcatcgatcccatcaatttcaattgcatacattgttttataatcataatttcctttatccttatagcaaccggccattaccagtaatgccagtaacaatatatatatcttattcataactcgatctaaatttaattggtacccctttattactatcccaccatcttcacctgcataggttgattattctcatccatgattacccgtccctgagcggcttcttcttccagataatatttaaacttcaggatagcggccctcttttccggataagcaatattttccaaatcaaaagtaccgctaatccggataaacaaacgatatttcgtttcagaataactacccaatccttcggtttcatgccactcatcccaccatccgggccgaacgatccgatcagtcagatatattttacaactattactctccgggaaacacaatttaaaatgggcactctccaccaaatccaactgcagatacaatttttccgctttcaattcttctgtattcatcacttcaacccaaagtgtatccgtaacccgattggcccgcaacttacagttttgcgccggaatattgaaatgcaccccttcctgaaccgtacttgccggatttacctttaccttatattcgcggtcataatccaacacttcgcctgtcactttcacttctatgccaatacgatctgtcgttgtctttccagccaatccgaaattataatccacactgtccttttcaaacaccgatacaaaacgtatatagtccgtacccgaatacttttcgaggtctttttcacaggaacagaacaccaatcccattcccaaccctatgatcaatgccaatatctttgctttcatacctttctatttataaagttcagacaatctgttaccgaattccaattccacgtccggcaacggtaatacgaaatctttctccgtcatggtataatttccggactcatctactactttccgtcccaagcgtttgtagaaataaaacagctgcccttcgcacataaactcccggcgggcatcgttaacaatcacatcttccagctctgcgggtgaatttgcaatcaaggcctccttggcattccgggcattccgtaatttctgtaattctgttttagctccattcagatcgctatccatcagatattcacaaacataataatacatctcactaatccgaatcatcggagctatcctccccatctcctcttccgtcatctcatcagcattctcaggcttcacaaatttgatacaactgggccgatcgaaagcagccaatatttcatgctccatcagatagttcaaacggtaatcattggcacttccttcaaacatctgttcactattctttatcgtcaaccactttttgctgctactatagctgggcgaataaggttcaaacactttagtcatccggggtacattgaatccaaagacgatctcaggccgtaaaatccggttccgatattgaatatcgctagtaatcttccaataatcggtaaatttgaatactcccgattccaacacaattttagcataatcgtaagcctgttttttgtccagtttataagcatatacccgtgctagcaaagcattcacagcataataattcagacggaatccacgataagacaaaaattcattccggtcaggcatcggctgggtccacatatacatatccgagccagtagttgcctgatacaacggatcaaaaataggatcccggccttccagatcggtaacggcagctttcagatctacaatcacactatcgatcacttcactgaccgtcttttgaggcgacactttattcgaatattttgtaatatacggaatagctgtatatcccggatctgctttatacgaaggtgcaaacaaacgcaacagatcaaaatggaaaaaagcccttaaagccctggcttctccatgtaaaatataataagtacgctcatcctcaaaaaaatccggaccgacttcctccaatctttccaataaaatattacaattggcaatacagaaatacaattccagccacatctcatcaattttaggcgaaatattcacatccttgtattggtacttggccaactgggcaaactcatgtgtctcgtccggaatagcgtaatactgagccaaaacatccgtaaatccgaacaataaattattggcatacaatttttcacccgaagcggtaatataaatcccgttcaatacatccttaaatccctgaggagtagaaaatattttcttgtcgttcacctgtgcctccggagtaatatccaaccacgacgtacaggactgtgagaggacagcacatcccaacaggattgcagctgtcatatttttaatttttttgtaactcatattctattgcattaaaattgaaccattacacctaaactcatgctacgggcaaatggataagaaatccctctctcccgcttcactgtcgacaaacgaaacacatcattcatcattgctgtcaaacgaaccatatcaaaaccgataggtttcagccattctttcttcaaatcataagacaatgacaaagatcccaactgtaatacattttcatcctgtataaaacgggaactagccggagtcgtcgacttatcgttgatgtctttataaaatgtatggtcgcctggtttctgccagcgttgctccaatacccgacggtctacattatctctcggatcagcattctctacccggttgatcaaggtctggttgtacacctgtcctcccagacgataactgaaattcatgtttagattgagttgcttccaggttatattcgttccgaatgctccggtcactttcggttctgtatcaccgcacaccacactctctttcggatcccaaacgtacgtattagtaccatcctgacgctggaataactcttttccggtagcggggtcgatacccaacgatttcatcgcataaatagcggttgaagatcttccctctttataccggaccatcggcttggttttatagtcgtcattgttagcctgttcctgatcggctttatcgttataggaactcaaagcattcgaaatggatacgatacgattcttattatgagccatattcacaaacagactgacattccaatcgttcgatttatagacaaaactccgtaaagccaattccactccttcattttccatctgtcccaggttttctttataatcaataaatcccagagaagtaggcaaagtaacactgctcaaaaggtttttggtctttttcagataatacccgaaagtcaccgtcaaccgatcttcccacatgccgaaatccaatcccaagtcgtaagcagtcgtcgtttcccatttcagattcggattccctaaagccatcagggttgccccgattcctgtcgcataccagccgtcctgtatatattcgaacatcgtctgagattgatagggttgaaaagaagcctttcctgtcgttccaatagacccacggatcttcagtctggaaataccggtattttccataaatttttcatggtgtatattccaacccaaaccaactgcccagaaaggagaaaatttagattccgaaccatacatggacgaaccatccaaacgagccgataaatccaataaatagcgattcgcataagaataattgacattggcaaaaaaacctgccaatcgggtttttccctcacttcctccgggatgggtattggtaaactccttcgccaaagagatataatccatcatcttggaagggtaacctctcacgtcgaaattcacactacgactaccactttctgtcagattgacacctaatgccgtattgataaagtgtttacccactcccaaataataagtcaataccgagttaaaatccatactatacgtattactcgtcccgtggtacccttctcctttattcaacaatccttcaccggacgacaactcataactttcatactgcaatgattccggtgaaataaaagtctccacttgttctttcttttcaccgtaagagaaattggcccgcaaacgtaatccttgtacgatactccattccagactgaaattattggtcacgtccagatactcgctttcatcccgatttcctaccgttgcttcatacacagggttccaaatttgtttattggtatttatgtattgcgtcatcttacggatcagattaccgtgctcatcctgaaaaggataatagggattcaacaaggcatattgggaaaagtcaccataaggggattctttagattttactttattgacagtcagataattccttactaaaagtttatcttttagattataagaaagtgaaaaacctaaagctccgcggtcacgagccgatcctttcatcaccccattgtctttatcatacttaaaatcaataccatatctaaccgctttatccccaccttcaatgaatatgctatgcttttgattaaactctaccttcaaaggctgagacaaccaataggtattcactccactctcaacaagactcagtttataattataatctttatctttattgatctgcgcatcagcattattatctttatacatgcctatgctcttttcaaaatccaacttttcacgggcatccaataagtcgtatccatttaaatccggtatagcgatagaagcagtaaaattatagttcacccgcaactgtccttccgagggagctttcgttttgataacaatcactccattcgctgcccgagaaccataaatagccgttgccgaagcatctttcagaatagtcaacgattcgatccgttcaatatcgaggtcaaaaattttctctgcatctacttcaaaaccatccatgataaacgtaggcagattcggattatttttcagattatcccggctcactgcttccttttcaaattcagtcagcccgattccagaatttccccgaatcgtaaaatcagcaatccggttaggattcgatccgatgtctatattgtcctcaaagcggatagaaggatcaaatacagaaagtgcctgaagcacattcccggtagtcaccttccttagctcgtcccctttcacggttacctgtgcccctgtaaaactatctttgttcttattaaaatatccggtcaccaccacatcgtcaagtgcctttacatcctcctttaagacaatcttataatcattcttatccgtaatcttcacctccatcgtctccatccccacaaaagaaaacaacaaggcttgtccatcagccacaggtaaagtgattgtaaactctccctctacgctagtcaccgtccctaaagaagttcccttgataatgaccgtcactcccggtagtggattccctttttcatccaccacttttccggtgatcttacgaccttcggttgctgtcacttctttttttatcactacggcatttccggaaatctcaaaccaaagaccagtatttttcaggcacgttttcaaaatctcattcacctccttatccgtttcctgtaccgtcaattgcttcactccttcaatgtcacgggttccgtacataaacacaaaatccgtcttcttttgaatctcccagatcacctgttccaaagacacattttccaaatccaaactgattcttacattattttgagaatgtactgctgcattcagctgaaaacagctaaacaaaatcaaaaaaaacttcagtctcaccacaaataaaattttagagagttttccccgggcgggaaaaaccattccaggattttttttcataaatttgttgaattaaagtttaacacactttgattatttaagcatgttcccggccagtttcgcagaccaccgggaacatttttatttcaaacccgtataccccaaacgctatattttcatttctctatcctcatatccccttgccatccaccctattcgtattcagtatcatcatctttaatttcattttttctccgatatatacaaacaacggtttgtctgcaacacctctactaaatttgtcttctttatcatatcaacaatcggttgcatatcatcataccttccaaaccttgcaccgatccggatttctttagctctttcgtctataaaatgaaattccaccccataccaacgccccaatgttttcataacattttccaatcgttcattccggaatacaaacgttccttcctgccaggccacatattgttctacttcaacctgccgtacggtcgttttaccgtcatttttcgaatacacggcctgctctcctgccacaatatcctgatcgttcaccttcacttttccttccaccaaagttgttaccacctgcccttcatctgcatatgaacgaacattaaacgaagtccccaacacccgtacattcaccccattcatctttactacaaaaggacgaagtgcatctttagacactttaaaataagcctctccactcaattctaccacccgctctgtgccacggaatactaccggatattttagccggctctcagcattcaaataaacccgcgtaccatcagataaagtcaacgtatactccatcccggtcaaagtttccatctgattataaacaagcgtatcttcacctactccgatctgcctgtaatcaatccccgtagaatccttttgaatcacagtaccatccatctctgccaaagtaaaccgaccgtccggaacaagctttaccacctttccatttcctaaggttaattttgcacttcgctttccggaaggaatactctgctgcacaataaggggcggctttacgggcacagctgttttcatctgaaaataccagaatccacctcccaacatcactaaaatgacagcagcatatttccaccacctcctccccccggcacgtcttcccatagccttatccagattcttctccatttttttccaggcctctgtaacagaaaaacgttccaacaactgctggttttctttaaaatcttcttcctgatccaatctctccgccagattggtatgccacacgctttcctgcttccagttttccaacgcctcccgttcttccggcgtagcaatccccattaagttggctgcatacttagccgctatctgaaaaatattcatatccaatcgcataaaaacattttttaatctatcctaaatcaaaaatcgtcaaatagctttctgccactttcaaagtctttctatttacagatttaagctcctcattccggattaattatattcattaaattttgaaaaatctgctgaaatttattgtgttttcattcttataacaatctcaaacgaaaaacggggtagtcaggattgaaaaaattttatttatttacaagtctacccctttctacaaaatcatccaaccgaccacattttacattctgctattccagccgaccggataaccatacgttgcagccaaaccctgaaaagaaagagagataatttcaatacccggcctacgacacatttccggatatctatccataaaaacaggagaatttaagcttgaatctaaataaatataccgtatttttgtccggtctcatccatcgtaacagaaatgaatattgaagagttcagagcatattgcttgtcattcaaaggagtatacgaaaagatgccattttcaggagttgccgataaatacagccgtgacgtcctgtgtttctacgtagcggataaatggttttgcttcgtcaatatcgaagttttcgatttttgttgcctcaaatgccaacccgaagaatccggagaattacaagccggatatattggaataaaaccgggctggcatatgaacaagaaatattggatcagtatttactttaaccaggatgtccccgatatcatgataaaagaactggtcggcaaatcctacgaaatcgtagtccgaagcctaagcaaaaaagaacgggaaaagctgacctcagatgatgattgataagcatatccatacagcatccggttaatgtcccgtcatatttacaacttcgcctatttgcggaataactacaggtagcgaatctctatcccgcatcctccgtgcattcttcaacggttcgtcccagggatgagcagccaaagcatatttagaatgatgaaccgtcagaatttttgccgctttcaattccctggctaccgctgccatatatccgggcatcaggtggatatatttccacccttcgttgtactgaccgttttccagaatagcccagtcgatatccgggaaacgcataccgatttcagcgaaatgcgtgtcgtatccaccatccccgccgataaaaactttacgtcgggagccggtcacaagaaatgaggcccataacgaacggttgcgggccaatccgcgtcccgaaaaatgacgagccggcaaacaatgtatccggaagccgtcatccaacagggcctgttcctcccaatccaattccacaatccgctccggagaaaacccccaatactcgaaatgttcacctacccccaacggacataccactttctgcacacgatcttttaaagccgtcactgtccggtaatccaaatgatcccaatgatcgtgggtaatgatcaggtagtcgatatcgggcatatcttccggccggtacacctccgttcctttgaaaggtttgtttacgaacgaaacaggtgcagccgtacaaaataccggatcgacaagtaaacgtttcccctccatctggatcagataggaagaatggccgaaccaaaccaacagatcttctgagaggttcaaggtctgtaaatcggttttgataacaggcagagtactatccggccttagtcctgcttgtttcctgaataaaaagcccgtcaaattttgaaaaaatcctttgccggaagtcatcaataccgtttcgtgtaagttacgaaattctccatcccggtaatgggccgagcgttcgattctagccaaacgttctccccggggtaaacgaccgaattgcggcatattcacaaatacgactccaactagagccgacaaaacgataacactcaaaatcacccacatcatacgaaatctttttttacccatatttctccgacttattttcccggccttaaaccgctttacccatttcattggtctgcttcatatcaagcaaaccgttcatttctcccttttgccatagtccggtgacagcgatcacccttttcccgcaggaattttccagacaagccgtaccccgtaaacaaccgaaagtacgttcgatcttttccggctccgtctccgccctggttgcaatgaaataagccacctgacagactccgaaacccaaaaccggcatttcaataccgttcttcaattttatagtcttcatattttttcatcttccaaattataaagtttttccgacatgacaaaaatacgggagacaaacaggtcgggagtacaccaattacggattatcctaccatttttaccgatccggtacatcctatgaatcaggcaataaaaaaatatttaaatttgtatcgaataaaatacaacagccatgaataccattcaaaaattcgacacgattcatcagtataatgaacttctaggacaagagactttacatccgctggttaatgtcatcgatctggccaaatcatgccgtctacggcacggtctccattctttcggcttttacacggtatttctgaaagaaataaaatgcggaaaccttcggtacggttgtaactattacgattatcaggaaggaacacttgtttttctcgctcccggacaggtcatcggtgtcgaagacgacggtaaagtctatcaaccgcaggggatggccctggtctttcacccggatcttttacggggaaccactctaggccgtacgatcaaagactatacctttttttcgtatcaggtgaacgaagcccttcatctttccgagcaagagcgtcatatcatcatcgactgtttccgtaatatcgaagaagaactgcatcacaccatcgacaaacacagccagcggttgatcgtatccaatatcgaattattcctcaactattgtgtccgtttctacgaccgtcaattcatcacccgcgaaaatgtcaacaaagacattctcacccggttcgaaaatttgctgaacgactatttctattccgaaaaaccggagagttcgggcctgccgacagtaaaatactgtgcagatcaaatgcatctgtccgccaattatttcggcgatctgatcaaaaaagagaccgggaaaaccgcttccgaacatatccagaccaaactgatcgatatcgcaaaagaaaaagtattcgacaccggcaaaaccatcagcgaaatcgcttatgagctcggtttccaatatccgcaacatttcagccgcctatttaagaaagtggtaggagtcactcccaacgaataccggatgctgaattaacagccctatcggttactccgataacataaagcctgaaagcatcgtaaaagagggaaatacgtcagattcccgctcccccggggactttcgtcgattggacgatgctttccccgcccattgttatactttatccgcttttcagttcaccgaaacttcattcgttctggtcgggagaatttataggactatccaaacagaggcagtcctgttcccgacaagaacgaaagaattcgaatcgttatttttcgctgccgatactcttccacacgacagccgataaagcagcaccggcaaaaggagcgacaataaacaaccataactgtgtcaatgccttccccccttcgaaaagagccggtccgatgctacgggcaggatttacagaagttcctgtgatagggatacaaacgatatgtaccaacactaacgtcagtccgatcgccaaaccacacatcaccggtgttcccttcttgtcatcggttacacccaaaacaaccagtacaaagatgaaagtaaagatcatttcagaaatgtactttttcataaccacgctatttaaaaacacttcctcaaaagtagtgaatttattttaatttatcacaatatttcccaaccgaaaccggttcctgaaccggtttcggcagcaataccgattcttaccggctcatcacccgatcggaccggaatatcaatgacaatcacaacgtgatgacgagatataatttcatctctaaccagaaaacaatccgaagccggaaaagaaagtcggttttctgaatttctgccttatgaaacgatttaaaaagtcaaactagattttcgtacacaattcggcaatccgtataatcagctgtacggctttttccattgcataaacgggtatatattcatagcgcccgtgaaaattatgtcctcccgtaaaaagattcggagtaggtaaccccataaacgacaaccgtgccccatccgtacctccccggatcggcacgatcaacggcttgatattcaactcctgcatggcttgctttgcaatatcgataatgtagtgaaccggttcgatcttttcacgcatattgctatactgatccttcaattccaactcgattttcaacccaaaacgtttggaaaattcacgcaccccgttctcgatcgtatttttgcgccattcaaaacgttcccggtcaaaatcacggatcaggatttcgatctcggtagtttccacatctccctttatcgaatacacatggaaaaaaccttcgtaaccggaagtattttcaggcacttcttttttaggcagactagccataaactcattggctacagcaatcgaattgaccattttattcttcgcatacccgggatgaatattccgtcctttgaaaacgatccgggcattagcggcattaaaattctcaaattccaattctccgatctctcctccatccatcgtataggcaaacttagccccgaatttttttacattaaaatgatcgggcccttcccctatttcctcatcgggagtgaaacagatgcatattttaccgtgtttaacttcggggtgtccgatcaaatattcggctgcggtcaaaatctcggcgattccggctttatcgtcagcacccaacaaggtattcccatctgtagtgatcaatgtttgccccacataattcatcaattccggaaattcctccgtcgaaagtacgattcccttctctttgttcagcacaatatcattgcccgcataattctcgataatccgggggttcacatgcctgccactcatttcggggctggtatccatatgggcgataaacccgatagccggtgtttcccgttccacagtagaaggtataactcccatcacatagccgaattcatccaattccacctcctggatacctatagcttccatctcttccttcaatacatgggcaaactccatctgtcccggtgtactgggattcaatcccgtattcgggtctgactgagtaccataatctacatacttcaaaaaacggtcagtaacattcatcataaaaagcaaaaaagctaaaagtaaaaagctataagctaaaaacagcaaacttacctgcctttagcttttagctttttacatattacattaataggctttcgcaatcaacactctccgatgagacggtttaccggtcaccatatcttttccttcttcttcagggctatcgaaaggaatacaacggatcgtcgctttggtatcggcttttatcttttcttcagtttctgcagtaccatcccaatgacaaaggaaaaatccgcctttactttccagcagatttttaaattcatcgtacgaatccactttagtgatcatactattacggaaatccaatgctttcttataaatattttcctggatatcctctaacaatttttctatatgtccgacaataccctccaaaggcaaagtttctttcgtcaaagtatcgcggcgagccacttcgatggtaccgttttccaaatcccgttctcccatcgctaaacgcacaggcacacctttcaattcgtaatcggcaaatttccaacccggtttctgggtatcgcgatcgtcatattttacggagattcctttagctctcagtttttcgatcagcccctgtactttatcgctgatttttttcaatccttcggcccctttatagatcggcacgataaccacctgcaaaggtgctaatttcggaggcaataccaaaccgttatcatccgaatgagccatgatcagggcacccatcaaacgggtcgataccccccacgaagttgcccacacgtattcgagttttccctcagcattggtgaactgtacatcgaaagctttggcaaaattctgtccgaggaagtgcgaagttccggcttgtaaagcttttccatcctgcatcagagcttcgatcgtaaaggtttccagggcacctgcaaaccgctcgctctcactcttcgagcccataatgacgggaacagccatccaattttgtgcaaaatcggcatacaccctcaccatcttattggcctcttccaacgcctcttctttcgtagcatgggctgtatgtccttcctgccacaaaaattcagccgtacgcaaaaacatccgggtacgcatttcccaacgcatcacattagcccactgattacacaaaatcggcagatcccgataggattgtatccagtttttataagtattccagatgatggtctccgaagtcggacgaatgatatactcttcttccaattttgctgccggatcgacaacaactcctcctccgttcgggtcatttttcaagcgataatgcgtcacaacagcacattcttttgcaaacccctcgacatgatcggcttccttagagaaaaaagatttgggaatcaacaacgggaaataagcattgacatgccctgtttgtttaaacatatcgtccaactgacgctggatcttctcccagatcgcatatccgtaaggcttgatcaccatacatcctctcactacggattgttcggccaaaccggcttttaccactaattcattataccattgtgagtaatcttcgcttcttgatgttaaaaacttgcccatcttcttattatttgataaaacgggagcaaatttaaagaaaaaaatagtagatgtgaccgaatttgattatttttattccatgatcggcaacaggttaaaaaagaattataaaaacaatagcaaattttttcttggtatactttttgatattaataataaaacgaataaataaaacaacatgaaattttctttatacatagcaggtcttgcttttataatagtatcctgttccactacccggaatttcagctctatcatggaggacgatatctattacgtccccgggaaaaaagcgctggctatccgggaagtagaaaatcttaccggacatgatatcgggaccgaacaaccggtcgatccgactgtcttagccggggaaatctcccgttcagcaggtagcagtacacctcctgccaccttctcgagtagtaacaacacgaagatcaatgcccgtagcgggcaattggagcaagtgaatatccaaagcttgacccgggaagcagaagagaagcttgccaacaatgaagagatcgatatgaccttgtacgaaaataccggatactggatcggaggctaccggggcccggccagcgatttggcagaaatacaacggatcatcaacatgtatcccgaaggattcgccaatttcagcaatgggcaggaaatagccctcaacctttcgttcgattcggattggaatgtctatacagataacggacgttactggtggtttccgtccaatacgaatatcaatttatattcttccctgcttttcggtacttatccgaaatatatctggaccatcgtatggaacaatccccgcttcgacagttgggctttcgacgctactttcaacaaccgtttcaactggagtctgaatctgggctggggcggtccgggctggagcatcggattcggatggaattcaggttggtacgatccttggtacggaggttggtacgatccctggtatcgcccctggtacggtggttactatccgggatggggttatccacactggcatcacccacattggggacatcccggttgggattatccgcactggggcggtggaagcggtcattatcccaacaggcccaaccggcctcattgggcaggacaacggccaggattcggaggcggagtaagcggcatacgcccaaacggaaatcggcccaacagcaacaatgggttgaaccgcccgaacagcacccgtccgggtacaggaagtgcgttacgcccgggcaccagcaactctttacggccaggaacaggaacaaccacccgtccgggcagttcaaccggaacgattaaccgtccgggcacaacacgccccaatacttccggtatcaaccggccgacaggtacgacacgtccgaatacgacaactacccgtccaggaacgatcacccggccgaatacaggctcgaatatacgcccgggaaccaatacgtccagtccctcacaagggggaacacgtccggtaacccggccgtcgacaaccacccggccgtcgacaacgacgaatcgcccgacaacgacaacgcggccatcaacgacgactaaccggccatctaccacaacccggccttcaaccactacgaacaaccggtatacccgtccgtccggtagcggttcaggtaatgtaaaaacttataatcgtcctcaaaatagttacagaccgacttataataacaacagttcttcgaattatgttccccggagatcttcatcggcctcccggagttcgggtagcagttataccccttcccggagttcatcgccttcccggagttcaggcagtagttacagcccttcccggagttcgggtggttcctcccggggcacagtaaatcgtccaactagaagataaacttaaaccagcacatcatgaaaaaagtaatcatattatccgttcttctgggattcacatttgcttcacaagcccagactttcgaggatgccgtacaattttcaaggatacagaactggggaacagcccgttcggcaggtatggcgggtgccttcggagctttggggggtgatctgtcaaccctaagtgctaacccggccggtatcggcgttttcaggaaatcggaaatctccattacgcccagtttaaattttgccaacaccaaggctaccgactatagtcctaaagataattctttccaattgggagatctgggagctgtattcgctttttattctcccaacttcgactggaaaggcatcaatttcggtatcaattataccaatttgaataatttcaaccgaaaaaccgatcaggtgatctggaactcctccacctctttgctggacgtattggccgcaagcagcggagattatccctccgacgaattgaattctttcagcagctatctggcttatcaatgttacctgatcaaccggaacgaggatgaagaagatcctaatttcggctactatcactctatcctccataatggagaaattgtggcccagaccaaacgcatgaaagaagacggtaaccagggagaatatgctttttctttcggtaccaattataaagacaaattgtacctgggattgaccatcggtattcagtccatctggtataaaatgcattccgggtatacggaagctccctccgaaaattcacccagtggattagattattatacttattatgaatataagaaaatgaatggagtgggtaccaatctgaaattcggtgtaatttatcgtcctatcccggaaatccggttaggagctgccatccataccccgacctggtacaatatgaattacagcatggccacttcgatatactcgtctttctatacgtcacaagatccgtcaaatggcagagagggctacgagttcgatttttacagtccggactattcgatagactttaatatgcgtaccccctggcgggctatgttaagcatggccacggtactcaaccaaaaggctatcgtcagtgtcgattacgaatatgtcaattaccagaatgccaatatcagcgagattgaagacgattataacggttctatggaacaaaccaccaaccaggacatcgaagattatcttcgtgctacccataatttcagggttggtgccgaatatcgtttcaacagtctgttcagcctgcgggccggttatgcattctgggattccccctaccacaacgaaactcataaaaattataaccgcattcaggcttttactgcaggagccggcctcaatttcggtatgttctattgtgatgcagcatttattcataagttctcggagaatgaaaccgtattttattcctactacgacattcaagccgaacctgtaaaaaacaaatacctaagtaatgaagcccgaatcacgttgggaatcagattctaaaaacaagatcaaagcgcttttaagcaacaagggttacagcggttagaattaacatctgtaaccctcggtattttcgatactgtctggaagtcagacaggaacaatattcctttcgaaagttttacaataccgatattattaccggaaggataaattaattctttttctgaaataaaaggaagtggtttattcagctaatatatacttgttcatcatgtgatatgcggaaaatgattaattttgtaactgccaaatgaaagaactcaaatgatatggtattacataattccctattccgttcaggaaccatttacgatgtccccgatattatcggacttatagaacgccgtattgaatggatggattgtaacggtataaatcaatggaataaaagccattatcgtgaacgttatcctgacggttattatattcaggctgctgaaaaaggattgctgtatgtattgactgctaaagacagcaatcggattatagcaggtgctgtattgttaacgcaagatgtccgttggggacaatcgaatggcaaagcatattatgttcataaccttgtagctgctatcggagaaaagaatgccggaaaagagattctccaacgaatagaggagtatacacgattgcagggtatgcactttgtgaggctcgattgtatagtaggcaatcaaaaactgaattcatggtatgaaaaattagggtatgaatatgttagaacgataacagatggagaatatcagggcaatttgagagaaaaaaagctacaagtatcgacaacgtaattttggttgctggcgaacaatctgtcacttcatcagagctatgcgcctttcccatatgtaaaactaccattgtttcatcacacgattatttgataaacccttgttttctcgccccgaagatcatagcagcaacccatatgattacccccaaaccattcaccatatccgatattgtagtgcataaattcaaagttttgaatccggaagagacggctgctgtaaatgtataatagggaaagatttaccgaaagaatcaaattcatcccgtcctataaccttataacccatatgcaaataaaatcggtaagcctgtgtgttatcttcattaacattccatctaaaacttgccaacactcacaagaagcaatcatttccccgcttcctactgacccttacggtagatggcaacaaagcggttagcgatattgatgagtttctgccgggcgttaggatcacttacatcatcaaaactccagttgggaaattcgccacgcatcttggagaaacgcttggagatgacactggcattggtcaggtcggaaggcaatttcagctgctctgtaagatacttgcagaaagatgcgccattatcaaatttgccttcaaaatctttgatatcagagagcgccaccataatcagggcatagtctttcttcaaaggaatagccttctcgtctatcatcttctgcaaggctcgctttactctttctccctggctcaagtcgccccatttcctctcattatcttcttccgttttttcctgcccgccgttttcctgatgctcatcgtctgtcacttccaattccaatgccctctgcggttcaggctcgaatccgtgcagataatcttcatcattgttctggcgcatcagttcattgatctgagatgaaacgaagaaaccatcctcgccataataaccgattttggctgccagctgttcaaccacatcccggttcttctccagcgattccaggcatcggttagaaaactcataagccacataacctctccattgcgccataatcattaccgaaaattgagacaatttcgactccaaaggcatcatctgaagtatcacagctgccatatacaggatgacaaatacgattctctgccgctcgtcctgagctgtagcatactcatcctcgtcaacatagtttttttcatattgccctattccttccacaaaggccaggcggctctccgtatcggtatgcgaaaacatcattttgtctacgatgcagaatacctcataaaaaacatcctcgcatgaacatctggacgtaggaaaccaagtcttgtcattgaaaatgtcatgagattctgtggatgaacatctcggttaataaatcctgagatattcatcacacagaatttgggtattgcattttagaggttgatttgaaaaccaatacttttctaaaaacgattaatctcatcctcagcagaaccgcttccgttgtatttatctttgaaactattgaagttgtaactaatggaagctatgatgcagcgattgaagttattcacctttctgttctgcaccacaaaattaaccctctttacatcgttcaacttcgagctatcaaacaagtcctctgctttcaatgttatcgtcaatttctttttaagtagggatattcagtaaatgtccctaaaaagtaagatggcatataaagttgatagagtataatcacttt

SEQ ID NO: 6167 - DNA, 223 bp, Unknown
  gut microbiota DNA sequence
ggtacatggaagagtggcaattcaacaagacttattcagggacaccgcaaggtggtatcataagccctattttggcaaacatatacctagacaagttcgataagtacatggatgaatatgccaacaaattcaataaagggacagcaagaagccgcaacaaggatatttgcaaactcaacagcagagtacactacctaaaacgtaggataaatgaagtagagga

SEQ ID NO: 6168 - DNA, 195 bp, Unknown
  gut microbiota DNA sequence
aaatgcgcgtacacggcctcgcacagggtaaaggtgccccagtcggacgagtagccgatcttcttctgcgcgtcgaccagactggtgatcttgatcggcgcgttgatgatgccggccttgccgaagtcgcgcacgaggttgacgggtgccgtgccgatatagaccggcgtggtgcccgcctgcacggcgctctgt

SEQ ID NO: 6169 - DNA, 177 bp, Unknown
  gut microbiota DNA sequence
aatgctcaagcgtcgtatgatcaggcttcttgaaaagctcctcatacagagggatgagattcatcgagagtacggaaccttactccgctatacccaggattaccagaaacgtctttccatcatcagaaaggttcttgtacaggaaaaggaaatgtttgtagggaagaaggtcaggga

SEQ ID NO: 6170 - DNA, 792 bp, Unknown
  gut microbiota DNA sequence
ccaagaactggtctgtaagttgtgagaatattgtctcaatcctctttcttgcctttgcaaacggaatgaatgtcggcttccagtccttctggttgagccgatacggacactccagtcttatgtgtgcggtttcgaacaagtcaagctgtacatcagctccaatataccctttgtcgccatagatgctacagtcgtgataagcatgtttcacatccttcatataatggagatcagccgcacttgcctttgagagatcataggaatggataactccacataaccaacagagagcgtgtaacttataaccaaaataatacgtgttctgcgaagcgcagaaaccgaagtctggagcttgcgagaaatcaccggtacgtcccatcttgcatcgtttccctcttgcaaccctacagacctctattggcttggagtcaacaaagaattgttcctctccaccatccatttccatggcaacccttttgcgcagttcctcacacaagcctgcagttttcttcctgcggtcattgaactgtctccttgatatgagattgggaatgcagtccttgtactcttgcaatttatagtcgaacaaccacttctcactatcaatgctctctgtctctgctgtcagggacagtgccactacttccaagtcagaaaacttaggaacaggaccacggcgtggaacattacccgattcattgacgagattttcagagaattgcttgcatatctcaagtattttgacgaattttgtataaaggttgtacatacgatggtttgaacttaatgttt

SEQ ID NO: 6171 - DNA, 6801 bp, Unknown
  gut microbiota DNA sequence
tgcggctgcaaagatagaacaattaatgccccatttccaaattttttacacactttttttcaaaaaaatgaacaaccactacacaatacattcattatcaaactattatatttatcttattttattccaaatttccatcggttcacgctatttatggttattcatattaatcgaatagattatatatatcgtatttcgaccagaataccaaccttctttccatcaaggcataaaaaatcgtgcaaacctactatttgcacgattcccttcgaatcttcagattcgtttacttcacccccttcacctcttcgaatcctttaccgaacactcccatcacgggagccatcgtcataaacacatccggatcgatctgcttggcaatgcgcaatacatcggaagcttcgtgtttacgggcgacaatcaggataattttcttatcttgtccggtgtaccaacctttagcatcgatcagagtcacaccccgatgtacctgattcgtcagctcacgggccacttcatcatatttatcagtaaagataaaaagctgggccgactgtgtttttccggtcaatacataatccacggtaaaagaaacgattcccatcatgacataaccgtatatcaatccaccgaaggcttcccgatcgacatggtcgtatatcagcaaagtcatcgcaatgacacagaaatcacataccatcaatacccgccccggactgacattgtggtatttggtcaccaacatcgcaatgatatccgtacctccggtacttccaccaacagagagcgatacgccgataccgataccggtcagcattgcagcgataatggtactcataaatttctcgtcgggtaaaataccgtccacaggcatcaagggctgcataatacccaggaacacactcccgacaatgatagcgaaaatggttttgataccgaatttcggtcccaataccttcatcgcaataatcagcaacaggatattcaccaaaaaataaccgatacctaccggaattttgaacaaatagaataatacagtagcaatacctgtagctccaccaccgacaatcttatgaggcaccaggaaacctgttgcggcaaaagcataaatcaacataccgaatgagatgatcaggtatggtttcatctcattccaaatgcttttattcttcatttatttattcattttttgccaggtatctttgagcgatacggtacgattgattactaattgtccatccgttgaatcgggatctacacaaaaatatcccaaccgctggaactgaaaacgatctccaggtttagcccgtctcatcgaggattccaacttacatcctttaagtactctcagtgaatcttcattgataaactccttaaaatcgacctccttgtgtcctgccggatcttcatccttaaacaaacgatcgtaaagacggacttcagcttcgatagcatccgttgctgccacccagtgcaaagtaccctttaccttccggttactggcctccgttccactaccacttcgggattccggatcataagtacaatggatcaaagtgatatttccaccggcatctttatcgacccctgtacatttaataatataagcacctttcaggcgtacttcctgtcccggagtaaggcggaaaaatttcttcggcgcatcttccataaaatcgtctcgttcgatgaaaagttccctggcaaaagccaccttacgcactccggcattcacatcttccggattattctcgatttccatatattccgtctctccctcaggataattatcgatgaccactttcaccggatcgagcactgccatcacccgaggagccgtcttattcaaatgttcacggacacaatattccagcaacgccatatccacgacgatttcccgccgggccactcccaccttttcagcaaacatccgaatagattcgggggtataaccacgccggcgcaatccgcaaatagtcggcattcggggatcgtcccaaccggaaacatactttttctgtaccaattccaacaaacgccgtttactcatcactgtataattcaggttgcgacgggcgaattcaatttgccgtggccggtactcggtcgttgtcaactgatccagaaaccaattgtaaagcggccgatgaatctcaaattccaacgtacagatcgaatgagtgattccttcgagatagtcactttgtccatgagtaaagtcgtacatcggatagatgcaccaccgatcaccggtccgatgatggctacagtagataatccggtacatgatcgggtcacgcatcaacatattggcagcagccatatcgatcttagccctcaacacccggctaccttccgggaactctccatttttcatccgccggaataaatccagattttcttctaccgaacgatcccggtaagggctattcactcccggttcggtaattgtttttctcccggcactgatttcttctgctgtctgatcgtcaacataagccttcccctccaggatcatctgttcggcccaatcatacagctgctggaaataatcggaagcatacctgaccggtccgtcccattgaaatcccagccattttatatcctcctgaattgcatctgtaaattccacatcctctttagaaggattggtatcatcgaaacgcaaattacacgctccattatattttgcagccaacccgaaattgagacatattgaagtagcatgtccgatatgtaaatatccattcggctccggcgggaaacgggtatgtacttttcccccgtttttaccggcagcaatttcctcttcaataatctgttcaataaaattcaaggtcttaccttcttctggttctacaatcatttgatttttatccatagtattaaaactttcccggaaaaaacatttttccaagggacaaaagtaagtaatttatgagagttttaaaagtttacgtatatttgcagcgatgaaaaaatttatctgcataatactattcgcatcattgcatttgttttgtcgtgcacaaaacgtattcgatacagaaatccctccggatatggagggtagcaactcttcattatcttccgattctataccggaatccaatgtgcctcatttccgtcatacctggcaatgggaaaggaacggagtatataaaagagaggttgctctggatacgctgatggacggtattcagaatttcaataccatttttaaaaagaatatttcgaacacttatctgggtaattttccctctccttatctttccaatatttttattacgcgcgaaacggttcaggatttttaccctctgactcaaatccgggctttcctttttaagcccgaagacgctttacttttcaatacgacaacccctttcacccgattgaaatattttacgggaggaggaaaagggaaagccgaaaacctgctggacgtatggcatgtacaaaatatccgcccctggtggaatgccggtattcgttaccagctgatttccagcgacggtcgttatatgaaccaaaaagccaaagcgtatcatttttctttgttctcgtcctatgagaaagaacgaatcgccctctcttttttcttaaaccagaataatgggcattttgcagaaaacggtggtgtcaaggacatctcttttatcatcgactccaccaatcaaaaagctgaaaatataccggtaaacctgagcagcaacgatatttccaacaattaccggaacaccaattttcaattacagggccagtacaatatcggtaatcccaaagaagtaactactcccacggatacttttaccacttatccggctaaagccatcatcaacatccgggccgaaggaaacgaacgcagatacaaagaaggcaacattgctttcgacttctttccgcatacctatatagacagtacttctacgacggatctgatcacgaaccaggtgtacgatatctccactaaatttgtcatgaacgaacatccgaagtacaaatatttgccgggtatatatgccggtctggattttaaacacgaaaactaccggcagcggacagctttcgattcgatttcccataccgagagtttcggccatacccgctattcagggacttacattacagccggaattttcaatgtagacacgaatgtatcgttcacttacgatattgccggaaagctatgtgtattggggcactatgccgggaatttcaaattcgacggctacgtacagcaagctttgcgtaaagacagaagttcatacatccgggccaatgcgacgatcgaattacaaagtgtaaatccgttcttcgatcgctatgtcggaaatcacgatatctgggaaaatgattttaaagccatcaaaaccatcaaagccgacggacgctatgtgaataaccgtttgcgaaccgaattaggagtcggtatcgccaatattttcagttacgtctatttcgatacggcagcgatgccccaacagaccagtaagaccttgatggtattgaccgcctggggaaagcaaaatttcagattaggcaatttctacttcgaccagaccgtatattttcaaaaaagtacccaggaagatatcctttccctaccggccatttctgtatattcccataactattttcagcatgccttatttaaaaatgccttgtttttacagacaggaatcgacgtcttttacaacacaaaattttacgccgacaattacatgccttctattatgcagttttataaccagcgggaaagaaaaaccggtaattatccgaagctcgatgtcttccttaacctaaggatcaaacgggccgatatctttgtcaaatacgaacacatcaactatctgctaaaaaatcacggagactttttcagtgccgccgattatccgatcaacccgggtatgctcaaattcggtattaagtgggactttttcgattaagaaacatttactatctttgttgaatgacaatctctaaaattgccgtttatattaccctttttctttgctttgcatgtgagtcaggtaaagaggttactccggaaatcatattaccggaaccttcatcgctggaaaaaattctgacgcgggggagtctggagatttccactttttataatacgaccgactattacgtataccgtggtattacgcggggatttcattacgatctggcccgggattttgccggttacctgggagtcaatctccgaattgtcgaagttaacaacgatatagatacggctatcggccggctacagagcggcaaatacgacctcttagccgtcagtctgacccaaaccccggaaaggaatgaacagctccgtttcagtaaacctcttttccaaacccgggaagtactcgtgcagaacaaaaatagccaacccatcaaagatatggctcaattagacgggaaagagatttatattcccaaaagtgccacctcgtataaaaaggttctgcaacaaatacaggattctctgaatatacacatttatatcaccgagatcgagcattattcctatgaagatctcttgcacctggtagagaccggcgaaatcaattataccgttatcgacgaaaacatcgcccaagcctccagttattctatgaagaacctggatatagctctcaagttaaaagaagatatttccgtatcgtgggcgacccattcggatgccagtttattgagctcggaaatcaacaactggctggaagaaatccggaaaaacggaaaactcaactacctctataaacgttatttcggcaaacatccggcagttcctcacaacacgaccaaatacacactcatcaagaaaggcgatatttcaccgttcgacaagttattccgcaaagagagtaaaaagctcggctgggactggcgtttgctggcagctttggtctataccgaatctcaattcgatccttatgccgaatcggaagtcggagcctacggtttaatgcagattattcctgaaacagccgatcattttaacgtcggaaattatttcgagcccgacagtaatgtctatgtcggaaccgaatatttacattacctggaccgttacttttcaagccagccgatcgattcttccgaacggctcaaattcgttctggccgcctataatgcaggtcccggacacgtactggacgccatccgcctagccaacaaatatgggaaagacgccactttatgggataataacgtcgattactatctgcttcacaaaaacgaaccggaatattaccgggatcccctgtctaaaaacggctattgtaacggccgtcaaacgtacaaatacgtacgacaagtgctcgagacctataataactataagaatatcaagcaatagtataaaaatactaaaaaacgtatttacgaatattggtttgatcgttttttttccataccttcgcagtagtgtattatatcgttcattaaaagtttaagctcatgccttacagaagattacctaatacagatgcagcgagaataagggcattaaaagcagctttgaagaaaggccagtatctcgagatcgatacgatagcctatccttttgctttgaaacaaaaaatagaattctttttacctaaatttgaagttgctatcaccaactctaagttagcgaaagagaaacagttcgataatagtcaaaaattctctgaatataccaaaaaagcccggctttatatctctcattttattcaggtattgaatttttgtattgcccgtggagagctgaaaccctcagcccgtacattttatggtttggacgaaaacagttcgaaagtt

SEQ ID NO: 6172 - DNA, 33080 bp, Unknown
  gut microbiota DNA sequence
tcttttgaccgaacaggatttgctgcaatggggggaaaaaataattgccggcgagcagaaccggatcagtaacggtggtggtaatccgatctactgtccttcgattgccctggtaaaagtcaattatgaaaatttcaaagaaaactatacccgccaaaaacagttccagaataattcagcccgggaaagcgggaatgtcgctcaataccggaatgatgccgatgccttgatcctggaagtatggaacgaagtggaacgttatttcgaaggggtaaaagacgaagaagaaaagcgctatatgtgcgaggagtacggtctcgtttacgtattccgacgcggcgaaaaagaacggatcagaagacgaaaagaagctgaaagcattaccttgaagcttttctgactccaagaccgactgctaagaggaacaacagcttcctcttttctttttcaccggcttacgggcacagctgtctttcaaaggacaagtgtcacaagtactgcatgattcgtcctttttcaaagccttcagtttcctgtagcagaatcgtatcgcccccactaaagcaacaacgataatcagatatacaataccgttttgtatcaaagcattcttttttctaaaataaacttcctatctgatatacgccgaacgacaccaaccaggccagcccggtagtataaaaaatagtaaacaatgcccatttccaccccgcctctttacgaatagcagcgatcacagccatacaagggaaataaatcaggataaacagcataaatccataagccactaaaggcgtaaataccttctgtccgttactatattgttgctgttgcaggctctcgatcaggctttgggaattttcctcggcatccgggacatggtacaaaattcccatagaactcactacaatctctttggcagccaatccggtcacaatactcacgcccatcttccagtcgaatcccaaaggccgaattaccggttcgatggctttcccgatttgtccgatatatgaattctccaaatgttccgtctcatcggccatagtcgtccggtttaaagggaaataccccagtgcccaaatcagaatagaagcaaataagattatcgtacccattttctttaaatattgtccggcttttccccacatatggatcgtggtatttcgcatcgtaggcatccggtaaggaggcaattccatgacaaaaggatccgaagatttggcgaacagggtcttcttcaacaaaaaagaagttccgatagccagtaatatgccgatcagatatacagacaataggatcaagccctgattcaccggaaagaaggcagataccaacagtatatataccggtaaacgggcactacaagacataaaaggagtaatcagcatcgtcataatccggtccctccggctttccaaagtgcgggtagccataatggccggtacattacatccgaaaccgatcaacaagggaataaaggattttccgtgaagtcctatcttatgcatcatccggtccataataaaggcagcccttgccatatagcctgtatcctccatcaaagaaatgaaaaagaaaagaatcagaatattgggtaagaaaacgatcactccccccactccggcaataactccattcaccaacaaatcgttcaaaggcccttcaggcataattccggccacccaacttccgagggcttctactcccgcctcgatccagtccatcggataacttcccagcgaaaaggtcgcctgaaacatcagccacataaagaaaatcaggaaagggaagcccagccattgatgagtcagtaaggcatcgatagcagtcgtcagctgacgtttatccttttctcccgaccggaaggtctcttgtaaagctccccggataaacccatatttcaggttcgtgatgatcgtccgggtatcttccttatattctttttccaggcgctggatttctttttgtgctacttcgagcatacaagcataattgggaaccgttaccagctgttctttcataatccgatcatcctcgagtaatttgatagctacataccggggagcatattcatcggtaatatttttattcggggcgatctccactttaatccgggcaatcgcctcttcgatttctgtcccataattaatatgtacatgccgggattctttggcctggtcttcgaacacttcgataattttatccaacacggcttcgattccgatcccttttgaagctgtcgtcggcacaatcgggatacccagtagttgtcccaaatagccataatccaggtgagaaccttcgttggtcagttcatcgaacatattcaatgccatcaccacccggatattcatatcgatgagctgagtagtcaggaacaggttccgttccagacaagaagcatccacgacattcagcactaaatccggatgatgcttcgtaataaattcacgcacataaatttcttccggagtatattcggtaatagaataagtcccgggcaaatcgatcagattgatcgtataacctttatggtggcaagttccttgcttggcatccaccgtcactccgctataattccccactctttcgcgcaatccggtagcccggttaaagaaagaagtcttcccacaattcggattcccaaccaaagcgatattgatcgtccgggatttctcggaaatttcccgggcaatctcgtcttctgtaaacgtaccgttatatccttcctgatctatcgaggaagtacagacgacttcaatcaaacgagcctcactccgtctcagagaaatatggccatccatcaatttatattcgatcggatcgtgtaaaggagcattttttatcaccgtcactttttctcctcttacgaatcccatctccacgatccggtttcgaaaactcccatgtccatgcacctttacgatgacacattcttctccagtcggtatatcagcaagcttcaaataattattttccataccactccaaattatgtggcaaagataatcaatctgctaataaatcgacatacctacaaataggtattaaaattccggagcatataaataccccggaataatccccattttcattccacttcaattctccctcatattgcaggtttttcccattctgataagccaaagatcctttcttcagctcttctgtgtcatcaaaagaagtatcttccggcgacagaaaatcatccgattcatttatcgtctttgtaatcccgaaacgtccccggatttttaaagaagtcaaaggattatattcagcactaaaattattggttactccaaaagaacggtcaagtgcccggctattcaggttggcattccaaagcggattcggcgattcaatcagctcctctttatattccagccatttttccacccttccatccggcttcttttcataataaggatttgctttcgcatattctgaaaaagcaaccaccggatctccggaactggtatgattaatagtcagcttattactgaattgaaacttatttttccggtacagtaaatccagattcccgctgaaaactttcgtttcttttggtgggaatccgctaaaagaaaaatggacagatggcaattgagaattgacaattattggaagttccgcttccatgaaaaaataaaaaagaaaagaaaaaagagagaaagaataaagaagataattattgattatcagaagaataaaaaagaaactataggtttggagatacattatcaattgtcaaatgacaattgtcaattaccaaagtacccgcagaacccagggactttataaactttcgactgatttaaacgaacgttatttattttttctaaacagttttcccaatacctgcactaagccatccatgccctcgatgtagttgatcatcgagatacttctaaaagcactcatatcctcatccatacctaattgaaccgggtaaaccaatatacaattgatcgaattaaaatatttattgatataattcgggacatattccatatgccgggagtaagaaggacaattcggccgactcatcaccaatatcagggcatcgttatcctgtgtcgcagtagccacttccttaaaattactccaatctgtaaactctttaaattcagctaaaatcaggtgtttggattgtaccaaatgcaaaatatccagcacggccggtgtaccgtaaaaaacaattttcgttccgacatttttggccaggttccaaatactgatcaaccaatacggaaaaccgacctctttctctgcattttcaggaataacgacgatataacgtttcaccgtcgacatcggctgcataggacgataagccaaggtagtcgtagcacatttactgagcacctcttgtgtcagtttccccaggaaagtatcggaaatatccttttgggtacgcaggccgataacaatatccgtgatcttatgttctttggccacatttctaattccgttgacaatattcaagtcataacgtaaaacggtatccacccggtgatccattccggctccagtcttaacagctttctcaagcagacgttctgaaattttttccgctgccggatcggtattgtccgacttcacaatactcacagcaaccagttgtgccttattacgccgggactttatagcggttcccaaggtgatcagctcatcgactgtctcagaattactcaagggaatcaatatcctctcctcctcgtcatcactatcaccgatccggtcaccgctcatttccgccaaggctatattctgagcagaacgttgggtaataaaagaagcgatcgtacaagtaatcagaatcataacgatagttccgttcaggacgttttcattcaacaatcgaatcggctgcccatccggtccggtacccaaaatcacctcatacccgatcaatacggcagccagcgtagccgcagcctgggcattactcaatccgaaaatcagacgtccctcatcgcgggtcagtttaaaatttttctccgttatccaagctgccataaacttggatagagtggctataaccgtcatcacgacagcaacccaaagcgcagtccatccggcggcaaaagtgcgtacatcgaccagcattcccactccgatcagaaagaaaggaataaaaatagcattccctacaaaatcgatccggttcatcaaagctgaagtattcgggatcaaccggttcaaagccaaaccggccaaaaatgccccgataatagcctccaaccccgctgcttccgccagaaaagaggcaaaaaataccaaagccaacacaaagatatattgtcctacggaatcttcataacgcttgaaaaaccaacgccccagcatgggaaataagatcacgacaatactgataaaaaccagacttgaaacccccagtttaatccaaaactgttggtttatttctccggtagacataccgacaatcaccgccagtaccaacaaagcaagaatacaagtaatcaccgttcccccgatagcgatactaaccgcccgattcttggtaataccgtatttactgacaatagggtaagtaataagcgtgtgggaagcatacatactggccaacaaaatcgaagtcggccaggaaaaatcgagccaatatacaccggtcaaagtgcctacgatcatgggaatcagaaaagtataaagtccgaaagtcagggtttttccataattctttttcaggtcggccatatcgatctctaaaccggcgatgaacatgatatacaataaccccacggttccaaaaagctctatactactgtctctttccataatgcccacaccattggggccgatcacagcacctgcaataatcagaccgatcaaatcaggaatccttaaacgctgtaatagaacaggcgtcagtagaataataaacagtatcagagaaaaaatcaacaccggatttttcagcggcaaactaaacacttgtaagagcataggcaacggttttatcagcatgacaaatttaataaaaatgcagtaataaaaatccctttcctccgctttgttcttgcggtctatagtagttttttttcgaaacttttaataattagtaatacagaaagtttataatttagcgttattgtatcaattttcattaaaatattcacttgaaatttttatgattatgtgtgctaaattcttttacatcctgatcgtactgatggcgggactatttcccttcaaaatgcaagcctcagaaaccaaacaaactttcattctttacactccttacactaaaatctctgttccacccggagaatctatcagttacagtatcgatgtcatcaacaatagtgacgaagttaaaaatgccacccttgccttagccggtctaccgaagagctggagctatgaaatgaaagccggtggctggacactggatgagatcgctgtactccccggtgaaaaaaagaattttaccttgaaagtagatgtacctctaaaagtaaataaaggcacttaccatttcacgatcggtgcagacggacttgcccgcctgcctcttgccataacggtctcgaaacaagggacctaccggacagagtttactactactcaaccgaatatgcaaggaaattcaaaatcgacgttcactttcaacgccacattgaaaaaccaaactgcagaacaacaattatatgctctcatggcagaagcccccagaggctggaatgtcattttcaaagccaactataaacaagccacttcggcacaggttgccccgaatgccagcgaaaatatttcggtcgacatcacagctccttcgaatgtcaaggccggtacatacaaaatacctgtcatcgctactaccggctccacttctgcccaactcgagtttgaagtggttatcaccggatcgtaccgtattgaattaaccaccccccaaggtctcttgagtaaagatatcactgcaggtgacacccggaaactcgaactagtcgtcctcaacaccggttctgccgaattaaaggacatccagttgtccgctaacaaaccgatcgattgggaggtcagtttcgaaccgtccaaactggatcgtctggctcccggagataaagcgaatgttacagctgtcctcaaagcttcccgtcaagctctccccggagattatgtgactaaaatcactgctcgtgcaccggaagccgatacaaccaccgatttcagaatatctgtcaaaacccctatgatcaccggctggattggtgtcgttgtcatcctggctgctttaggtgccgtttactatctgtttcgcaaatacggaaggaggtaggctatgtgtgaaagcgttatcgaattggttcagttaacaaagcgatacggtcatttcacagcagtcgaccgattggacctaaaaattcacaaaggtgaaatcttcgggcttttaggaccgaacggagccggtaaatcgacaacgatcctgatgatgctgggcttgaccgatccgacttccggcactgtgcatgtttgtggtaccaactctacgacttatccggtcgaggtcagaaaaaaggtaggctatctacccgaagatgtcggtttctacgacgacatgacagggcctgaaaacttattatataccgcccggctgaataatatcccggaacaagaagcccggcagcatgcagcccagctcctcgaacgggtagggcttggcagggaaatcgataaaaagaccggtaaatactcccggggaatgcgccagcgtctgggcttggcagatgtactcatcaaaaatccggaagtgattattttggatgaacccacctcggggatcgatccggcaggcgtacaggaattcatcagtctgatccggcaattacgggacgaaagaggactgaccgtactgttctcttcccatcacctggaccaggtacaacaaatctgtgaccgggtgggtttattctctcaaggccggctactggctgatctctcactcaacgatctgcaacaggaagaacatggattagaatacatttataaccaatatttcggaggaggacaaggtcatgaataaatatcacagtcccttttggacaattgtccgcaaagaagtcgccgatcacgtcagaagctggagattccttatcctgataggtattatcgcactaacgtgtatgggatcgctctataccgccctaaccaacatcggagcagcgataaaacccaatgatccggacggttcgtttctttttctcaagctgttcacggtcagcgacggaactttaccttctttcacggttttcgtcagttttctcggtccgctgttaggaatcgctttaggcttcgacgccatcaattcggagcagaataaaggaaccttaagccgtattttatcgcagcccattcaccgggattatttgatcaatgccaaatttgtaggtgctttgatcgtcatcggagtcatgcttttcgttctgggatttctggtgatgggcttcgggctgatcagcataggtattcctccaactgcagaagaatttttacgggtcatcgtttttatcctgatcagtatctgttatgtggctttctggctgaatctttcgatcttcttttcgatcaaattccgtcaggctgcaacttccgccctggcttgtgtcgccatctggttgttcttcagtattttctataatatgattatcaacctgatcggtaaagccatcagtccatcggaaatggctaccacctatcaaatgatcggttatcaacggtttatgctcaatttattgcgctttgctcccagtatgcttttcaacgaagccacaaccactttgttgatgccttctgtccgtagtctgggaccgttgacgatggaacaggtacatggggcaatccctagtcctttgcctctaggccaaagcctgctgatcgtatggcctcaacttacaggcctcatcgcagcaacggtcatttgtttcgctttgtcttacggttcttttatgcggaaagaaatccggtccagataaaaaaagagccttacggctcttttttaatcttcatatctgataatcgtctgctcacggtcgggacctaccgagacaatcttcaccggtactcccagctcctcttctaaaaagctgacataagcattgaattcttccggaaattcatcttccgaagtcatttgggtcatatctgttttccatcccggtatttccacgtatacaggttcgactccgtcacaaatatcgaacggaaattcatcggtctcctctccatttattttataagcgacacaagctttaatcgtatcgaagctgtccaatacatcactcttcatcatgatcaactgactaaccccattgatcatcacagcatatttcaaagccacgagatcgatccagccacaacggcgtttccggccggtaacagctccgaactcgtgtcccaaagcacacaacttctctccggtttcgtcgaataattctgtcgggaaaggaccggcacccacacgggtacaataggctttgaaaattccgtaaacttcaccgatatttcccggagcgactcccaaaccggtacaagctccggcacaaatagtattcgacgaagtcacaaaaggataagagccgaaatccacatccagcatcgttccttgtgccccttcggcaagtacggatttaccctcttccagcaaattattgataacgtgctcactatcgatcagctgaaaacgcttcaggtaggcgatcgcttcgaaccattctttttccagttccgtgatatcgtatcgataattcaaggctttcagaatggcttcatgctttttcttagcagccgcatacttgtcttcaaaatgatacaacacatcccctactctcaacccattacggctcactttatccgtataagtcggcccgatccccttaccggtcgttccgattttcgcatctcctttagcagcttcataagcagcatccagcacccggtgagtaggcaggatcagatgtgctttcttggatatacacaattgtttggtcagatcatgtccactggcagctaaactctcagcctcctgacgaaacagaaccggatccagtacaactccattcccgataatattctttttcccaccctgaaatatcccggaagggatagaacgcaatacatatttttgcccttcgaattctaaggtatgtccggcattcggaccgccctgaaaacgggtcacgacatcatatttcggtgttaatacatcaaccacttttcctttcccttcatctccccattgcaatccaagtaaaacatcaactttcatctgtatctttatttattcgtttacagtaattctttctccaaaacttcccgtcggatttcgggaaacacaaacgtgcaaaagtaaacatttttttctattgtaaacagaaaaaaacgctaaaatcactcactctcccgacaggccttacacaatccataaatatacaaaaggtggtgatgcacagaaaattggtatttatcttcaatatgttcgacgacctcgttgatccgggaatcggcaaactcctccactttaccacatttctgacaaatcagatgttcgtggtaacggttgttaaaagctttctcaaactgggcgatattattcccgaactgatgtttgatcaccaacttacaatccaaaagcaactctatggtattgtataaagtagcccgactcacccgataatttttattcttcataaaaacatacagggattcgatatcgaaatgtcctgtatgcgaatagatctcatccaggatagcatatctttccggagtcttccggtgtcctttttgttgcaaataagttgtaaaaatctcttttacagtttcttttattttctccatatttgaacaactttcgtcaaccatcttttccatcctcattcttttttctctcttcctatctatttctcactctaatcttcacctctctttttctctcctccttccatctatcatctcttatctttcctcattctccaccctcatcacgctttctaccccttgtatctgggatatacgggaaactatattattcaagtcggctgtattatgtacatacagatgaatgaatccttcaaaaataccgtcccgggtatcgaaatgaatcattcgcatattcaccttcccttcttttgcgatcagggcggtgatatcgctgacaatccccggtttatcgattcctgtcatttttatcactgtcaggaaagacatcaatttatggctcacccatttaatcgggacaatcttatctccaaagctggccatcaagcggatcgcttcgggacaagaacgcttgtgaaccgtaaccttcgtacctgcaatattcataccaaccacgtcgtctcccggaatcggattacagcaaggagcgatcacgaaatccgaattgacatccagctggacatcgttgtcgttcttctttttttcctctccgtctttcccattccataagaactggagtttccagtattttataaatttattttccgctttcttcttgagtactttttcaagatctccttccgtaatgatatttttagcgagctcgacatacaaatcgtccttattggtcaggttgtaatcggtcagaactttcttcaatggctcggaggtaggcggtaaatccaattttttcacaacagcctcgaagatcgtgataccggtccggatctgttctttcctatacttcttaaaggtggcgttgatatgcgtccgggctttcgccgtcaccacaaaatccagccactccctttgaggtttctgtttatcgctcgtcaaaatctccacctggtctccactcgtcagtttatggctcatcggcaccagcttatgattcactttcgctccgatacaggtatttccgatttcagtatggatatcataagcaaaatcaagtgccgtagctcccttaggcaaggtacgcatatatcctttaggcgtaaatacccggatttcctttgcgaataagttcagtttaaattcgtcgaggaactccagcgcactggcatccggctgatcgagaatctccttaattcccgccagccatttatccaactccgaactttcgccttcatttttatatttccaatgggcagctaaccctttctctgcaatctcatccatacgttccgaacggatctgcacttcgaaccattgtccttcaggtcccataaccgtcaagtgcaaagcttcgtatccattggctttaggcacactcacccagtcgcgaatccgctcgggcttgggactataaatgtctgtaatcaaagaataaatattccagcactgccatttttcaggctgatctgctttgggtttaaacacaatccgtacggccagcaggtcgtagatttcatcgaaactgatattccgtctctgcattttcagccagaccgaatacacactcttcgtacgggcggtgatggtatattcgtagtggttctcgctcagacttttacgtatcggcttgataaattcttcaaagagtgccgaaaattgtttctcgtaagcttcgatctttttatcgataacctcatattcttcgggatgttcgtatttcatactgaggtcttcgagctcggttttgatggcatgtaatcccatgcggtgagccaaaggggcatagatatacagggtctcgctcgcaatcttcacttgcttatgctcgggcatagaagccagcgtacgcatattgtgcaaacggtcggcaatcttgatcaggatcacccggacatcgtcggccagcgtcaggatcatctttcggaaactctcggcctgccggctggtatccgatcccatgaccccactaattttggtcaggccatcgactatagaagccactttcggcccgaataaattagcgatatcttcaactgtataatcggtatcttccaccacatcatgcaacaaagcagagatgacagaagtcgtccccaaaccgatctctttcacagcaattttagcaacagccaaaggatgaagaatataaggttctccggaccttctcttcacacctttatgagcttcattggcaaattcgaaagcttctttgattttttgtctgttctctttagaagtctcttttcgtaacgatttcaataaatcttcaaaagcttctttaatctgttcttgttctgtcatagatattagctgcctccgacaacgatactaattgttttgcacgacatttaatcttccaaccgataccttgtcaaagatagtgaaaggcaagagcaaaaacaacaaacttgtttgatgattttaccgagccgcatcctatcttatccaaagatataaaaaaataattgagatactgctaaaagatttcaacttaacacataaaaattctttgtgaactaatttcttccttcaaaaataaaccggccatccgatcgaacaattctgttttttcagtggttaaataacttcgcctgctgtccttacccaatctccggtcgatctcaggatgccgtttcaaatagtcggccagactcccggcaacgatttgtccctgtccgataattttcacccgtgaaggaacaaaacgggcgatcagcggccgtaataacggataatgtgtacatcccaggataatcgtatcgatttcaggatcggtacccaacagttcctgaatgtatttccggacgaaatagatcgccccttctccatccagttcgttattttcaactaacggtacccacatcggacacgccagctgggtaatccggaacctctcttcaccatataatttcccgacttctatcggataagatccggatgctacggttccccgggtagccagaatcccgacatgcccgttttgcgaataggtattcagcgcttctacgctgggacggataacccccaatacccgtttttcgggatcccattgcggtaagtccacttgctgtatagtccgcaacgcctttgccgatgccgtattacaagccaggatcaccaagcggcactccatttcgaaaagtttatgaacagcctcccgcgtatattcgtagaccacctcaaaagaacgggcaccgtaaggggccctggcattatcccccagatacacataattatactccggtaatttccggacaatttcttttaaaatagtcagccctccgtagccggaatcaaatacgccgatactctctttgtgttgctccatatccttgaatcagaaacgacaaaagccgcctatcccaggcggctttttatccttttacactccttattgcaatcctaattttttctttaccaacggcaggacatcctgtgaattttcagcggcatacaggataccggcattcatgtcgaagatataagtaaacccattttctttacctacttccttgatcgcgttcaatgctttttccattacaggctgcatcagatcattttgtgttttttccagttgagccatagccgtttcctgaaaacgttggattctttgctgcaatccttgcaattcttcttctgttgtagcccgcatagcctctgaataagtcttcattttttcagaatattcggctaatttagtctggaattgttctctcaaaccattcaactctgtatttacttttttctgttcctcttcgaaagtcttttgagcggcagtccattccggcatagcctgaatcaacttctgagtttcaatgtggcccagttttacctgtgcagaaacactcattgcagccaatgtcaaagctacaagtacaaacactttaatggtatttttcatcatttttctggtttataaatattatcattaaattatctaactcttccggatctgtttcattcagacgaccggtttattcttctttctttttgacgctataccccaatttccgcaatacgacattgcttttatcgagtttcgggtcgaaatagacaactgaattatcggcggcaacatcgataatcataccaaaatttccttctttagcgacatctttaatgaccgctaaaacttcgtcctgcaaaggtttcaccagttcttcgcgctttgcgaacagataaccgtcggtgccgaaatattgttgctgcaacaaacgggctttattctctttcgctgcaatttctttctcccggtcttcgcgcatcgaaggagtcagaaacactttatcggcattatatctggattgcatttctgctatttccgcgtataccgcatcgatatcggcctgcaacttctgcgaataatcgtccagttcctgctgggcttttgcataatcggggatacagctgaaaatatattccatattcacgaaagcatagcgtgttccgctttgcgcctgtgcagtactccatatgcaagacaaaaataataaaataaatccgtttttcaatttaaaatgtcctatcataaatcgtaaaccgcaaatccattttagaattcctgtcctaatacgaagtggatctgtgaaccggcagctcccggacgtcccggtacagagtcgaatccatacccccagtcgatacctaacaacccgaacatcggcaggaatacacgcagaccgacaccggcagaccgatacaggttgaacggttcgaaatctttcagttcataccatgagttaccggcttccataaacgccagcgcatagatcgtcgccgactgtgccagcgaaatcggataacgcaactccatggtcagcttggaatacaagctggcatcggaagcattcggagcgataaagctagagcctgcatttgtcagagaaccgttttcatatcctctcaaaccgatatattcacgtccgtaaaggctatatcccgacataccgtcaccccccatttcgaatccttcgaacggcgaacgcttgtttttgtcgaagtgaccgaggtaaccgtactgtacccctgtatacaacacaaattttttatttttatccagaggcataaatacttttccctgaaatttccatttgtggaactcgatccaacggtatttatctttatctttaatattcggactggcataattcttatcggtaaaccaggaataaggcggcgtaaacgtcaatccgagggtaaagtcggaaccttcacgggtatacaacggattatcgatagagcttcttctcaattgtactgcaaaagacaggttgttcgaatttccttcggaaaaaatataataaggccagtttttcaaggtataccgctgataggaagcctcggtatataaggtaaagaaatcatccggccaggtaatccgtcgtcccaatccggcactcaacccgaaagtggtcatcaactgatcggtatcatacatgtctttggcactatttccggcataataggagttataataactacggctataaccggtctgacgggaataataagccgacacactcaatgaattcggttttttacctcccagccagggctcccggaaagaaacactgaaagaggtataatattttccattggtctgtgctttcaaactcaaagtctggccatcaccctgaggcaaaggacgatatgactcccaattaaaaatattcctcatagagaaattggtgaaagtcaatccgacagaaccgataatcataccggccccccaacctccggagatctcgatcttatcatttgctttttcctctactttgtattccaggtctaccgttccggcttcctggttcggtagtggagtcggattgattttttcgggatcgaaatgtcccagattagccaattcccgtacactccggataacatcttcccggctgaacaattctcccggataagtatacaattcacgccggattacatgctcgtgagtacgatcgtttcctttgataattacccgatcgatcgtcgcctgtggtccttccaccatacgaatctcgacattgatcgaatcgttccccacaacagtctctaccggcatcgcccggaaaaacaggtaaccgttgttcaggtagaagtaattggctacagcatcttcatccgaattcaaacgcttatcgaaataactcttattatagacatcacctttcttaatattcaacaatcgggataatttatcggcatcgaccaccgtatttccgacccatgtaatatcattataataatacttgtttccttcttcgacgtcgatatagattttcacccgtttcggactttcctgtacaacgctgtcggcgataatagcggcatcccggtaaccgagttcgttatatttatcgagcaggttatatttatcgtcttcataactctcctgaatatattttgccgatttaaagaaattcctcaacgacttttctttggttttcttcatcgctcccttcagcttgctgtcacgcactttttcgtttccggtgataaacacatcgctgatcttgattttattcttccgttcgactgtcgcatccaaatacacaaaattcggtctttcagggtcatcccgctgtaaaaccttcacagagatattgtagtatcctttttctttaaaatatttttcgatgatgcgctgtacaccggcgatcatattatcggttacctggcttccgggtaactgattgattttctctttaattttactttcttccgattttttgagtccgatatagttaatcgcagacaaacggtgacgttctgccagattaataatcaggaatactttctgtccttctacccggtcgacagagatcgtcacatcggaaaacaatccctggccatacaaacggcgtatcgctttcgttatcgcatcccccggtattttcacctcggaccccacacggagaccggtagccagaatcaatgtttcaggatcgtactgctcaccaataccggtgacctcaataccggcaatttcgtatgttttagggctcgaataataaatatcaggctgagataaagtatcagccgactgcgccataacacgacaaaagcagaaaaaaattattgaaagacaaagaattacttttctaaccatatatattcttttagctatccaagacagcgttaccagttacttttcagttacgtttatcccctctcccttttcacccttcacttttatctgttctccggtcattccaaaacgtctctcccgttgctgaaaattacggattgccaaatataaatcatctttttcaaaatcaggccaaaatttgtcgataaaataaaactccgtataggcacattgccataacaggaaattactcaaccggcattctccgcttgtacgaatcaataaatcaggatcaggcatccctgcagtagtcagataacgggcaaacaattcgtccgtaacctcctccgtatccgccactctcccggtcttataatcggctatcaacctccgggcagcttcgacaatttcccaacgggctccataacttaaagccagcaccaaggtcactcctgtatttgcagccgtcctgtgaatcagcccttccaacttatgccatacctcttccggcaaatcaccggtattcccgatcactttcacccgcactttctgccgcatcaattcggacgtttcgcggataatcgcatcggtcatcaaccccatcagcgcatcaacttcggccctaggacgattccagttttctatagaaaaggtatataaagtaaggtatttcaaaccgatttccccactagcttctacaaccgacttcaccgtatccaccccctgtttgtgtccatatacccggtctaagcctctttgttccgcccagcgtccgttgccgtccatgataatcgcgatatgttccggcaagcccgctgctataatttcttctttaatatcttgcattattattctgtttttcactcaaaagtgacattctgggttcaatggaaaacgataagataccgtaattcctcccgcaaaaaaacaatctttattacaaaatcagtctcttccgtcccccccggagatcgtacacctgatctattttatcggtaaacaatttccgggtactccattcgcccccacatgaccattgtcggtaaagattaaactttactccgatgccccaagggatagaaacactactctcatcgccggctccgagatatcccactccggtaaaaagatacggagaccagcaggagaattctttcactttctgcacccaaaactgcggaaatcaaattcgatccatgcagcaacatccttcaccgtacaatgaaatccagccggatataccgtctccccgttggacagcaaggatctctcccggatatctattttcgaaaaacctgcattcagccgtaaagcaaaacgatcgttcagattataacggcaaaaacctccgagataacgctgactccgatcaaagtgccgattgggattatattcgcccatataataccccattcctcctaaaattcctaactctccctcaggttgacaaaaaccgtccaaagataacaacaaaagagggaaaaataagcttataaaggtaaaaaaatcgggtaacaaatgcaaagaaacaataacatagctggaatcgtttcggcaactccctctgttctatcctatcgtatagcacctttttacccacttccattcccgatttttcactctagtctttcattccgttgcgtctgtcttccccccacatcagcttattcctcaaggtatcgtaataattatgccggggtagtttcaccacattgattttttggcttccggtacaaattttcaattcctgtccgtccgtcatcttccggatccgggagtccatgcacaacacatattcgccggaacgcccttccactttcagcctcacttcagccgtattcggtaccaccaacggacgaatcgtcaaattatgcggacagatcggagtcagaataatattccggcattcgggactcacaatcggtcctccaccactcagggaataagccgtagaccccgtcggagtagccaccaccaatccgtcggcccaataggtcgtaagataattctctccgatataggcatgtatcttcaataaagaagaagtagcagctttcaaaactcccacttcattcagggcataatcgaaatccgctatccgttgtccttccacttcaagctgcaacatatcccgctgttccacctcatacttcccggcagcgataaaatcgacagcatcttctatctcctccacgggtacattcgctaaaaaccccaaatgtccactatttacccccaatacaggtaccccactatctttcacataaatcaccgaatccagaaaagtaccgtccccaccgacgctcagcagcaattcaacctcctcttttatcaaggtacatctgccgaaacaattcaaaaatttcggttcgtaaccgtagtttccactcaacagcgcagcgaatttttcttcacacaccatccccactcctttcctctccagtccttcgaccagacgtttcaggtaaggaaaaaattccggttctatacttctgccataaatcgctacggtcataaatcgatcctccttcattcaacagacaaagatagaaaaaagttgctgagttactaagttgctgagttactaagttgctgagttactaagttgctgagttgctaagttgctgagttgctgagttactgagttactaagttgctgagttgctgagttactaagttgctgagttgctgagttgctaactttttaaactcagtaactctataactcagtaactctataactcagcaactctataactcagcaactctataactcagcaactctataactctaaatacttcatcaataatccatagcgttccctcagactatcctgttcttcctcgcctgtgacaaaactattcttaacggtatatccgtaccggataaaagtatccaggatcggatctacattcagtgtatttatcttcaaggtaatctgcagttgctgggaatcgcggtttcccgacacgtaacaactcaatacccgggcttcgttatattctacaatctgtgcaacttcggccaatgaataatcgatccggttgacttcgagcaccagaatacctcccggctggtctacacatagcaaagtgtccaaatgccggaggatatcggtcaaagtaatcgaaccgacaaaattatttttccggtcgagtacgggtaccaccgacaacaaacttccggccgccagacagataacatcataaatatgataattttcataaacaaaggtaccttccaccggaatctgcaacacatccagccgatcgttcaggtcgccgtgggcatagatcatctcatcatctacaagccccagatacatttttccctgctccataggcagatgggacacccggaaaagttccatccagttgagcgcctgcaagcaggtatcttcgggtttgagcaccggcacaacattcgatatcaattctgatgcaatcatagtttatttacaacgatgtgacaacagacaaagttacaaatgtttttaagctgtcaaaaattcaggatctttttcagttcttccgtatttttttaagaacgacatagacatccacatcggttattccttcgaactcagcagggtcgaacacctcgtcggccgacatcagtactatggtatatcccactgcccggccgaactttcctgtgttcgggttttatccccaaaatatgacaaacaacgaactaatttcagaataaaatggcatcgtatcgatttttatcggccgattataaaaaaaattacatttatcgcatatctttgtgactgataattttaaacgaataaaatgacatgttacccaaatttcttattgcggacaactcacaggaagcacttgacttagtctacgttgttcataccgaaaaaccacgttgtatcattcaatgtgatctggacggattttatagtaatcaaaaaatttactggatcgacgaagaaccactgtctcaagatgatatcgattctctgatggaagaagctgaagatttctatgaaaccgaactggacaatcaggaagaggtatatgacgaagaggaagataattaatccgacttacagctttgtaagctttaatcactaaattatgaactacacgaaagaagatttgaaagttttcaagcacagagatattaaaccggaacagatagaccggcaattagccaatttcgaaaaaggattcgactatgtcgatttgtccgaaccagccaccatcggtaatgggattatccggatcgaggctgaagatgaagaacgtttgaacgcaaatttcgataaagcacgtcaggaatgtgaactgctgaaaatggtcccggcttccggatcggccacccggatgttcaaagatctgtttacttttatggatacctatacaggtacagaagaagaattcctggaattcgtgcaggataaaggggcgggtacaatgcacgatttctttttgaaactggacgaacttcctttctataaccgtttgtctgccgctctgtggaatgatggaaaagacatcgacaagatgatcgccaaacggcaatttaacgaaatccttagttatatccttaccgacaaaggactgaactatgggaatacccccaaaggattggtcgattttcatatctaccgggattttgtcagaacggctttcgacgaacatatcgttgaaggagggatgtattgcaacaatggaaaaatagcccgcttacatttcaccgtttcggaagagtatatgaatctctttaaagaacggttgaagaaggtgaccaaagtattcgagaagatgttcaacatcaaatacgaagtaaccttttcgattcagaaaccttccaccgataccgtcagcctcaccgacaagggcgagttgctgagagacagcgaagggaagctggtattccgtcccggaggacacggtgctctgatctataacctggaggaattgaaagccgatattattttcatcaaaaatatcgataacgttatccccgaccgggccaagggagatacgatcaaatataaaagactgctggccggaacactggtggaattgcaagaaaagattttcagttacctgagtatactggataaaaaaccgacagaagaacaactccgggagattgaagcctttatgggacaaatcggttataaagaagcggaaggcaagacttataaagacccaaaagagcgcatcaaacatctgcatcaattgctggatcgtccgatccgggtatgtggaatggtaaaaaatgaaggtgaaccgggcggaggaccgttctgggtgaaaatgaaagacggcagttcacgcctgatgatcgtcgaatcggctcagatcaatctgaaagataaagaacaaaaaaaaatgttcgatcattctactcatttcaatccggtcgatctggtatgcggtgtaaaaaactataaaggcaagaagttcgatctcgaaaaattcattgcccccgaacaaggttttattacccacaaatcatataaagggaaagaaattaaagtacaggaactcccggggctttggaatggagctatggcgaactggattacggtattcgtcgaggttcccctgacaactttcactccggtgaagactgtttttgatctattccgttttgagcatagaaacgtattgaaaaaataaatcccaaatgggatttattttttataaaatccgaaaagtgaacagaaaaatatgggaaaacaaaaaaattatttattgttggtactgaaaggctgtgccatgggtgctgcagatgtggttccgggtgtttccggcggtacgatcgccttcattacggggatttatgaagaattgatcgattcgatcaaaagtatagacctccaagctttaaaattgctgctcagcctgaagtttgcagacttttggaaaaagatcaacgggtcattcctactcggagtggccggtggtatcgccatctctatcttctctctggccaaactcatgacctggttactggaacatcatcccatttatatctggtcgtttttcttcggtttgatcgtcgcttcgtcggtactggtagccaaagaaatcaaacactggcatatcggtacggtgatctcactgattgcaggaggttgtatcgcctatgtcattaccgtgatgtcgccggccgagactcccaatacgtggtggtttatcatcttatccggcgccatagctatttgtgccatgattttaccgggcatatccggggcattcattttactactgatggggaaatactcctatatcctcggagctgtcagcagcctgaacatcggggtgatgttgttattcatcgtcggagcggttgccggtatcatcagtttttcccatttgttatcctggcttctaaaaaaacatcatacagcgacagtcgctaccctaacgggattcatggtaggatctctgaataaagtatggccctggaaagaaactctggaaacctataccgactcacacggagtggtaagacctttggtggaagcgaatgtatctccgcattattttcaggaactgacgcaatccgatccgcttttagtggaagcgatcgtgatgtgtatcgtgggttttgtgcttatttatggcatagagttcatcggaaagaaaatgcaaaagcaacagtaatcatgcaaatatacggaatcatcggataccctttggggcattcctgctcgccccgctattttaacgagaaattccaaaaagaaaatatcgctgctgaatatcggagcttcgaaatgcccgacatccggcagctttcgacactattacaacaaacgcccgacctttgtggttttaatgtcacgatccctcacaaacaaaatatccttccctttctggacgagatcagtgaagaagcccgggctatcggtgccgtcaattgcgtcaaggtgagccatccgaatgggcacccctatctggtgggatataatacggatatgtacggttttcggaaagctttgctggaatttattcccgcagctatttccaaagcactgattctggggaatggcggagctgccaaagccgtgcgttacgccctgcactctctgaatatggaagtatcgaccgtatcccgtactccccgccaggcagacgagatcggctatgcagcgttaccggatttaataaccggttatccgctgatcgtaaatacaacccctctgggcacctggcccgatacatcggagtttcctccccttccctacgagctcctcactgccggacattatcttttcgacctggtctataatcccgaaacaaccactttcatgcaaaagggaagagcagccggagctcatgcctgcaacggttatgcgatgtggctgggacaggcggaaaaaaattgggagatatggaaaaaaaagtaaaaaggctaaaaaccagagggtaaaggctaaaaataaaaaaatacctgaaaaatacgttggagctttctttttttaaagaatatttctatcttcgcaaacgttttacatgatatgcgtttagcgatatgtaccgtccttttgaatattatttcgttttagcttatatcatgggtaccttgaaattccactggggactctgattccggggcagttattgccttcactttcgaattattcaacattttatttccgagacgtctccgacgtttgtgttattgtaatatcatataatctataaaatcagacaaaattatgcaaaaacagctattattaggtgtcgaagcaatagctcagggagccattgacagcggaatttcaggcgtatatgcctatcccggtactccttcgacagaaatcaccgaatatattcagaattctaaagaggctatcgcccgtaatgtacaccgggcatgggcagccaacgaaaagacggccatggaatcggctttgggaatgtcttacgccggcaaaagagccttggtatgtatgaaacacgtcggtatgaatgtggcagccgattgcttcatgaatgcagctattaccggagctaacggtggactggtagttaccgcagccgacgatccttcgatgcattcctcgcaaaatgagcaggattcccgggtatatggtaaatttgcctttgtaccggtactcgaaccttcgaaccagcaagaagcttacgaaatgacccgttacggtttcgctctctcagaaacggtaggttctcccgtattgatgcgaattaccacccgtctggcccactcccgtgccggagtcgaaacgcacgatagcctgccggaaaatcacttgcacttgccggaggataaacgccagttcgtactgctcccggctatcgcccgtaaacgctataaactcttacttgagaaacaggcggattttgtaaaagcatccgaacaatctcccttcaatcaatatatcgacggtagtgataaatcactcggaatcatcgcttgcggaattacctacaattatctgttggaaaattttgacggtggctgtatctatccggtagtaaaagtcagccaatatccgttaccccgtaagatgatcaaacgtctattgcgcgagtgtaaacagattctggtactcgaagaaggttatcccgttgtagaagaaatgctgaaagggtaccccggccaagataacatcatgggacgcctggacggcaccctgccccgggatggcgaattaaatccggacttagtaggcaaagccctttgtttcaaaaccaaagaaggagcccctgtacctgagatcgtcgctccccgtccacctgcactctgtacgggttgcagccatcgcgatgtctataaagccctcaacgaagtcatcgcgacctatggcgaaggacgggtattttcagatatcggctgttatactttaggtgcacttcctcctttccagtccatcaactcttgtgtcgacatgggagcttctatcacgatggccaaaggagcctgtgacgccggattattcccaacggtagcggttatcggcgactcgactttcacccattccggtatgaccggtttattggatgccgtcaacgaaaaaacgccgatcacagtgatcatctccgacaacgaatcgatttctatgaccggaggtcaggaatcctcggccctgggaaaaatagaatcgatctgccagggtatcggagtagaacccgaacacatccgggtattgctgccggtacccaagaaccatgaggaactgtgccgaattatccgggaagaactggaatacaaaggagtatcggtcatcatcccccggagagtatgcatccagaaagcagccagggacaataagaaaaaatagaataagtaataagctacaggctaaaggctaaaaagttaaaggtaaaaaattatgaaaacagatattatattagcaggcgtaggagggcagggtattttgtctatcgcagcggctttgggctcggctgcactgactaacaatctatatatgaaacaagccgagactcacggtatgagccagcgaggcggtgatgtacaatctttcatgcgtatttcagaccgcccgatctattcggacctgatcgccaaaggacgtgccgacatcatcttatccgtagagccgatggaagctcttcgttacctcccctatctacgggaaggcggatttgtggtgaccaactccacaccttttatcaatatccccaactaccccgaagtagaaaaagtgatgagtacactcaaaagccttccccatcaggtgattatagatgccgataccattgctaaagaatctgccggtaacgtcagagccagcaatttcgtcatgttgggagcagcttctcccttcatcgaaattccgttcgaatacctggaagaaggcatccgtgccatcttcagccgcaaaggcgctgaaatcgtagagatgaacctcaaagccctacgtgcgggccgcgaattcgctcagaattacaagtaacggacgaaacggtaaaagcggctaaaacgggaacaacggcaaaaatgcctccttcctccctgccgcttttaccgttccctttttcttttccaccacttccaccgtttcatcccttcacttcctacttttttcactttttaccttttacttttcaccttttacctttattgtattatctttgctcaccaaatagttacaagtttccggtactgccggaagtgatcggaatcgcttcaaagtgtttggaaaacctgtactaaacggtgtaattcagcaaatattaatcttaaaatcctttcgactttttcaatcgtttgaagggatgataacttaaataatgtaacatgaaaggactgaaaattgttgttcttgcgaagcaggttcccgataccagaaatgtgggaaaagatgctatgaaagcggatggaactgtaaacagagcagccttacctgctatttttaaccctgaagatttaaatgccctggaacaggcattacggataaaagataaaattgaagggactacagtgcacattctgacgatgggccccggccgtgctgcagaaatcatacgtgaagccatgtacagaggcgcagatggcggatatttgttatccgaccgtgcttttgccggttccgataccctggccacttcttatgcgttagcttgtgcgctccggaacttgcagaccgacctgctgatctgcggccgtcaggctatcgacggagatacggctcaagtggggcctcaggtagctgaaaaactggggctgccacaagtcacttatgcagaagatattctggatattacagccggcaagatcacgatcaaacgtcgtctcgaaagaggtatagaagtggtagaatgtccggtaccctgcgtcgtgaccgttaacggttctgctgccccctgccgcccccgtaacgcacgctatgtgatgaaatataaatacgcccgggctacccaggaaatgcaggatgccgatgaagattacctcaacctgctccaggaacgtccttacctgaaaattaccgaatggagtgtcaacgacatcacttgcgaagcccaggaactgggattgagcggttctccgacgaaagtgaaaaacattgaaagcgtcgtatttcaggccaaagaagccaaagtactcgagcctagcgacacagccatcgatgaaatgatgaaagaactgatcgttaaccataccgtggggtaaggtaaaaagtaaaaggtaaaaaagtaaaaagtaaaaggcgaaaggctataagcttaagctataaaagctaaatatttatgaacagtgtatttgtatattgcgaaatagaagagggtattattgcagatgtaagcctcgagctactgaccaaaggacgtacccttgccactgaattaggcgtaaaactcgaagctatcgtattgggtagcgacctcaaaggagttgaaaaacaagtcttcccttatggagtagacgtactttggctgggcgatgacaaacgtctggctccttacaccactctccctcatacctccattttagtcaacctgtttaaacaggaaaaacctcagatcgcttttatgggagcttccagtatcggccgtgacctgggtccccgggtgtcttcggccctgcacagcggtctgacagccgactgtaccagtctggaaatcggagattatgaagacaagaaaaacaataaaatatatcacaacctgttataccaaatccgtccggctttcggcggaaacatcgttgctacgatcgtaaatccggattgccgtcctcagatggctaccgtccgcgaaggagtgatgaaaaaagaaatcttcaatgcgaaccaccagggagaaatcaaaatgatcgatgtgaatcagttcaccactccggaagatttcgtcatccatgtgatcgaacgtcacatggaaaaatccaaagtgaacctgaaagcagctccgatcattgttgccggaggctatggtgtcggttcgaaagaaaacttccagttactgcatgaactggctaccgttctaggcggagaagtcggagcttcgcgtgctgccgtcgatgccggtttttgcgaacacgagcgtcagatcggccaaaccggtaccaccgtacgtcctaaactgtacatcgcttgcggtatttcaggccagatccagcatactgcaggaatggaagagtctgccatggtgattgcgatcaataccgatagcaacgccccgatcaataaatttgctgattatgtcatcaccggcgacctgaatgtcgttatcccgaagatgatccagtattacaagaaaaacagcaaataaaacttaaaatcaaaacattatggctaatttttatacagataatgaagatataaaattccacctcggccacccgctgatggaaaagatcgttgccctgaaagagcgcaattacacggaagcccagcaatatgacaacgcaccgcgcgacttcgaagatgctttcgacaactatgataaagtattggaaattgtcggagaaatttgcggggatgtcgtagctgtgaatgccgaatcggtagatgccgaaggcccgcaggtagtcgacggtcatgtaaaatatgccgccggtacccaacaaaacatcgatgtgatcaatcaagccggcttgaacggtatttctctcccgagaaaatacaacggtttgaatttcccgatcaccccgtttatcatggccgccgagatcgttgcccgggccgatgccggattgcagaacatctggggattacaggattgtgccgagacgatcaacgaatttgccagtgacgaacaaaaagccaaatacctgccccgcgtatgtgccggcgagacctgtgcgatggacctgaccgaaccggatgccggttccgacttacaggccgtacagctgaaggcaacctataacgaagccgacggacaatggtatctgaatggtgtaaaacgtttcatcaccaacggggacggacatatttccttagtactggcccgttcggaagccggaacgaacgacggacgcggactttccatgttcatctatgaccgcaacagcaatgccgttaccgtacgtcgtatcgaaaataaattagggatcaaaggttctccgacctgtgagctggtattcaaaaatgctccggccgaactggtaggcgaacgtaaaatgggattgatcaaatacgtgatggcactgatgaacgcagcccgtctgggtatcggcgcccaatcggtcggtattgccgaagccgcttatcgcgaaggattgaaatacgctcaggaaaggaaacagttcggtaaggccattatcgagttcccggctatttacgaaatgctttccaatatggaagccaagttgcatggtatccgttccgttctttatgaaacagcccgttttgtagatatgtacaagacctattaccatatctccaaagaaagagccctggacaaagacgaacgcaacgagatgaaggaatatcagaaattagccgacatctatactccgctacagaagcttttcgccagtgaatatgccaatgaaatcacttacgatgccttgcagatccacggtggatcaggatttatgaaagactatcctatccagcgttacgtgcgggatgcccgaatcaccaatatttacgaaggtacttcccagttgcaggtagtagctgccatccgtggcgtcaccaccggacaatatgcaaaacatatccgcgaagtatacgagaaaatggagatcgctccggaacacgaatacctgcgcgaaaccctgaaatgcatgaccggtaaactcgaagccgcaacagccaaagtagctgaagccggcagtaccgaatataccgacttccatgcccgccgtctggtggaaatggccggttataccattatcggttacctgttgctgcaggatgcacagaaatgcgataagtatgtgaagtctgccgaaattttcatcaattacggtaaagccaaagtagctgcccacgatgaaatgatcaacagcttcaatccggacaaactgggaatctataaaaaaaattaaagctagtgatcagataaattaaaaacgtcctttcggggacgtttttttattctaaagcatcgggtacttatgaatttcagtaacttctgttccgaaattaaacacgcctccataaatcactttttgattttcatccggaataataaaatcaatgaaattatttaattcatacacctttcccaactttccattccaactcatcacaacaattttagtgggatattttcgagcatcctcaattttacatccttcccatagaagataacaataattttgagtagcataagctcgataaaaggttactgtagtatgatcatccacccgaatttgtgtatttatatcttctttgatccaatccaaagcataggtcacctttaaatttccatccaaatcataacagttaattaaattcatatatttaaacgggacgataatcgaattgtccttttcagaaactagtacatgatggcaataagcatctttacgtcccttttcataaaaataataaggaacataatccgtattttttatctctccgttatttcggttacaaaaggaaaaaagcccctcgtctttctcgataaaagttccgataaaagcagaatctatcttattgaagttatacataaaattcaggtttctatataaatgctccgaatttacgcatttcgctatatcccggctttccacaagggcagctaaatctatttttgttaacgtagcggcagggctatcgtaaataatcagcgaatcataagcaaaggagttaactagaaaaaaaggataataaaactcacaaacgccccgtccttcccttccaaatcgaaaaatttcccggtcagtgttcgtactgaaaagataaaacatggtatccgtacatttttctttcagtaccaaaaaagagtctaccaatacaccggtttcataacaccggggcagaatagtttcaaccttttcaccggtcagatgaatcaccggaggcatcttcaattcagtgatccgattctttttgctacaagccatcgaaagcaggataaaaaatagagaaagatattttttcatcatacacctattaaattatgacagagacaagaataaacacttttacaatatttaattaaaatgaataaaaattattattttcccaataactagtctgaatacaaatcc

SEQ ID NO: 6173 - DNA, 537 bp, Unknown
  gut microbiota DNA sequence
atccgtgccgtcgccaagcgttgcggcatcaccaagcatatcacgtggcatcagagccgccacacggcggccacaacggtatttctctccaacggcgtacccatcgaaacggtcagttctatgctcggacacaagagcataaagacaacgcagatttacgcgagtgcgcccagaatggtcgcttaataaatacttctttagcaagaagttaggattgggttcgatatagtcctatcgtcaatcagtttatccaaaagggaaacccgatggagagtgtagcatactgattaaagctccaagtccactaatagtcaggtggcgactgaggggcaagacgaaaagacatacataaggatgaagccttgattggttgaatgatagttcagtggtaccaaatcttgcaacaacggaagactattatacatacgttgtttcatagtactctgcctattttgtgcgttagtgcagagcataaagaaccgactatgacacagccgcaataagcggacaagaacgaaagtcgcatccgacagtatg

SEQ ID NO: 6174 - DNA, 8178 bp, Unknown
  gut microbiota DNA sequence
gtttgacggctcggcgcaaatgcattctgaatatggacaggcatttgtatttgttattaactatttttagacctaaacctatttttatgagaaaacgattgtatctgttacttgcattcctttggatgggggtatgcatgctgagtgcgcagacgaaaaatgtttcaggacgtatcctgtctgcagaaaatgatgaaccgatagccggtgctacggtattggtcaagggtacatctatcggggtggcttctgatgcacatgggcattttacgctgaaagtgccggaatctgctaccgaattaatagtttcgtttatgggaatggaaacacaggaagtgggaatcaaagcgaatctgacgattcggttgaagtctgccaacgagaaattggatgaagtgatggtcgtggcttatggaactgccaaaaaatcgagctttacaggtgctgcagaggtgataaagaacgaacagttggaaaaaatgaatgtcgtgtctgtcaccaaagcattggaaggcacatcgccgggtttgcaggtgatgggcggcaccggtcagccgggctcgggagctacagtccgtatccgtggtatcggttcgctgtcatcctcttctgctcctttgtatgtgttgaacggagttgtttttgacggggatatcagttccatcaatccggatgatatagaatcgatttcagtgttgaaggatgcggcttcggctgccttgtacggtgcgcgtggagccaatggtgtcattatgatacagaccaaaaagggaaatgccgagaagtcgacgctgagcgtcaaggctgtctggggattttcatcccgtgcaattcccgaatattccagaatcggaataaaggattattacgagacttcctgggaagcatacagaaatgcgttggtggggacaggacaatccatggaaaaggcttccgaatatgctgcagccaatcttatcaacaagcagctcggcggctataacaattataacattcccgccgataaactgataagtgcagatggtaaggtggatgcttccgcccggttgctctatcatgacaattggggcgatgcactgttccgtaccgggttgaagcaggattatatgctttccatgagcggaggctcggacaagaccacctattatctttcgcttggctggctggacgaggaggggattatgacccgtacggactatcagcgtttcacggcaagagcgaatattaacagtcagtttaccgactggttcaatctggagggaaatatggggtataccaatgacaagagcaatcagatgatgcaggcagagggaacatatgccatcaacccgttcttttattcccgtatgattgctccgatattcccgatttacaagcgcgacgagcaaggtaattatatattggacagtgagggaaacaaggtttttgattatggagagaaacgccctttcaacggacggaccaacaatctggcgacattgattcatgatgcagtctggaatcagaccgataatttcaatatcaacgtcactgccggtacgaagttcttgcgccactttactttcaaagtgagcggtagtgcggatatattgaatcgtcgttataccaaaatgtataacaataagttcggtgatgctgccaatgtcggaggacgaggcagcgtggaggctttgaggatagaatcgcttacattcaaccagatattgaattttaataaagagctcggactgcataatgtatctgcaatggtgggacatgaaagttatcggtatgtagagaagagtgtttttgcacagcgtaccggtttcccattggagatgtcgaatgatttggtatttggtgcgcagttggaggatggcagtagccagaccgatgagcatgcgatagaaggttggttcgggcaggtggggtatgattatgccaatcgctactatatatcaggttcttatcgccgggacggtagttcgcgtttctataaagacagccgttggggtgacttctggtcggtgggtgcatcctggagaatttcgcaggaagcctttatgaaaaatgccaaatggatggacaacttgaagttgaaagtgtcgtacggagtgcaagggaatgataatatccttgatgaaaatgaaaatccctattactatgcatggcagaatttcttcgagccatatcccaatcatgattttggaggcgtcattcactccacaacaggcaatagggatttgcattgggagaaaaattccaatttcaatgtcggccttgaattcggtttcctgaaccgcatccgtggtgaggtggactattttatccgtaagggggaagatatgctgtatgctgttcctgtcccttattccacagggttgccttccatcatgcagaatgccgcatcgatggacaacaagggaatagagctgcaattgtcttttgatattctaaaggaaagggcattcaagtggacgttggattttaatttgacccactataagaataaattgactaagctgacgcaagatgaggtttgggtcagtacgaaaaaatgggtggaaggcggttctatctatgatttctggttgatgaaatgggcaggggtggatgctgaaaacggagatgagttgtggtggtataaaaacggagatgcctgggaaaagacaaatgattattcgttggcgtccaaagatccgaagagtaaacagtatgtaggttctgctatccctaaagtatatggcggttttaccaataatttttcgtggaaggggttgaacctgtcggtatttttctcctattctgtcggaggcaagatgtatgacagcaattaccagcgtttgatgcatgccggcagtttgggacatgcatggcataaggatatattgaaacgttggagaaaaccgggtgatgtgaccgatgtgccaagaattgaaaagggtaatcggaatatttcaagatccagcaatcgcttcttgaaggatgcttcttacctgtcgttgcgtaacatcaatctttcctatacgcttcctgcggagtggagtagccgtgtgggaatgtcgtccgtcaaggtgtttgtgagcggggacaatctggtgacttttacaaaattgaaaggaatggacccgacccaggcgttctccggagtgagcgataatacctacgtgccgaaccgagtggtttctgttggtttgaatattaatttctaaaatagacaattatgaagatactatatatattgccgttggtttggatgttggtgtttacatcctgcaacagtgattttttggatcgcgaaccgtcgaataaatatacggatgatatattgcttacttcgacggagggaggtatgatgctgctgaacggtacgttgcgccgcacttatatcagttatgagtctcatgcacaatacgggcagaaggcggtggatatcatgaccgatatgctgggagaggattattacacgggagatggttactggaacaattatgaatcgtggtattcctggttggcacacagaagtgcgaatgatgaagataataaatttgtatggatgtactattacggtacgatcgacaatatgaatcttttgcttgcgcatgtggatgccatgaagggagagcagaaggagcgcgataatctgaaaggacaggcgtacgcatttcgtgcacacagctattttaagttggtgcagttgtatgcggagcgttataaaccggaaggccgtaacacccaattgggaatccccgtatatacgcatccgaccagtgagggaaaagcccgcagtacggtggaagaggtgtatactcgcattaataccgaccttgattcggcgatgatgctgttgacggaaggtaggatacatatcagccattttaatttgaatgtggctcagggaatcaaagcggaagtgttgctgacgatgggaaaatataaagaggctgccaagatggcacacgaggcgagacagggctttggtctgatgccgcaagaattgttcgcagccggttttaacagtgtgaacaatccggagtggatgtggggtatgcagataaaggttgaccaatcgactatttacgcttcctatttttcaaatacggatccctgttcaataggatataatgagctcggtaatgaaaagcggataaattcgcagttgtatgatgcgatgaatgacagcgatgtgaggaaatcggtatgtgtcggtgccgacggtgcgacattggaatgtgacaatggtgaatttgaagttcctccttatacggtgaataaattccgtctgccgtcttatgccaactggtccggggattattgttatatgcgtgcagccgaaatgtatctgattgaggcagaagggttggctcgctccgaccagagcagagaagcagcgaaagtcctgtatgagctggtaagtgcccgcgatccgaaatataagcttccggatgtgacagggaatgccttggtggaagaggtgatgttgcagcgtcgtctggaacttttgggagagggattccgctttatggatatgaagcgtttgaatctgtcgcttgaccgtacagataagggacatgaagagacattccttaagcctgcgaaggtggatgccggcgatatccggtggcagttcctgattccgacacaggaaatgacttcgaatccgaatatggtgcagaacgattgattctatatggagccgctcttgaacagggcggcttttttttgtgtggaatgattaggttgtttgcttttttcagtatattgaccactgaaattaatgatgcgtttgtttatgagtattgatagatgggtgcttttgtgtttggtctgtctgacgacattctttgtggacaattcagtattggtgccggacataatggagtcaagaaatatagttactgcccgagaaatggtttatgacggcaactggattgctccgacgatgaatggtgaattgcgcttggagaaaccaccgttgccgacatggctgactgccgttgttgagatgatagctcctgacaatctggggtggcaacgcggtgtggcaggcttggcagccctccttttggtgttctacttttattgttttgtaaaaaacattttaggagttgctccttttgtgtctgcgctgattttgtgtacatgccataatgtgatactgatgggacgtacggcatcgtgggatatatactgtcatgcatttatgctgggggcggtatatcatttggcggtggcaataaaaggaatgggcgggaagtggcgtcattgtatcgtggcgggtgtgctggcgggtctttccatcatgagtaaagggccggtgtctgtttatgctctcttgctgccgtttgttatagcgtttgcttttgtgatgcgaccttgtatcaaggggtgtcgggttgcgattggcgtaatgtgtgtgattgcattggtggtgggaggatgatggtttgcatatattcatttatcttatccgaatgaactggctgcggttgtggaaaaggaatcggaggcgtggattagttataatgtacgtccctggtattattattggaagttttttttagaatcgggggtgtgggcaggtctgctgattacggcaactgtcctgcctgtatggaataggcaattgagacataataaattgtatttgttgccattgttgtggatgttggtggcacttgttttgctgtccttattgccggaaaagaagatgaggtacatattcccattgctcatacctgccagtatgttaatgggggaactggtagattggtggaaaaaaagttttgtctgtggtgctgtaaaaagaacggatagtctgatattccgcagtaatgtttggctcgttgcaattgctgtggcacttttgcccgttgcgggatggatatttatgtttagttgcgggaagatgactttgttgttgtggtttgttgtgacttgtatctgtttgggtgtggtttttgtattggtatggagcggtctgcgtatgcgggtgtcgtatatggaaaacaaagggacggggatattgttctattttttggaacaatacccccgtccctttgttctgacgatctttaatccaataaagtatgttcgatcagtattttaacaccgattacaattaagataaggcctccgagtagttctactttgaggcctttgatttttccgaaccggaagccacagatcactccgctgaaagaaaggaagaaagtagtgaaagcgataactgaagccggaaaccagatgcccgttttcagaaaagccatactcacgccgacagccagggcatcgatactggtcgctacgccgagggtgaaaagcatccggctagaaaaggtaatcaggtggctatcctcttctttgaaggattcgtagaccatctttccacctaaataactcaataaaacaaaggcgatccagtgatcgaaatcggtgatataattactgaaatgaatacccatcgcccatcccagccaggtcatacccccctggaatatccccatggtcaaagccattttcagagacttcttgatacagaacggtttcatacatatgccgccactgatactgaccgctaaactgtccatagaaagaccgattgcaattaataggatggtgataaagctcattgtacaaaaattgttctgcaaagatagaaaataaagtaaaaagtaaaaggtaaaaacgaaaaggtgacttacctttgtgatgaaattagtggaaaaaatggaactacagactgttgtcaaattggataaaccttcgtttcggatcgattattcgacccggctcatgatgctgggttcctgctttgtcgaaaatgttggagcgaagctggaatatttcaggttcaagacggatatcaatccttgtggtattgtatataatcccctgtctgtggctgatacgctggagttgttattggccggtaaacgattctcgcaggccgatttattacgaaacggggaactgtgggtgagtctgagccatcatggacggttttccgccagggaagccggggactgtttacagcgtataaattccagattggaaaaatcggtagctcatttaaaaacgacaaatgtcctggtgattacctggggaactgcctgggtataccgtcatcggcagttgggacgagtcgttgccaattgtcataaatttccggccactgatttcgagcgtttccgattaagccccgaagatatcgaacaggtgtataccgatttattgtcccgcctgcacagtcgttatccggatatgagggtgctgttcaccgtgagccctatccggcattggaaagacggagcacatgccaaccagttgagtaaagcggtattgttgctggccatcgataaattgaagcaaaggctggattatgtctcttatttcccttcttatgagatcgtgatggacgagcttcgggattatcgtttctatacagaagatatgttacacatctctccgcaaggaatcgaatatatctgggagaagtttcagtccctgtatatgacttcggcaaccgaagcgtggatgaagcgcatcgataaaataaacaagactttattacaccgacctacagatcctgattcgtctgtttatcaggaattgatgaaaaaaacagctcaggagcgtgaacggcttgaacgtgaactcagtatttctttcagttgattccggttattccgctgtttctgtcccggtcacgatatcctgcatcgggattcgtttcagttcatccagggaaatctctgtttttacggcataactggccggataaattttacggatccggtgtaaatcaggaatacattccaaacggtttctgtaattacctacccggattttgaaatccggatcgaaatatttcaaataggccggaatgtcttggaaggtttcttcgaacttattccgcatttcctttaggttttcgatgttgcagccgaacgaactgaccgaatgaatttgaatccggtaacctgtaaaagttttctttttctcattcagatggatgtgccattgcagcaaattgtctatcggcgtgtcactgtcgaggattacctgtccgccgttatgactttccgtcctgagttcctgaagaatatcgtaatgcggttctgcttccacgatcagggtatctgcttcttgtgcaaacaaatggaccggaaaaaggaataatataaagaataaatattt

SEQ ID NO: 6175 - DNA, 2775 bp, Unknown
  gut microbiota DNA sequence
ctcaaatctaaaatctaaaatttcaggcatgattgctacaaattacaatccgaaagcaagcgaagagaaatggtacaagtactggatggatcataaactattccattcggaagtagataacagcagagaaccttactgcatcgtcatccctcctcctaacgtcaccggagttctacacatggggcacatgctgaacaatacaatacaggatgctttggtacgccgggcccgtctgttagggaaaaatgcttgctgggtgcctggcacggaccacgcttcgatagccacagaagccaaagtagtaggcaagcttcaaagtgaaggaataaaaaaaaccgatctgacccgggatgaatttttaaaacacgcctgggattggacacatacacacggcggaatcatcctcaagcaattgaaacgcctgggagcttcctgtgactgggaccgtactgcttttaccatggatgaagaacgaagtgaaagtgtactgaaagtttttgtcgacctttacaacaagggactgatttaccggggagtacgtatggtcaactgggatccgaaagcactgaccgctctttccgacgaggaagtggtttacaaagaagagcatagtaaattatactatctccgttataaaatagaaggagaagacggttatgccctggtagcgaccacccgtccggagaccatcatgggagacactgctatgtgtatcaatcccaaagaccctaaaaaccagcatttacggggaaaaaaggtgatcgttcctttggtcgggcgcacgataccggttatcgaagacgaatatgtcgatattgaattcggtacaggctgtttaaaagtaactccagctcatgacgtcaacgactatatgttaggtgaaaaatatcatttgccttctatcgatattttcaatgacaacggtacgatcagcaagcaggccggaatttatgtcggcatggaccgtttcgacgtacgggagcagatagaaaaagatctgcaagcagcagggttattggagaaagtggaaccttacaccaataatgtcggtttttcggaacggaccaatgtgcccatcgagccgaaactatctatgcaatggttcctgaaaatggaacatctggcggagatcgctttatcgccggtaatgaacgacgatatccgtttcttcccttctaagttcaaaaatacttacagacactggatggaaaacatcaaagactggtgtatcagccgtcaactttggtggggacaccggattccggcctggtatctgcctgaaggcgggtatgtcgtcgcttataacgaagaggaagctttacgcttagcccgggagaaaagtcataattcgaatctgaccattgcagatctacgacaagatgaagattgtctcgacacttggttttcttcctggttatggcctatttccttattcgacggaatcaaccatcccggaaatccggaaatcaattattactatcccacgaacgatctggtgaccggcccggacatcattttcttctgggtggctcgtatgatcatggccggttatgaatacgaagggaaaatgccgttcaaaaatgtatatttcaccggtatcgtacgggataaactaggccgtaagatgtctaaatccttgggaaattctcctgatccgttggatttgatcgacaaatacggagcagatggggtacgggtagggatgttattatgtgctccggcaggaggtgatttactgttcgatgaaagtctacccgaacaaggccgtaatttcactaccaagatgtggaatgctttcaaactggtaaaatcctgggaggtagcctccatcgaccaaccggcccattcccgtttggcattggaatggttcaaacacctgttgggaaaagtaaacgaaacgttgaatacccaattcgaccaataccggatctccgaagcactgatgacggtatacaccactttccgggacgaattttcatcctggttactggaaatgatcaaaccagcgtacggccaaccgatcgatcggaaaacgtatgaggagacgctgaatatcttcgagcaactgttgcaattactacatccgtttatgccatttataacagaagagatctggcaaaccttacgcgaacgacaagacggtgaaagtatcatgatttcacgactcccgaaggcgacaagttatgacgagagttatctgttacgctttgaagcggtaaaaaatatcatcgtaggtataagaaatatccggaaacaaaataatatcgctttcaaagatgtcctggagctgaaggtaaaaaagaacgaacgttatccggcttccttcgatagtatcatccgtaaaatgggcaatatcggtcagatcggattggttaacgaaccggtcaaaggagcctggagttttatcgccgataccgtcgaatattttattccggcacaaggtgaagtaaacacagccgaagtaaaagccaaactggaagaagaattaaactatacccgtggttttctgacttcagtgatgaaaaaactcagtaatgaaaaattcgtcaacggtgctcccgaacaggtagtggccaatgaacgtaaaaaacaagccgatgcagaggttaaaattgccgcaatcgaagcacagttaaaaggattgtgactttttaccgaaataaactatagcgaaaggggctatccgactttgaacagccccttcatttagggatattcagtaaatgtccctataaaatacaatggcatatgaagatgccccagtataatcacttc

SEQ ID NO: 6176 - DNA, 206 bp, Unknown
  gut microbiota DNA sequence
aggttcttgtccatattatccaaggttttacaatccggtgtctgaatggaacctaaagtcatgcattcatggttgtcgatgtctatgacaccgatgcccatgatttccaatccacgcttgtactctcctgcacaaccagaccagaagtaacctatccaaggtgtcttcttgcctgatttggggatataggaaggatcgatggcgat

SEQ ID NO: 6177 - DNA, 491 bp, Unknown
  gut microbiota DNA sequence
aaagtaagtaaaacaacggttgctgttttttgctgaaaaattaaaagttaaacaatagaaccggcaaaagctggttcgaaaacactaaagaggtcattgaaatgttgtcaaaaacgaatggttaagcatgaagaaatgtactgaaaaaagagtgctaacctgctggtaataaaggtggaaagtattgcataattcgttgatttttagtaaattagaagtctcccaactcttctgattatgactaaagaaacactccttatgcaataccaatccgagtgcctatcggctctcaaatcagtcgtgaatatacacaaaccttttgaaaaaacgttcatggatgcaatgaaattattcatggccatccctgatcgtataaacttcctccaattgggtaggtatggacgtttttcggaacagacctaccgtaacctttttgagcatgaaactttcgactggtttgcgttcaacggctctatcatcagcaagcatct

SEQ ID NO: 6178 - DNA, 836 bp, Unknown
  gut microbiota DNA sequence
atgcgtcccgcgatcatggaatagatattctgctcgtcaagggaaagcctctggggatagttctccgtaatgattaacgcatgatggtccgtcatcttgctatcgtccacacagtgccggtttaaaggctggttacagaggttttccgcatgccatgtgaaacggggatgttgcttaagcaggccgatgagggaagggacttgttcgaagatgtcttctgtgatatagctacatccggtacggggatacgaaatgtagcctccttcatataatttttgagcaatgttcagcgtctgttctgcggtcagtccgagtttggtattggcacttcgttgcagggcggtcaggtcataaagtagcggagcttcttctggaacctctttcttctccacttgcaccactttggctgtcgtctcttcatacacttttttacggtccacatcgagtttttccggtgtatcatatttcccggtacaggttaagacgagttctttccctgctttcgttgtccgtagctgtagcagataatagggtttggctataaaatccctgttgtccagatatcgacggcaaatcatgccaagtgccggtgtctgtactcttcccagagaatagttactcttgcctgcagccatgctcaaagacaggctggcattcataccgacgacccaatctgattctctcctggctttagcggcacggtacaggttgtcaaactccttacttgatttgaggctatcaaatccttcccgtatcgatttttctgtcatggaagatatccacaagcgtttggtttccttatgatatcccagatattcaagcacatatctcataat

SEQ ID NO: 6179 - DNA, 1672 bp, Unknown
  gut microbiota DNA sequence
aagcttccagtgacgtcaaaattccagtcatctcgacaaaaaacaggacgcactgattatcagtgcgttttttgtttaaagttgataaatctaccccttaaactatgatccggccttcatcgaaaatgaaaaatacccggtagatatttccatgatacatagtccttatttcatagaggctatctctgataaatatgacgaatttcgtactaattctatttctgatctgtagaaggtcaagtagataatgaacctttttaggctcggtcgctgacagggttttcatgagattgtcataataatctccgaatgctattatttcccttttcatacagcaaatatagtgaaaggtaagtgcaatgacagatgacaactttccggcaaatcaccggtttttacatgcttccaatgccgacgttttaccgccagatcaaagattttgctatgtaaagggaaaaaatgtgtttgggttttgttttcaggtaaaaattgcttaaattagccttaatcttcttatccttaaaatcatgcgtgggtcttgggtatataattattattgcgatgagagctgtcatcttcaaaaagatggcaaacggttcatggtattggggtatattgcggctcccttgcataaaatagaacagatgaagggggagctgaaaagcttgcgggtgaaatataagaatacactggaagtgaaatggacttatttgaatgagtggaattatccgttttatacgaagttggtagattggtttttcaaaaaaggagggatacgattcagggcgattatcgtagataaaagccggtatattgccgataaatgtgatcatgattacaataaattttactatctgatgtattatcagttgctttttcatactttggatccggtttggcattataatatttatttggatattaaagataatctcagctcttaccggactgaaaagctgaaagacatactgaatgtcaggatggagatcattgaaaaaattcagcatgtgcgttctcatgaactggatttattacagctgtgtgatttatttatcggagctattgcctataatctgaatcagacagagaaagcgtcggaagctaaagttcgattcatagaaaagttaaaaatccgtacccggacggatctggaaagtacaacttcaaaaagaatttcaaaattcaacttgtttagaattcagatttgatatgccccttaatctgatcaagacatataattctcttttggaattggatgcgttcgatgaggaggaacgtaatgcatcgttaatgggcatttttaaaagggattttgtcgattcgggaaattatttcaggcaaaagaaggtattaccgacattgtcacaagggaaaaatactttatccatttttttcaatcatttgattacaatggaagatcgcttgcatagggagaggatctatgaccggaatcgggcggtgaggctacattggattaaatatcatctcgaggaaagacaacctgaacatttgcaggtgttttccgtaaaagacaaagtagccattcgtacttacctttatgatgtacaggaatcttatgttatcgttctggaaccccggggaggcaatcggtattatttactgactgcctattatcttttgggaagaaaccggtataaaattgaacataaat

SEQ ID NO: 6180 - DNA, 254 bp, Unknown
  gut microbiota DNA sequence
ctggctctctataataccaacgacaacagccgtaactatttcttcggactagagtctttcttcttttctattacctccatcggtgttcctttaattataggcgcatttatcagccagatagatggaaaagaagttttcggattcctcttcaatatcaatacctcttactgtgtagttacgatggcagcagtagtcattaccgttatcgcctgcatgacactgtggaaaggtaaattcgagaaccccaaagaaac

SEQ ID NO: 6181 - DNA, 413 bp, Unknown
  gut microbiota DNA sequence
ccgtcaattcctttgagtttcatcgttgccgacgtactccccaggtggctcacttaatactttcgcttaatcccgtacaatatatcgcacagaaccagtgagcatcgtttacggcgtggactaccagggtatctaatcctgttcgctacccacgctctcgtgcatcagcgtcagttacagtctggtaagctgccttcgctatcggagttctaagttatatctatgcatttcaccgctacttaacttattccgcctacctcgtctgtactccagtttaccagtattaatggcacaattgagtttagctcaaatatttaaccactaacttaataaaccgcctacgcaccctttaaacccaataaatccggataacgctcgcatcctccgtattaccgcggctgctggcacggagt

SEQ ID NO: 6182 - DNA, 569 bp, Unknown
  gut microbiota DNA sequence
atgaagagtttgatcctggctcaggatgaacgctagcgacaggcttaacacatgcaagtcgaggggcatcatgaggtagcaataccttgatggcgaccggcgcacgggtgagtaacgcgtatgcaacctgcccgataccggggtatagcccatggaaacgtggattaacaccccatagtacttttatcctgcatgggatgtgagttaaatgttcaaggtatcggatgggcatgcgtcctattagttagttggcggggtaacagcccaccaagacgatgataggtaggggttctgagaggaaggtcccccacattggaactgagacacggtccaaactcctacgggaggcagcagtgaggaatattggtcaatggacgtaagtctgaaccagccaagtcgcgtgagggaagactgccctatgggttgtaaacctcttttataagggaagaataagttctacgtgtagaatgatgcctgtaccttatgaataagcatcggctaactccgtgccagcagccgcggtaatacggaggatgcgagcgttatccggatttattgggtttaaaggg

SEQ ID NO: 6183 - DNA, 195 bp, Unknown
  gut microbiota DNA sequence
cactctgtatggagggcggttcaccacaaagtctacctccaactgttttctgacaaacttaccgttcttatccttgccaccaagttcaaccaatcctacgtccacattatatcctcgactgcgaagttcattatagataatgttttccataatgtgcgtttcttcctgctgtcgatagttgagaatggctgcacg

SEQ ID NO: 6184 - DNA, 3335 bp, Unknown
  gut microbiota DNA sequence
tttgattgtcgctaagttactaaaaatcaacgatatgtgcaactttttactcatctttatcaacttaaattaattccgccaacgggtaacaatcaattaaaaaacaacttgttatggtaaagaaatttttaacaatcatgtttgcttcagtgatggcaatgctcgctttcactgcttacagcaacgacgatgagccacaaggaccgtttggagaaaaaatgttggagaatatcgacaagataatagtcgaccaagctgatgccggaaatctctatcagaaaaaggatgatgctgcccggtttatattggtagcagactcaaaggaggctgcccatggagtgtgtgagaagttcattctcgatcagtgggacgtaaagcaacgcactgtcaaactccctgacaactgcggcagaatctcactcacacccggttcggacgaaagtatcttttacaccgtttcgttcaatgctctcaagaatttcaaagaaccggacatgacagtcgtaatcgttccggaggaatacatggacggggataatcttgctatagaccaatacttcccggcaagatggactgaaaaatgtcccaattgtggtcataagtggaaaacatttgcatccggaccatatacatgctccgaatgtggtcataagtttgattagtatgcacaatactttccgcgctatcttggcaatgacaacgttcctggtaacaggagcgttgtcatcctgtaatcataccgatgagttggagccggaatctccggcaccacagattgtttttctcttctctccggggggattgggtgacatgagctataatgaccgtatacttgagggtgttcagagattcaagatggaaaacggagatatagacatctatatctactccccggaatccctgcaagaggctgagaaaatttttgcggactggcttgaacgtccccaaagcagcatacccgtgctttttgtattgggtagcagtgattatgagccaatggcggaactttatctggcagaacacgacttgacacccaacaaaagtattctgctttttgaaagccggaaacagtataaggacgagaacatccataccttccagatttcgatgttcggggcttcataccttgcaggagtatgtgcaagaaaatgttctgagatgacacctctggtgctgcttgccaataataccgacagccccatcaacatagccaaggacggttttattgcaggctatggcagcgactgcgatgtggagtatctggcggatgattggacgggatatgtgtcggcttcgctcgcttaccggaaaatgagcgattgggcggttgattacgacttcatctttccggtggcaggtggctccaacgccggtatataccgctactcccgtgaatttgaggtctcaccgtaccttgcaggtatggacatcgatcagtcaagcctctccaaccggattacgggttcggtcattaagcatattgaccaattgatttacaggtatctgacggaatgggtcgtcacaggggatatgccggagaaccaactttacggtcttgaaagcgggtatgccgactggctggtcgcaccccgatacgtgaatgatttcagcagcttagtcaatggaatgcgccctcaggctatgatttttgagaaagagtattatgaaacaagtggttattaaacttattgcaccgctcctctgcctgattggtctgtggagctgttcggacgatgagccttccctgtctcctgacaacaagcagtggacagagaaggttgttgccgtggtgcttcccatggagaaagggcttgatgtgcattggaaaaggacattgggaatgtttacaaccaactttgagcgtgcattcaagaaccacgaagcgggtataaggttaaagtttgaatactacgatgaggcaaagaccgatgtgcgggaacttgcccggtcgctggcattcaacgacgaggtgtatgccgtaatcggcgggctgtattcttccaatgcggcaatcctcgcggcggaactgactattgtgggcaaaacattcttcactctcgccaccgccgaacaactggttcgtgcatacgcatcgacaggctatctttgggcgatgaccgagaccgacattacgcaatgtgaggtgcttctctccaaggtgattaactatgagggtaaaagtgtggcacttttggtcaaggagaacgacggttacggacaaacgttcattgactggttcgcatttcaagcacgcgaactgggcttggaaaacatgggatgctatgcttacacctctgacaatatagctgatgtgtctcgccaagccatgcagtcaggtgcagagtatgtgatatgtatcccctctgaaatagaagagatgaagccgatgcttgaagcgcataaagcacaaagtctgaacgggcgcagtgtaccgcggatgttgttttcggataccgcctacggtgcggatgtactcaagattcacggtgatgccgccgaaggcatagagggagtcgcatttggtgccgaccctgagtcggggtttgacgtaagttacaggacctttttcaatgctacgcctactcttggagaatctcagctctacgatgccgctatgctcatcggctatgccgcatggtaccagcagttcagaccggagttgtcgttacagaaatcattaagggccgttgtttcgggtgaaggcttgaacatgggcagctggacaggtgaggatatggggcttgtggtggatgcgctcgctgccggaaagtcgccctatgtccgtggagcgtcaggacatttaaggttcgatgccaaggtgtttaccaatgtacttgccaccacttactataatttcaaggtttacaacggacagtacatcatccttgactataacaccagcgacggggggaaccgcacggatgcgacacttgccggttggaactggaaagccttccggatgcaggatttcgacaattcaggagaattcaattaccctgcacataccggcaactgggcactccttgtcgcttcctccaaggaatggaccaattaccgccatcaggcagatgtgctcgctatctatcagcagctcagacaagccggatataccgacgaccgtatcattctcattgtcgaggatgacatagccgataatatatcaaatcccaacaagggagtcatacaggtgactatcgggggaaacaatgtatacgaaaatgtagagattgattatcgtatgtcatcgttgaatacaaaagatatacttgccattctcagtggcgaaaaaagcgaaaaactgcccacggtaatcgaatctactgagaacgacaacc

SEQ ID NO: 6185 - DNA, 239 bp, Unknown
  gut microbiota DNA sequence
tatgtaaaagtatttatctttgcatccgctttcgcctcgtaagtggggcgggtaaaagagaagcaaaagagttcttaaagatattgaaaggtttgaaacaaacagcaagtgcgagtccgagaataaattcgacggatataatgactgagcgaaagagatacttttaaaaagttttattactatgaagagtttgatcctggctcaggatgaacgctagcgacaggcttaacacatgcaag

SEQ ID NO: 6186 - DNA, 386 bp, Unknown
  gut microbiota DNA sequence
ggcaccactttttaagaaagaaaaacgatgtaaatccctgaatttcaaagagattcggggatttttcttttccaagaataggcaaaattagtgggattagagcaaactatacgtccttattcaagggactgttttcaaaagcccgaaatgttccactgcgaggtatttacttcattcttttacagtctgttgcgctattttacataacagggttctcggttcgatttcctaactttgtatcattaaaaattgagccgtatggaaagaaaaagattcagcgtgttgttcttcatcaagcgtagcaaactgttaaaaaacggggaagcacccgtgcgtgtgcgtgtcacttatgaccgcctatacgtggaacttcaactaaagcggag

SEQ ID NO: 6187 - DNA, 1068 bp, Unknown
  gut microbiota DNA sequence
gagaaagatgggaaaaatccccaacgattgtccggagcaaaacgggatgatccatcgtaacgtccgctgaactccaagaaatagatattccggtagttccagttaaggcgggcaaacatacccattgtagcccagtgcgaccgagcttcggctgcatagggagttccattggcattatcaaaagagtaaatatcctcgctcaacataccgtccttatacatatactcactggagttttcctgcaattccatctgaaagcctgccatccccttgaagaaatgatcgccccactgacgggtataggcaccggtcacactgggcgaaagatagtaattgaacacactgccgcgcgtcagcgaaccgaactgggtattctgccacttcataccgggataatggtatccctgcttattgcccgatacttccattacagaaccattaggcaacgcataattacctttacgcaactcgaaactattgttctctacgtccaaacgggctttcatctcgcccacaaactccagtccttccagcggagtgataattgcagaaaaagacattgcatccgatacccgattctggctatagcccgccttttgcagataaagttgctcgttccacgtaggagtggaatactccgcctgctcgacagggagtttcgtgacacggcttggcgacatattagctatcgttccataaaaaatagtctggtttgccaaaggtcgtttcaaaagactcaacgacacattattattgaaattgaacttcagccaatctgtagcacgtatggaaaacttagtgttcacattatacttctccaaatcatcctgcaccttatccatcaagccttcctggtagatataacccaaacctacataataagaagtcttttccgaaccgccctgtatactgatattatgagaatggcggatagcacggtccttgaaataataatcgaaccagtcggtattggcatactgcgcattatcggctgccgcccaaccgtcacccgactgattgacatctataccgggaaactcggcagaataaggattctgcataaaacct

SEQ ID NO: 6188 - DNA, 669 bp, Unknown
  gut microbiota DNA sequence
gccggagtatttgaaataatttcttacctgaatttgaaatcaaattaaaattaagcagatgttgaatgtcagtcaatttatagccgaccacataacgggccggcaaaagagcatgttcgcagcggacattgaggcgaaccgggataagcttcgcgcggaaatagaaggtaaacgtgttttggtgatcggcggtgccgggacgatcggttcgtcgtatatccgggcggtgctgcctttccgtccttcaaagctggtggttgtggacatcagtgagaacgggctggcggaactgacgagggatctgcgctcgacgtacgggatgtatgtgccggaagaataccggacttatccgctcagttttgccgatccggtctttgaaaagattttccgggcagagcagggattcgatattgtggccaatttttcagcccacaagcatgtgcggaccgagaaggataaatattccgttcaggcgttgctggagaataatgtgctgaaagcgcggaaattgttggatttgttatctgaatttccgccgcgtcatttcttctgcgtgtcgacggataaggctgccaatcctgtaaatatcatgggagccagcaagaagatcatggaggaaatgatcatggcctattcttcgcggttcaaaatatcgacggcccgttttgc

SEQ ID NO: 6189 - DNA, 470 bp, Unknown
  gut microbiota DNA sequence
gtctttgccgaaagaggttactttttgtatcgatgaagtggccggatttacccagataccgatttttgaaaagttacggcttttatctgtaggaaaaagttcgatgtaggttatgtcgttgcccgtgctgaccagtttttggtcgaatccttggttgtggatatcgaaaagtgtcgtcggattcaacatctcttcttcttcattgggatttttgatgttgacttcctgtacttccggcatataggtatagatatttttcccgtcgtaatagttttcaacgtccatcacgttgagtttataaagatttcccttcatccaggcttttccttcgtgcatttcatggatattttcgctggggttttccatcgttagggtaaagtcgatttctgctgccgggtaagctttgaattttgcagctgctttatccaatatttcttttgctttcgggtcgttttgtgcaaatactgcat

SEQ ID NO: 6190 - DNA, 902 bp, Unknown
  gut microbiota DNA sequence
tcgacaggcaaagaccgaaactccgtagaacttaaccattacattgacgccttgcgtgtgaaattctatcagatttaccaagacttggaactggagggaaagattatctccgcacgtgccatagtgaaccgctatcagggaaaggacgaaactttcaagacattatacaatgtgttcaaggagcataacgacaactgccggaagctaatcgggacggactatgccgacatcaccgtaagacgttacgataactgccttaaatatctcatggaactggttaaacgtgactacaagatagatgatatactactacgtgaggtaaacggggaactggtgcgtaaattcgatttatacctaaagacagaaaagcattgcgcacaaaataccgttatccggtacatgaaatgcttcaaaaaagtgataaaccttgccattgccaacgagtggctgacaaagaacccatttgccggaatcaagtttcacgaggtagaggtaaacaaacagttcctaagccaatccgagataaaccggatatggcagaaagagttcaagattgaacggctggaactggtacgggatgtttttatcttttgcgtatataccgggctggcattcatagacgtgtataatctgcaccccgaacatatttccgaggacggcaacggtaatctgtggatagtgaaaccccgtgaaaagacaaataacctttgtaacatcccgcttttgagcattcccaaacaaatacttgaaaagtacaaggataacccctactgcatggataaaggaactttattacccgttccctgcaatcagaagatgaacagctacctgaaagagattgccgacctgtgcggtatcaaaaagaacctgaccacgcacacagcccgccatagtttcgcatc

SEQ ID NO: 6191 - DNA, 315 bp, Unknown
  gut microbiota DNA sequence
gtactgtaaacggacacacgtggtcgggtagaacataccaaggcgctcgagtgattcatggtcaaggaactaggcaaaatagtcctgtaacttcgggaaaaaggacgctctagtgatagagccgcagagtaatggcccaggcgactgtttaccaaaaacacatggctatgccaaatcgaaagatgacgtatatggcctgacacctgcccggtgccggaaggttaagaggagagctcatcggaaacgagaaggtttgaattgaagccccggtaaacggcggccgtaactataacggtcctaaggtagcgaaattcc

SEQ ID NO: 6192 - DNA, 565 bp, Unknown
  gut microbiota DNA sequence
atgttttctatttttaagttcgccaccatgctgaagaactcccccaatatggggacaggcagcctgaccacccggaatgatccgcgtgtattgcctttcggccgttttttgcggaagacgaagatcaatgaattgccgcagatattgaatgtactcagtggaacgatgagtatcgtagggccgcgtccgcagatgaaggtggatttcgaacgttttccggaacatgtacaacgggtgatttataatgtgcggccgggaatcacggggctcggctcgattgttttccgggatgaggagcggttgttgtcgcaaccggggatcgatcctgtcgtgttttatacggagaaaatcgctccgtataaaggtgaactggaaatctggtaccaacagcatgcttcgttatggctggatattaaactgatcttcctgacggcctgggtgatcgtgaagccggaaagtgagctgcctttccgttggctgaaaggactgccggagcggccggagtatttgaaataatttcttacctgaatttgaaatcaaattaaaattaagcagatgttgaatg

SEQ ID NO: 6193 - DNA, 948 bp, Unknown
  gut microbiota DNA sequence
aaatattatatttttttcaaatgacatagaaaatagattaagaaaaaacttcttaggaaaacaaattatctcttcattgaaaaaagaagataaacttccaataaataaatatgctaccccattattattcacaacagattcaaacaatattatacaaaatgtattcattccagataaagacaatatagaatcgctaagaaactatttaaaaagaatgaaaataatttttagcaataatagataatctgattaaatcgtagactatataccaaagaaacaagatatggcatttgattactatagatttgaacattttgcagaaaaaagagctgagagtagctaaaatcgaaacttattttcaaaatgatatcgattattggatgtcacccgattattcctatcttgtagataatgctttgatttatagcatacttccttcaaaagttgtagataatagttcaagttcaaatacattaatttcaaactataataaaacagtaatagagaaattaatcagtcagactaaaatagacgataatccaatcattatgttatgccatctaaaataatctaaatgaaaaacattttttatattctatttattgctttttatatcaatgtactaataatgtggacttttataatcaagcattacagaagagtacttttaatctagattcaacagaaataattatattagttccaggctcaggatgctcaggttgtataactaaagcagaacattttattgccaaatatttcaataagctcaataaggtgaaatttatattaacaaatattcaatcatataaaatattaagattaaaacttggagaagaagcatttcattcacctcttctgtaccttgataaaaataatgtttggtataatacaaaaaatgaaaataatatttatcctcaagtattatttataaacaataaaaaaaat

SEQ ID NO: 6194 - DNA, 7763 bp, Unknown
  gut microbiota DNA sequence
aaatttagaaaaaatcagacaaaaatacaataaatccatcccagtatcctaatttatagaagcagttatataccatttacgcctacaaacgtagttttatttcgttaccgattcgcctgcagagatcggttttggtaatctagtcgctttagtcggtcggctgtctttatctctccctgaccgacacaacttttcaaggagctaccgccattccatccgtaccccacctcccgtccgccaccagcaaccacacaaaatccatccgtccccgtacaggacgatatgaatggacgcttcgcctctcttgggaaaaccgaagccatgtcggggtgaaggagatgacttattacacaaactcccgacaggtatacagcgtttcgaggatcttcgctcagagaagggttatatgcagacaaaagggaattctccgattcctgtgtcacccgtaatgaaaggcaacgtaccagcctgtacttaagatcatttcgttactgattcgtttgcgacgaccggtttttccgaccggggctgacggtatagatccaggaatcggaatagaaagaaaaaatatccgcttataccgctttcaccgtttactcacaaactcccggataaaggcggtcgtttcgtcgataccgtaaacggaagaactgatacacaggtcgtatgactcggcagctccccagattttgtcggtatagtaattataataagaagcccgggatttatctgctttccggatatattcctcggcttctttctcttcgatatgagcatactcgacagcccgccggatccggtcctccatacgggcactgataaaaacacttatgcaattttcattatcccgcaaaatatagtctgcacaacggccaaccaggatacacgactgttcggcagccactttacggatcacatccgactgaatctgaaacaacgattcgttcgacaggtaatcgttactttgaaaaatggcgttattcatcgaaaaacccatagctaaagctttcagcaggctaccggaattccgttcgtccgctttctcgaaaaattcaccgcatatgccgctttctttcgaagccaggttgatcaattctttatcgtaaaacgcaatacccaattgttcagccagcttcttaccgacatagcggccaccgctaccgtactgtcttccgatggtgatgattattttcttttccataaatatcagtttacaaactctattacaaagctaccgaatcttttgcattattcaatcccccggtcttgaatttcttcaattgccagcccaacatcaacccggttgtaatcgaagcgataaaatccgctaccggaatacttccccaaacgccgtcagtaccccaataatgcggcaggataagaagacagggcaataaaaagatcaattggcgggttaaagacaggaaaatcgcttttccggccatcccgatcgactggaaaaaactcgaggataccatctggaaaccgaccaaagggaaaaacaaaagaatcaggcgcatcccatgttcggcaatatcgatcaaatcggaatcaccggtaaacatccggataatcgtccgtggaaaaatctgacagatcaaaaatcccagagtggtcacggtaatggcacataaggtcgtatatttcaatacctgaatcatccgggacagctgccgggcaccgaaattatatccggcaataggttgcatcccctgattaaatcccataacgatcatgatgaacaaaaacacaatacggttgacgatcccataagctccgatatacatatctcccccgaaatctttcaatccattattgatcagcaaaacgatcagacaactacaaagattcatcaggaaaggcgacaacccgatagccagcattcctccgacaatatgccatctgaccttgaaaattcctttttgaaaacgaataaaacttttcggactggaaaaatggtacaacaccccgagcaaagccaaaaactgggcacagatcgtccccagggcagctcccttgattcccatatccaaaacaaaaatgaaaagtgcattcagcactccgttgatcaagacggcaaacaacgtcgccatcatcgctctttgcgggtaacccgaagccctcatcacctcattgagccccatataaatatgagtaatgaggttaccataaaggattaccttcatataatcgcgggcatacggcaaagtgtccgcactggccccgaaaaaataaaggatcggatccagaaaaatcaggcataccgtcataaacaaaaaaccgatcacggtattcagcaaaagtacattcccgagcaccgcctcggcacttttcaaatccttttgtcccatcttcacagacaccagtgtagaagctcctactcccaccagagagccgaaagccgccgccagattaataaaagggaaagtcacggccaaaccggcaattcccaatgcccccaccccgtgtccgataaaaatactgtccatcatattatacaacgaagcagcggtcattgctacgatcgccgggacagcataacgcatcaataatttcttaatatcctctgttcctaaagacagaggcgattgttccgacataaaataaattttaaaattaaacactcatgccacccacctcctactaaaagtcttttttttactttctacctttctccccgcctttaccctctccctttccagcttttaccctttagtttctactcttcagcctttagcttttaacctttagcctttaacttttagcttctaccctctatcatctccctcaacgccccgatcgcctcctcttccgggacggcagtacgcaccattttccggcctttatacaggtttacctttccattccctgcaccgacatagccataatcggcatctcccatctctccgggtccgttgaccacacaacccatgacagcgattttcagcgtattcagatgtccgaacgctgctttcaccttagccaccgcaccctgcaaatcgaataatgtccttccacaccccggacaactgataaattctgccttataccgacgcactccggcagactgtaaaatattccggctcaattccaaagggaaagtcaggtcctctatttccggtgtttcgatccaaagaccaccggcaagacggtcgagaaaaaaaccgcccaattgtgaagccgccacaagacggattcgttctttctccttccccggcacgacagcccggataatcgccggattagtcaggccggcctcctgtatccggcggaatatttcccggtaaaggcgatattcgacaggcagtgccaaaaccaacaccgctttcccatcctgccgcaaccggccggttaaatcggcatccagttcttcggaccggcagatctgcaccaatctgtacttgctatcgatcgtctgttccccctttttatatgctccgacactgcataacggagaagcattccggttatagacatgagccatatccagaatctccagaggtacgataacccctgtatccgggggtaatttagtcaattccggtcccaatgtcccggtataaatccattccggtgcttttataccggcatgcaaacggtcaccatataccggatcattgacctcacttacggtaaaaccgatccggttcatcacctgttcgtccaatacggttactcccgtcaatccggccacgatacaaggtttcgaacactctcctttcaatggggtccaccctttcagatactccggttcggaacagatccgggccaattcgcaagccacaggaatctcggcttcgggttcctcggtcagggacacccggatcgtatccccgattccttcattcaacagggttccgatccccactgccgaacggatacgtccgtcttcaccctcaccggcttccgtaactcccaaatgcaaaggataacacattccctcagcctccattttctccaccagtaaacgtacggcatccaccatagtccggcaatcgctcgatttcagcgaaatcaccacatctttaaagtcacaagcctgacacacccgcaaatactccatcgtagcctccaccattcccgccggggtatctccatagcggctcataatacgatcggacaacgaaccatgattcgtaccgatgcggacagccgttccatattgccggcaaacctccagaaactccgtaaatttctgccgcaggatttccaattcagctgcatactcctcatcggtataggtcagcttcttaaaagtggcccgtttatccgcaaaatttcccggatttatcctcaccttttccacataacgggcggcaaccgaagcagcctcagcaacaaaatgaatatccgcagaaatcggagtcgtatatccccgttcacgcaaacgacggtgtatttccccgagcatctccgcttccttcactcccggagcagtaatcctcaccagccggccaccggcctcgataatccggatcgcctgttcgacacaagcatccacctcccgggtcgacgtattcagcatcgattgaaccagcaccggttcttccgatgaaagaaccacatttcctattcgaacagcagttgttttccttcgcataattttcttattagatcttccacgtgatcatactcttcatattcttcgtattccggggattccggatatcctttccctcaggggtataaagaaaatccaattcttcccggaaaacttcgtacaccttgtgccgcaccaccttcgaagttgaattgaccgttccgttctgtgccgtcagaggttccggcaagatcccgacaacagcaggtaaccagcgttcgggaaacatcccttcatacatgccacccttacggaatttcatcagttcctcattcaatttcgtcagcatcagcttacaagcttcaaccgttccgggttcttcttcccgttgttttacatattcggtcagagctgttttattcggaacgatcaggccggccgtataaggcgactgattattgtacaacacacaataatcgatatagggggataattcggcaatagcttcttcgattccttcggggctatatttttccccgtcgccggcaatcagcagtgatttaaaacgtcccgatacaaacaacgacccgtcttcaccgagataacccctgtctccggtatacaaccagccgtcgcggatcgtcccggccgtagacttctcattcttccaatatcctttcatcacattcttcccccggatgacgatctctcccttttcccctttcttcacttctgtccctgtttcgtcacaaatcttcaattccaaaggtttcactacctgtcccgaagacccgaaacggtaacgttgcggacaattggaactaatcaccggagaagcttcggacaatccgtacccttgcaacatcgggatacccagggtacagtagtatctttgcaattccgtatccagtaaagccccacccccgacaaaaaattgcaggttaccgccaaaaattttccggatcttcgaaaataccagtatatccatcagcttcaccacaggccacagtagcatacgtccgcctttcccccggaaatttccctgaccatgatagtaatatccccatttcagtcccagtccgtaaagtttccggatcagccatccccgttgccggatacccgtctcgatactccgccggaaattcttggccaaagcaggaacgctcagcaacacatgcggctttatctctttcatattcaacggaatattacgcagatattccatcggtgacttaccgaaatcgacggctgccaacgaagccccgttatacataaacgaataaatcccgacggtatgtgcaaaactatgatcccaaggtaaaaaaagcaaaatccggaaatattccggaatacggatcagggaatcggattgcaacacgttactcacataattctcatgggtaagcataattcctttcggctcggccgtcgttcccgaggtatatgaaatattggccagatcggccccactaactgttacggcctgtttttccaacattccagggtactctgtcacccaacgttttccttcatctttcagacgttcgaaagaattatattttccttcctcagccgaagaataacggatgacataaatcttttcgatttcgggaagttcagcttctatccgccgcaaagtcgctacataataatccgatacgatcaggaaacgggccccggaatggcggacacgaaatatcaattctttatccgtgagtttaatactcaggggaacattcacaccaccggcatataaaatacccaattcggcgaacacccaatcgttacatccctcactcagcaaagcaacgcgatcgcccttctgcaaacctccggccagcaaaccggccgccacatcacccacttcccggcgagtttgccgataggtcaccgaccgataccccccttcacgcttttcccacaaataagcattttccggaaacttcaggcaactccgttccagcaaatcgatcaatgtatgcaactccccgttcttcatggggacaaagatacaaaaacgtgcgttcaaggacaaacttcagggaataatctcccgttttcccaaatgacggggacctttatggacaacgatgtcgataaaaactttcacccgggccaataattcccggacccgggtcttaacaccactatagacatcgacatctttcgcattaaaaccgacggcttcgattccattccgcccggcaatatacagggctctctcgttatgaaaccgttgggagatgatagtaaaccgatcctgtccgaacacttttttagccctgatcaccgaatcgagtgtacgtatcccggcaaaatccattacgatcacgctatccgggattccatgggcgatcaacgctttccgcatctcaaccggttcgttataattcatgcggcgattatctccactgaccaatatccggctgatcttaccggcctgaaagagttccacagcagccgtgatccggtaattgaaataaagattcggccgaccaccccgcaacttcggagaagttcccaacaacacccccacccgattttcgggaattgtttctacctgatcatacaaacaactttcagtactatgaatgataatccgattacacaacagaatcgttcccaacaataagataagccccaataataaaaagcggacacaatattttatccatttcctgcctgtctgtctttttctccatatcaatatatatttttgcatactctgtcactcacttagtatgaaataacaaatataaataaagaattcatctcatcaaatagccgaaaaatttataccgactatcactcaaaagagagttaattcgtgattataaaaacaatcaaaaaacatgtacaaattttgatgtatatatacatgtttcccctaaatgtaggtttattttttctttctattccgattccgggctttataccgtcagaccggttcgcctggaacggtccgctaaggctttccttcactgaccggcggaactcctcactgcgttcgtcagacaccaccggtcgggcgttcggaaaacctaaccggacccttgttcccgctccaatggtcttccgccataaaaccctgcatctaacggcagagctaaccggcaaagaaaatacaaccggaaatttgcagtagcaggaagccagaccgtccggattatttccaggtagaatgttatttctcaaatcaagaccggtctgcaattcagtgata

SEQ ID NO: 6195 - DNA, 195 bp, Unknown
  gut microbiota DNA sequence
cgtgcagccattctcaactatcgacagcaggaagaaacgcacattatggaaaacattatctataatgagcttcgcagtcgaggatataatgtggacgtaggattggttgaacttggtggcaaggatgagaacggtaagtttgtcagaaaacagttggaggtagactttgtggtgaaccgccctccatacagagtg

SEQ ID NO: 6196 - DNA, 1227 bp, Unknown
  gut microbiota DNA sequence
ccgtttttttctgataataggaagctttgatataaagcaggcgtttccataaactcagttcaacaccggcatcccaggtattcgtcgtttcccaggttaggtttgtattccccaaagcatagagggtaccgccgaaaccggttttataccaaccgtccgtaaacattttataagtcgttcgggctacataaggcggaaaattcactttcccggtttgtccgtatgaaacccgtattttcaactggtcaataaccgtttgtcctttcataaaaccgtagttatgaatattgacaccggttcccgcagaccagaagggagcaaaccgtttatccgccccgaattccgaagaaccgtccatacgtaccgaagcatccagcaaatacacatcgttataactgtaattcagggttcccaggaaaccgatcagccgggtagaattatcggaacttaccggtttggaaacaatttcttcggcataattcggagaactcaaagccccggaagggaatccccggtaagaagccgaaatgttatcggttttggcagagcgggcattcacccccaacaacaaattgatatggtgtttttcgacagaacggttataagacagggttgaactcagatcccagtagaactcatttccccggctggtattcaattcgccggaagaaggattttctgcagtctggggagttgtatttttcgaagacaacggatccagaaaacgtttcgtatcggtaatcttacgcgtcaggctgaattgagttttccataacaaaccggtagttatattccagttgatacccagattatcgacaaactcttcatatttggatttatcgaaattagaaagcgtcgactcatacaggggattgggacgttttgcattctttccgtcccaattgggcagattttccagatagtttcccttatcgtccttataaggatcgtaaggctgacaaccggtatagtcggaaaaagccccgtaaggagactcctgcgaacgggtattggtataagtgaccatatttttgagctggaatgaaccgatccggtaatccagatatacgccggctcccacccggttccggaaagactctttcatcaccccgtcttcattattgtagctcaattgtatgccgaaacggaaattatccgatccgccgtcgacgctcaggctgtgtttgtgattgaaagaggtctgtaacggtttcgataaccagtaag

SEQ ID NO: 6197 - DNA, 2748 bp, Unknown
  gut microbiota DNA sequence
gtgaatatggatagtttaataataaaaaatgaaataaagaatagagaatactagaaattaatttaaacggaacggatgaaaaaaagtagcccttccatccgtgacttaatcgaaaccaggttttgatttcagtcaaaatagaaaggactacacgcaaaaaacaaacgaaaatagcggaacaagaaacatctccgctatataaaatgataatgttatgaaaagagtaaaatttattgttgcatcattgttattctgtacgatgagttatgttggttacacaagttatgaaaaaatgcctatgtctgatgccgagaaatttatgcaggtaaatgtagaggcgttgacaagatcagaagggggatctgagggtggtaaatctttgtgctacaatagttacacaaaagcagataacaatcagatactaaggtgtgtttcttgtgattatgtagatggaataggtaatgggaaaactggttattgtaaatggtagttttttgtactataatagatttttatgtagattaaaccacagtaaagttgaatttatgtattaatggactattttgtataattaataactaatgaagaaagggcttgattttcttttcgagtcttttcttcttgaaaataataagatgaaaaatttgttgtctataacattctttgtattatgctatgcttgttcaagcaatgagcgtatttttgatgttgataccgtattaaacttagaagcgtctgaatgtatggaattgaaaggagaaagactccctatcgatgctctcggtggatatggaattaaagtgtttgatacattattggttgttacgactgataatcctaatcattttcgtgatgtgtacgggttgaaaagttattcattgttgtcccaaatattaagaaaaggtcgtgcaaagaatgaatttttatttgctggatacaatgggcaaaatgtaaaagaaaatggatgcataattttatatcttcacgatttaaataaaaatgttttttggaaatataatttgacagaatccataagacaaaatatggatataggaaaaattatctataaattaccaggaaggtgtcaaggtgcttactttttatctacagacattttttgctatcaagatattgtgtcgggcaaagggtatttgtatgtaataaagaatgtgaaaaaaaatgaggtgatagaagagtatactataatgaaggatggggaaattcctcttagtagttatataatgaaagataacgatgtgattatttgttattcaaggaatgtagatcagttgatgtttatagatataaataaaagaacaaaaatatcagtatcaacttcaaatgaacagcccacatggtctaaattgaactcggagttgaatggcgatcccaaagtgttctatgattatatagcaacaacagaacaggaaatatatgcattatataagggtaatccggactattttgaaatccattgtttttctaaaacgggtgattttttaaaaaaaatgatattgaaagaaaaaattatttcctttgatgtagcaggaaatactatatacggattaacaacggatgaagaaatttttaaatatcagatgtaaatgaaaactaccttatattttatatatctgttattacttgttttgttatttgggtgtaatgatactaaaataaagagagagattcagcaacttcaaagcaaagcaatatcttttccctataatatgaattttacaatacatggtagagatacgttgatttcagaatatgttgaaaatggattaaagttggtgatatatacggattctgttgaatgttcttcttgtgttattagtaaaatgtatttgtggaacagtattatagaaaatacggaattatataaagataaattgaaattttattatatactatctcctcaaaggcagcatatagaaaaggtacgatcagctttaaatgtgatagattttgaatatcctgtgataatagatactttgggaaagtttgcaaaattgaatccccatcttccggaaaataaggctttacatacatttttattggatgagaacaataatgtgattctggtcggtaatccgttgcgtaataaaaaaattgaagaaatgttttatcaaatcgtagaggagaagttaggtaaaccggaatgagtttgtaaatgataaaaaggattgatgatgagaagttttatttcccggatgtggccggacatgttgttgagtatggtgtttgtcgtgtcgggttttgtcaaggcgttggatccagtgggattgtcttataagattgaggaatatttgggaatgtttcagctttcgggctggagtggactttccatgttgttatcggtgttgttatgtgcagcggagttaaccttgggactgttgttgctactgcggttgtggcgaaaactaacggcagtggtgttgacactttttatacttgggtttacgattcttacttattcgatttatacggatccctatggtggtataaatgaatgcggttgttttggtgaagcgtttcatctttccaacggtgctacttttgcgaagaatctgattttgcttgttgtgtcgggttttcatttgtggaatgttttccggcaggctggaaatgattttaattaccggcagctcgggttggtttccggggtgctgatgttggcgttctttgtgccgctttatgcttatttttacctgcctcctttcgattttttaccttataatgtgggtt

SEQ ID NO: 6198 - DNA, 886 bp, Unknown
  gut microbiota DNA sequence
ttacggtggtataaatgaatgcggttgttttggtgaagcgtttcatctttccaacggtgctacttttgtgaagaatctgattttgcttgttgtgtcgggttttcatttgtggaatgttttccggcaggctggaaatgattttaattaccggcagctcgggttggctgccggagtgctggtgttggggttctttgtgccgctttatgcttatttttacctgcctcctttcgattttttaccttataatgtgggttcggaaatcgaggcagaaaatgccattcatctttatgatacgggtttttaatgaagtgagtgatcaagtgttttccggcggtaaacccacttacatgatcggtataaaggagcaaattaccccggaggtcggtgataaacttgctgctttatacgaggcgtaccgggacgggacggttaatttgtttggtgtggcttccggaggtgggatgacgattccggaatatgccgatattccggtgtattttatagatggagtggtgttgaaatccatattgaggacttctgtgggggtagtagcttttgcggatgatcgtattgtcggtaaatggaatttgttatataccccatatcgttttgacggaggatacggagacgagctgacctgtgagcgggtaaagagaggagcatttttcgtagtattggctgttatgattgtgttgttgttttactgatataaaaaataaaggaataaacaaaggaatcagcaaaaaaattacaaaaatcacaaaaaattgcaatccattcgcaacctttttttttgttttttggagaaaatgtgttcatttttggggtgatataaatttggtgaatatggatagtttaataataaaaaatgaaataaagaatagag

SEQ ID NO: 6199 - DNA, 11975 bp, Unknown
  gut microbiota DNA sequence
aagtgattatactggggcatcttcatatgccattgtattttatagggacatttactgaatattcctaagtaataagaatttattacaagcttaaatatcaaggacttctcaatactgagaagtccttttttaataatgataaagaataatcctcaataagtattctgttgaatttgaccccggctcagataaatctcattactgtttataggttcggcaaaccgacgatcttttaattccaaccgatactctatcggctgggattctttatttacaatcaaaccgtcatgtgaatagaatatacgtttcaggttcacatcatccaaagtcgtttcgttgtaattcaaccgccggatatcgaaccacctcagtccccaggtcagctcccgtactctctcttccagaattttcgcaatagcttcttcctttgtcgctgccgacaacttaacctccggtccgggtgcaatccttttagcccgcaatatattcaccgtttccatggcttgctgaaactttccctgacgagccaggcattccgctttcgtaagtatcatttcctgtaccgtagttccataaggtatactggttctgaaataaacatatccgggataagtatatttgatattatgcctccatgaaaaattctcacacatcaaatatttataccgcaaatcattttccttatcatacaatttcaacatttcccggctagggcagaaataggcacaggaagcagaaaggaaatactgataataaaactccgcccactctaattttacagaaggatcgtaaatggcttcccaccacagataaggtacttgtagtggtccctgactggagttctgttcattaccataatacatttccgtactataatccaccagacgggcatctgcctgaagagccaaatctgcatatttcaatgcctgatcgtaatcatggcagaaaagataaaagcgggccagaaaactatgaacggcaggaatacttacccgccacctccgattaacattatcgaccgtaattttgagtgcttctttcaaatcttcctcgacaaaacgataagattcctccagattcatccggaccaacgactgctcgaaactggtggatgtcttatgaggtattcccggttctttcatattttccgggctatagggaagacaataagtattcagcaattcccaattctgaaaagcacggataaaatgagcttcggccttcaaatcagccttcaaggcctcatctcctgtcacccgactcaaattttccaataccgtatttgccgtaaaaatatttttataagcactactccaggttccggaacccgataaatcggccacctcctgattcatccacagataataagcgataccatgttgataaaacggagctccgttattggttttatcgtacaaatccgttgaaatttccgtaatatccggacttaacaccaggctggtattgccggttgtcgtattgattgcagccaacaaagcatccagatgttccactttcgacagttcgatatttgtctttttcgaaggagctatatccaaaaagctgtcacaagcagctccgactaacatccataccagaaggcataaaatcactctcatttttcctcctgcaatttttatatatctttccatatcctttttttaaaaattaaattttaccccaacaataaaagaacgttccggtttgaccgtaccctccgggaattccgggtcatttttatatttattcgctgtaatcaaacccagattattgatctgtccataaacggcagcggtccggaaacctattttctgtaaccatacctccgggatatgccaggtcagattcaattcctggaaacgaatatgattggcattatggtacagatagtccatcgcatccgtataataactatcgtaatacatttgattggagtcttcggtatccgtcagcaagggaggcatagccttatccccgtccaataatttacttacatctttatgtacccagattttcgaagttccggtctttcccattgtcggataattgaaagaagaacgtttgaatttatgaccgaattttccggtaacaatcaaagaaagatcgaaattataaaccttaaaaccggtagtcagccccataatatggggagccacctttacgccctgtggcctgagccagccggttgcatccgaagtattgtcgtaaacggtgttcatcggcctcaagccgtcaggactactcccttcctccacacaagggataccgtccttatttaccccggcataatgccaggcatatatcgtactggcattttctccctctttaaagtcacctctcaaataagtctttgcactattatcggtaacaaataatctttctatccggttcaaattataagcatagttgacattaccataccattggatatcttttcctataatatcgagctggcttcctacttccagttcgatcccactgttcagcatttccgcattattcaacttttgactggttgtcccgttggccgaagaaatagaaatcgtcgcgatcagatctttactgtactttcggtaataatccagttttccggccagtttacctccccagaaagaataatcgattccgatatctacactcccgaccttttcccagcgaagctcgggatttccaaaactcgcaatactaccggtaatctcatgtttataaacattctcaaccgaaccgatactcaccaaaggtttaaacgaggtagaagtgtctacatttccattgtacccataggtcaaacgcagacgcagccaatcgataaacaaataatcgctcataaaactttcctgtcccagattccacattcctcccacagaccaaaaaggagcataacgatatttaggatcgtccgtaataaaattcgacgcatctgtccggacactcccactgatcgtgtatttattatcgaaagtataagcggcattgccatatagagaaaagaaacgatcggtgttaaatgtaaaggtacttgcataatcatcgactgtaatcgtattcccgaagaggtcttttatcgccagcttaccggttccgttagggaaaagtttggaagtcagcgtctcgtcattgtagccgtatacccggggagaggtataggaagttgtccggcgatgccgcaattcggttcctaacacaacattaaaatcatgtctcctgaaagtccggttaaaatttacctgattcctaaaagtatacccttgcatttccgaagtgtattggtccagaaactgccctgtcggataggccgatttcccgacgactcctgttgcatcgttgtattcggtataataattcaccggatttttgactacccaggaatcctctttgtaaagatcccgccttttggaattaaaaatctcatattgtaacgaagaggagaaattcaagccttcccataatttcagggtcagtgcagcctggaaacgggccttgatgtccttagtcgaacggtcacggcttctgatttcctgtaaaggattataaaaccagtcggaataaggaaagccattaccgaccaaccgctccatggccggcaggtaatagtcgcggacaatatgtgtataagaaccgtcccggtttgtcaggtgttcataaggagaaagatcgcttatcgcgatatcgttttcatcggatgcatagaggacggctccgttattctgctttttcacatattggaacattccggaaatatctaatttcagccacttgcaaatatcgctgttcatccgcatattgagcatatatttttcatcctgtgtaccaatataatgggttttgtctttttcatacaataacgacgtcatgacaccgactctttctcctcctccggatacggataaattgtattgctgcaaaaaaggatttctcaacaaatgtttataaacgtcatccttataatccgtctcctgcaattcctgtaaacggagccttttcgtgtcttcggaaatatttcccagccgggcttcattcaaagcgatttgtgctaaggtatagcattttccggccacatcatcttctgagaaaatcccttcattcaaagcaaccccatattttccgaaaatcatttcttcgtagcggatctgatctgcagaagcggcagtaggattggcataatccaaatctattttctgccggaagcgcaaaaaagtattaaaggcgacattcagtttatctcctttggccgctttgcgggtagtgaccacaatcacgccgttaccggatctggctccccaaattgaagcagctgcagcatcttttagtatagaaacgctttccacgtcattcggattaatcgtttcgaatcctccttccacagggaaaccgtccacgacaatcagcggttgagcgttggcattcaagctcgagcgtccccggatttccagactggcttttccatcttctgtcagagtagcctgaacgcctgctgtagttccgatcagccgggatgataaatcggaagccggtttttccaactgccgcttgtcgacgatatcgaacgctcccgtcgcacgttcccgggaaatcgtctgatagccggtgatcagtacgtcatccaaagaagttatttccggtttcatcgatatctcataatgttcacgcccgtctaaaggaagctccactgtctccatcccgatgaaagaaatcaccaataccaccttccccttcaagccggcaggtactttaaattcaaaatgtcctccgatatcggtagttacccccaaggtattttctgccttcaaataaacagaagcccccggcaaaggcaagcccttttcatcctttaccgtaccttgcactttcatctgttcactctgcaaattttttaccgccgaagcatccttagcaataacgattgcattttcactgaccgtgtacttcaatccattcagcgacaacacccgatccaaagcctgctctatagtgacttgttccatattcagagaaacatcggcaatcttacggatatcgtttaccgtataaacgatataatatccggaattctgcaatatttgattcaaggcttcctccagtgtcacccgattcaaagaaaaagaatacttttcctgtccaaaagattcggtagccatcactaaattagcgcacaacaaaaagataaccgtcattttcatgattaacgtcattttcctcaattttcctcctccggaagaaaaataaatctgcttttttttcataattttgtaattagagttaataaatacccgctaaagggttgcttattagtatccaacaaggagtgttgcctcactccttgttatttattttcccctgtccgataaagagtcacctcgttgccttctatcgaataagtcacattttcagttaatttcaaaagattcaatattgtcccgatatcttcataacgacgggttttgatataaaatttcagatcgccgaatttctccctgtcataatgaaaggtaaccccataccaccgactcaagcggggaatgatttcctccagtccacaatcattgaacaagaataaaccgtctttccagacgacgaagtcttcggcatcgacctcttttattacagtcttccggttttctgcatcatatttcaactgttgtccgggcaataacacacgctcagcatgtcccggagccgaaacagccacttttcccgtcaataaagtaatcgtcgatgcattttctccccggtatgcagaaaaattgaaagccgttcccaatacccgggtctgtacgtctccggattttacgataaaaggtctctccggatcaggagtcacttcaaagtaagcttccccgtccaattctacgcaccgttctttttctgcaaactgtaccggataattcaggctagaagcggaattcaaccataccttcgtaccatcgcccaaaaccaagcgatattctccccgtaacggtaccatcaaggtattcctctccggccagccggttttattctcccgaccgtcatatacgatcgttcccttccggtggtcccaggaaattccaggtagctgtaacgtatcacaatccttttgtaaatccacccgacaaccattacccaatactaaaacagcacagtttcctcccggctttattccaggttgcccggccgactccggaacagttatcccttcctgttcccaccaccaaaaagccgacataattccgatcatgaccatcgcagcaacacctgccgtcagtatacggcgcttccagcaacgccacttcaacctgaccgtcaatttcttaaaagagcggtcggtatcgatctgtttctccaattccatcaaacgtatcactccccttcccgaaataatccgatcgtaactctctctattcatccgggaagctcgtatccactcctccaattcctgttgttcggtcccggtcagcttccctcccgatccttttctggcaatcaatccggcaatatgattcaatctactcgtatccatattttcatcttttatcagaaagacaccattttttaagaaaaagattacacctgtacattttttttttcatttatttttctgtttcctctccaaaagattaatttaggcgcagaattacctgaggggtatggggaatgactttttatttacacggataaaacaaggagatgaaaaagctctggaaaaattcacaaaagaaaattatctctttttttgtgctttagccaaccgttatgtcaacgatgtacaagaggcggaagatattgtgcaggaagtattgatccgcctgtgggaaaacagaaggcactatcaggacatcacctgtttacgaagtttcgtatatactatgatccggaatcagtctttaaatctgatccggaatcgcaaacgttcaagtcaacactttcatctcctgcccgaagaagaggaaaacaattttttcaacattctcgtcgaggaagaaagcaaccgtctgcttttcaatgcgataaatactttagctccacaaagtgcggccatcatacaactcagtcttcaaggcttgaaaaatgaagaaatcgcccgggaattatccatctccgagaatacggtgaaagttctgaaataccgttctctgaaaaaactcaggcagctcttgcatcatcgtattttcaacatactcgctttttatatctgatttacacaaaacgacacagtttcctccctttatcagcctccccaaacgatatacagacggttcacagatgccaggacatctgtgaaccgtcttatgcagatccggactataactgaccggaagttttataaatcaaggataccggatttcccaaatcgacctcagcaggagtctgccaatacaagcgcttctcttccggtctgttctttatgagcttcacattcagaataacaaactgcccgttcgccaaagcacatcccagctgaggatgtccctgaaccgatgcagtcatatgttttaccggagcatcgaaatgccaataaaacgacacaccgtctcccggagaagcataattgtaatagtacatgtcgtttcctttcatcaataacaggtacttatccgtcgacaaaacatagggtaaacaatcctcatacacgaatccggacggtaattcctgaacagcaaggctaccctcctcatagtacaattctgctgtcgaacgttttaaagtaaaggtctgttgtaagtattttcctccgggagttttaagtatcatataataatatccaccactccaatccccccatcctctgaaatagatcaactcatgatcccccaaatcgttcagaggaacaaaaccgtcaggccatcccttgtcggcttccggaaaaacagctgcatatccggcgtagttcaccccccaaaaatcacggaaatcaaaaacagctgccagacggttacggggatttgcagccgttccacggtcgtgtaccacggtataccctaccgcctgccaatcacaatccaacaaatgtccacgcacctcttcttcaccgaccagaacaggctcggtaataaaataacccgaattaaacaaggcatcggaatacttcaaccgggtatacaaccgtccatctttattttcaatgacatccagccaatgcatccaggttgcattcaccggttcgaactgttccgggaatactccgtccataaaagtctccgacagataaatatcgcgcaataaagtattcccgtcgatatcgatacagcccggagctccctgttgtaaaatcagcaacgatcccggagcagtccgggaaaaatgctcggttatccggaccggaccactacccaatacttccccgttcgtttcttcgtagacatccgggaaagtctgattatcaaaaacacaatatatccctaaatcatccatctcgtaagcagtaatcatttcccggacaaaccccagagaagactgaccgttcttctcagacaaaatcatccagcctttacttttatagggagaatctatccggagcgatttctgattgctgtataccaatccgtttgcccggtcggttaccctcaggatcacctgtcccgtagctacagtatctacaatccattccaggttaagttcgtctccgatcgttttaccggcaaatgtccactcatatgccaaatcgagttcgtccccgttcccgcttgcaaaatgcagaaccggtttataccggaccgtatctcccagagctgcccagggataggaatcctgcccgaaaggttccacctcgatcgtatttacaaaacgataatcgttattgcctttgtcgtcgtaacaccctacagacagaaaagccagcagccaatacaataaatatattttatttttcataggtatcggaattataaattaataacaagggattttatcaaccatcggagtcacattatcgtcccacataatattatgttctatgcaataccgtttaaattgtaaggtatacgctctggcaacagaaagttcgaccccttccagggtattcacccctgtgcacaagataaactcctccatttttttggatgaatactctcccaatatcaaggactccaattctcccttccaccattccggcttgctcttcacagcggtaaaggtcagtttggctctttgttgcccatccagaccgggccggaaatgctcgtttgcaacgatccgcaaaccaactgataaagtctgttctgtcaacaagggattcgaattcattacagtcactaccagcgtatccgtcacccggtctttccggaaaaccaggtgttcgggaagttggtagtcagtcgttcctgcagtcgtcagactatccactacttccaggcggtaagtcaaatcctcttccggtatatttccggtcagcttcaaaacaaaagcaacttcatgagtcgatgctccgggataattggcaaaagaaataaatgcagtatcggctcctttttcattgacgaaagacaaataccgcggcccttcgtaaaatccggttgtatgatgggtacaggctccgatcacgaagcacagcaaaccgataaatatgtatctgttcataattttcacgattaacattaattgatcacttcattatccggcagaggaaatacaaaaccatcgtcaggcatagattccaggggttttatgttcaaacgtttaaaataataatacaactgcccttcctgcataaattcacgccgggcctcatcgatcagtatctttttaaaatcgtcgaggctggaaaccgtcagccgtcctttagtacaatcccgggcaacacgtacctgatccagttgttcgatagcggcctgagtctctcctttccggtaaagatattcggcttgaataaaatacatctcgctcacccggatcagcggaatcaaatcctcggtttgcgtatattccaaggtattattggtcggtaaaatatatttattacagatccggtcggctcccgaagtctctgtcaaatactctttcctcacatctgcctcatcgtcgaaaataccgggatatccggccagtacaagtcggtcggaactcgtcgtataataaggctcataattatccaggttcaattcgttcgacagggcaaaaatcacttctttataccgtttccgatcattgttctgtacctcctccttctttgacaactggaaacaaactgcagcatattcttctgcataggcatccagtacttcttgtgcacaatgagcggctttttcatattcgcccatataattataaaccctggccagctgggctataacagcgtaataattcatacggaatccccggtaaaggaaaaacaaatcggttaccgaactgctcacccagttattcttaatccgtttttcagccaccaacatcgatttgtcgggtagtgtatcgaacggagctactaagtttttggcctggagcaaatcccgttcgaccagcgacaaaatctcctgtacacttttatccggttcgtaggtagaaggataattctcgaaataaggcatgtaatttcccgaaggattggtcaccggtgccggagcccaaagccgcagtaaatcaaaatgcaggaaagcccgtaaagccagcgcctccccctggatcatatgctgttctgcctcacctcctctgaatttagagggatcctccccggtaatccgcccgacaatattgttacagtttgcaatcgaattataggtattcgaccagataacctgaatcaccgacttcactgtttcatcacggtaagcataattctttcccgcgattccatatgccgaataattcgacaatttttgagtattgtacaactgtcccaaaacatcaataaatccccagctcatctgctgcccgtacatcgaagtctgagacatctggcggtatacgccgttcaacgcattccggtatccctctccggtggaaaacaaatctttttcatccacagaatcctccggaatcacatccagccaattactgcaacctcccaatggcaacagtaaacaacaggctattatccaatgatatattttcataattcaaaatttaaaaattagaaagcagctttcagcgaaaaattaaaactccgggcataaggataattcaatcctctttccaccttcaccgacgaccaacggcaaacatcgttcgcaccgatctcaaaacgcagcatactcaagccgatcgtcttcatccacttctgcccggcgtcgaaatcatagcccagagaaatggaattcagggtcaatacattgttatcctcgacaaaacgggaagtcggacgggtacgcataatactgccgcccactccgctggtcagcttacggtaacgagccttatcccccggttcttgccaacgttcggagaacacccgtttatcgacattggaggtgtatacattcacatcttctactttgtcacgtaaagtgctgttgtatatctggccgccggcttcatacataaaagtcatatacaaactcagatttttataagtggcattcaacccgaaagtaccttgtattttgggttccgtatcccccaagaccacctgatcgttcgtattccaggtattggtaatgcttccgtccgggcggataaaaatctcctctccggtagcaggatcgattccaagtgagggaactccccaaatcgacgtctgggattctccttcgacatattgagtaaacggctgggtattcgaaccgtcgaaccggttactgttggcaaaatggtcttttacccggtcattgtaagccttcagactctccgatattttcaggattctattttcattgtgggccaggttagcgaaaacagctacaaacagatcttttcgacggactacttcgctccggaattccagttcatatcctttattttccacctctccgatattatccatataagtggtaaaacctgtcgaactcggaatcgtcaccgaattgacgagatccaccgtttttttctgataataggaagctttg

SEQ ID NO: 6200 - DNA, 1402 bp, Unknown
  gut microbiota DNA sequence
attgaatgttcctccggactgtaagagttaactaaaggtagaatgggaattgtacagattgttaattccattttttcatcaaatacatatattctttctcacaccgactcatgtcgggtgtggctgatcgacatcggagatatcgagcctgtcatcgcccgattacttcccggtcagcaaattcagggagtatttttaactcatacccatttcgatcatttttatggaataaaccggctgatctccttatttccggattgtatcgtatatacttccgcacacggacaagaaggattatattcagaaaaactgaatttttccaaatatcacgatcatccctttgtgttttccggaaataaagtaaagatattgcatgagggagaccggattgaaattttccggggacaaaagctcgaagtacttgaaacgccaggccatgatcctgggtgtctgacctattttacagagaactatatttttaccggagattcctatctgttcgatacaaaagtcatcacctcttttcccaaaagtgataaagagcaagcaaaactttcgcttgaaaaaataatttcctactgtgacaaaaacaggacggtatgtcccggtcacggtgttataaaacaagtaaaatcagactataaaaatcttatatgaaaatccctttttccttacctgtcatcgatgatgaggtaattgcagaaatgcatgataccctgactcatacgggatggctgacgacaggccccaaagcacgggctttagaagatgagatccggcagttcacgggaggtgaagctgttttgtgtgtaaattcgtggacctccggggcgatgctaatgctacggtggctgggagtaggtcccggtgatgaagtgattatccccgcttacacatacagtgccacggctttgtgtgccatgaatatgggggcaaaggtggtgatggtagacgtaaaagatgattttactatcgatccggacaagataaaagctgcgatcaatgaacacaccaaagtgatattgcctgtcgatatcggagggtatccctgtgattacgatgccatccgggcagtagtggacgatccggaagtgaaggctttgtaccggcctgcctccgggaggcaacagcaattgggccggataatgcttttggccgatgccgcccattccttaggggctttttataaaggaaaggcttccgggacagtggccgatgtcactgttttctccctgcattccgtaaaaaatattacgacaggggaaggcggtgcgattgtattgaatttaccgcagcctttcaacaaccagaatgaactgactttcctgagggccttggcattgaacggacaaaacaagagtgctttcgaaaaaaatcaggtgggtgcgtggcggtatgatat

SEQ ID NO: 6201 - DNA, 4084 bp, Unknown
  gut microbiota DNA sequence
aaattatagaataaattaaggattcaattaatatacctcttgtttctaattgtaatgttgtttttttatacactgattgtgagtttgttataaaaatagtattaagaaaaattggtaaaaggtgataattcgtttataaggggtggaaactggagacttgttattcgggaatctaaacgggggcagtctgttttataggtaaatgataggagtactgcttgccgtatattcctgctgtagggtttcggtgagtgatttcaggatattcgtccttttgtttcattcgggcgtatgtttccggattttctcccgtatgtttttccaaaaagatacggacgaattttaaaaaagatatgtatggattttaacgaagatatgtatggatttcccgggggagaatgatctttcccggatcagagtcggtttgcaattcagtgatacatttagggtaaacatatattaactgccaaaattctattaaatacaaattctaaatggtgtaatctggtatgtaggtgccttatcttattttgtggattctgtattcgtaatttgtgtttttgtaattgtaaaacagaaaaatgtgtgtctgtaaatcagtttgttgtgattggacaggtttgtaaatttggtaaaaaaatgaaattgaattgtaaggtcgtatttatcctgctttttcttctatgaattgtccagtaaggagagtattattgttaagatatcggcccgttcgtccatacccaattttttccggatagccgttttccgtttgtggattgaatagacactttgccggatgacaaaagcgatttcatcggttttgaaaccacctcggatcagacaacacaattgaatttctttttcgttcagggaaggaaacttatccttcaatttttgctggaaattgttgtataaataatttatggtgaaatagagttcatcccagtttaaatcggtctgtccgatgtctcccagaatttcattatacatttttaaaaatgcctgatgcttgtcatggggatagcttgaaataaaagctaattttttggatacttccaatttattcagcaacagttctttaaatttatcctgacatcggttttgttcttggcataaatgctgtagagtttcgatcatttggcaggcgttcaggtatttttcccgtctttttttcaataagataccgatataagtggctagtagtataaaaagtaaagccagaacgaggctaccgttgaccaatagcatgcgctggcggaccagcctgcggttttcgcgttgccatttcttttggtggtggcggttgacgatattgtcgatgcgttcttcggtcttgtttagttggtaatctgtaatataggttgtatatttcttataatgatttaatgccgactgatagtctttctttaactcggcaatttggtatagttgtttataatattgggcttgtaatttttccgaatcgtccgttgacacggatgcctttttcagataatacctggcagaatccagctgttggcgatgtagataaatttcacttaaaaggagataaccctgtttctgaaactccggattcggatcatattttaaggcattatgcgtgtaaagaattgcattcgctgtattttgtgtgttcgaataagaaataccgatctgcaacatgaggtaagccacatttaccgaatcctgtaaattcaaagcgtttagctcggcctttttataatatgtccgggctgctgcatattgtctggtgttgagcagacagtcgcccatttcataattgctgtatttattctggggagagtgatattctatggctttttggtaagattcgatactcgcttgttggtcacggcgaagtttatatagctctccgaggtgataatgaatttgaaataagagcatactgtcttgtcgtggtgcattctcttttgcttccgacaggttgatagaggctttttcataataaccgttcttgctgtccatgatacccgtaaataaataggcccaccctgctttggttgaatcaccctgttgctgaaaatatcgggctgtattagaaaggggaggatataccgagatatcctgataggcttcgtaagcagcatgaacttttaataaatataggttgtgacgggcattccgttttaatattttttgggaaatggaatccagcagcttcaaagcttgttgaggggaggaataaatcaattgtgcagcttgattcagcattctttctgaaggatatcgatttcggcaactgccccaaaggcttgcaaaaataaagatgaacagacagcttttcatatttggttcgaaaggtttgtattcactttgctaagtttacttttttcagtatgctgattggcgaatctgcagttctgatagataggtcagtagtttcagttccaccaatcagcagggggccgatttttgaataagatgctaattacgaaaagtcatagattcgacttttcgggcagtctcggtaatcgggatagcgctcctttatttgtttgtattgaaatagttgtccaacagttcgaaagcaacggcaaaggagctgacctgattactcatgacctgtttttctgctatttttaaattttccttttggctttgatagaaatggttgcgtaattgttcgtcgatggtttcgtacatccagtatttggattgttcggcacggcggacatcgaaataaccgttttgttgagtttcactgcaatagtgcaggatattttcccaaatagcatcgataccggtgcgttcataagcggaacaagtcatgactttgggcatgacgccggattcgtggggcgggaaaaagtgcagggcggtctggagctgcgctttagctagttctgcccgttgaatgttgttcccgtcggctttgttgataatgatgctgtcggccatttccatgattccccgtttgatgccctgaagctcgtctccggctccggcaatttgtaccagcaggaaaaagtcgaccatcgagtgtacggctgtttcgctttggcctacaccgaccgtctcgatgaggatgatgtcgaagccggctgtttcacaaaggatcatggcttcgcgggttttccgggcgacaccacctaaggaacctgctgacggggaaggccgaatgtaagcatgaggatcacaggcaagctcttccatacgggtcttgtcgcccaggatacttcctttcgaccgttcactactcgggtcgatggccaatacagcgattttatgtccctggccggtgagatattttccgaaactttcgatgaaagtactcttgccggctcccggtacacccgtgataccgatccgtacagaccgtccggaggagggcaggcaacggttgatcacttcctgggcaacggcctggtgctcgggtttggcactttctaccagcgtgatcgcctggcttaggatgttgatgtttcctttcagaataccttcgacataatcgtcggtggtcagggtttgcctccgtatatttttcaggcgcgcagcaatattgggattcatgggatcgggctgctcgatgcctttgttcacctttaatccttcatattccggagcattctccggatgttctatacattctgacataatttcccagatttgatttgtttcacgcaaagataggataaaaaggtggattttcataaaaaacagccggtaaccgaaagtctggaaagaaacgattgatttgccgactgcctgctgggtttttggaactccgctatataataggggacaggcaagttttgcgtactttttaataaaaaaataagcgtggaacttgcacatacccggaatcaagggaactggtattccacaacaaccgggtaagacaagctcacgcttagaatatgtatatttatatacgtactcactacgcgagcgttgtcaatatccgccttagttgttgtaaatgaatcacaattgaaattaccagtttcttgattctaaggcgcttttgaaaacgctacatgaaataaaaaaaatgccgatacctcttgtatccggctttacaaagaaatataattacctgttggcggaattaaattataggtat

SEQ ID NO: 6202 - DNA, 644 bp, Unknown
  gut microbiota DNA sequence
ctccacaatatcattctgcaatagctgtacaacagacagattgacattgaccttataatccggatgccccatatcattccagtatttgcagcgcatacaggcctcccttaagatgaagcttccgatcggattgatcaaccctaaatactcagccagtgggataaactctgtcggtgagatcacgccaagttccctcgaattccagcggatcagtgcttctgcaccggagcatggcattcccggttttgaaatatccgtgatcggctgataataaacttcaaattcatcaaacgcatttctggtcgcattgcgcatatttttctccagatccagccgtttgaaagatgtggagatcacattttcatcgtaataggcaacacggttttttcccgcacattttgcatcatacatcgcaatatccgcttttttgatcagttcctccacggtatccccatcggttggaaaacgtacaactcccatactcatggtgcagtaatactccgttccttttaacctccacggtcttgcaaattctgccttgatccggtcaatgatattatgcagattaggatataccttatgtgagatcagtataataaattcatcgccacccatgcggtaacaattgtcattcacacccggga

SEQ ID NO: 6203 - DNA, 761 bp, Unknown
  gut microbiota DNA sequence
gttgttcccgtttagaagaaatttatttctttttaaagagattctgtattccctgtaacagattgcctttcaattctttctctgctgctttggtgaccgctttgatcgctttggaaaggtcgggtttgataaccggcttcgacagcgttccctcgacctttgcatcgatatccagatttttaatattgtccgaacccggaatagatttcaggaggttgtcgatgtccttgccgaaaaatttacggtcgatgttcatcgataaggtataatcgagctgcccgtcgacggtttgatttccataaatggtcaccggattacctgcaaaactggtcttaaacggttcgacgataatattcccgttttcgagtttgaaatcgattttcagcttactgatactcaaccggctaagttcgtcgttcttcatcacactagccaactggttcatcgccggattgtcgttgatcagaataccttttgattcgagatatcccccaccgtttgctgtcgtcattaccggactcatttctttatccagggcagaactgaagttcatggcagccgaaacttgtccgctacagttcatcgctaccggaatactcttccgcaggaaagtgaaagcctcgtaggcggcatggatatcgaagtcggatatattcagcttgaaatctactgtcggaatcttcggattggctgtattatattgtccgttcatcaccatcttaccttccaacatatccatactgagatttttcagtgtggcg

SEQ ID NO: 6204 - DNA, 203 bp, Unknown
  gut microbiota DNA sequence
gtgaccggcaggacgtatttataagcactttctacgaagggggtgatgtagtttagggcgtaaacactcaaaaaatagccgatcacggtggcaacgaaaagtatataacaaatttcgagccagatgtgaaggggtgcctgggcggaaaataaaggtgatctgaccagatctgacagcccgaaaggtaagctgatgatcatcga

SEQ ID NO: 6205 - DNA, 16499 bp, Unknown
  gut microbiota DNA sequence
atttacatattttaacgcgcggaaaaatcaccctaaaaaacgcttcgctcgtttttctccgtttctcttttttcgcttccaaaatgcgcattttccgcccattccaaagcctgcaattccctaaaatttttcttctttgtgagaacaacaatactcgttcgattctttttgcgggaatctgcaacaagaataatcgacagatgacaattgatcatggagaattaccggaagcttcgcttccatgaaaaaacagattaataaagaaaagcagaaaggaaaattaaatgtatatccattgatttataattcgatagaataaacttaagactgtgattcatccttgtcgattgtcaattattccttgtcaatagaccaagcacccgcagagaccaaggactttataaactttataaactttcgactaaattaaacgaacctttatttggacaaatttgtaaaattgtaatttcttaagtaaaaaaaaataatacattcactactcgttaacggaataaaaaagttaaaatatctatgtttaaaaaattgcacatattcttgatatccaacaaattaataacacataattctctgattcacaagtatcgtatgcacaacttctatgcaatataagtgaaatttctcgacatctgcaaacaaatgggaggaaacttagccgatgcatctggaaatgtcccatctcttgagactgcctcccggatactccgatgtgagagttatcgcactgaataggacagggggagacaaagcaaatatacatggcattcataatccggagaatgcaattctgaataaaaaaaacgaatcgtgcaaatttttgtaacagagcttcttaattttatattttcaattttcagattttgttatatgaaattaatctagattacactttgaaataacaaggaatttccgctactttgtagcagaattggaaaaaagtataatgaaaaaaagatgggtcatcaatactccgccggaggctactaagatagaggaactttcaaaaaaactaaattgtcaccccgttatagcgaacttactgctgcaacggggtattactagttcggaacaggcacaatcttttttttatccatccctgaatatgctgcacgatcctttcttaatgaaagatatggacaaggcagtagaacgtttagaccgggcgatcgcccaagatgaaaaaatactgatatacggagattacgatgtcgatgggacgacggcagtatccctgctatacaagtatttgaaacaccactgtaacagcgataatctggaatactacatccccgaccgctatacggaaggatatggggtatcgatcaaaggaatcgactatgccgcagaaaacggtttttcattgatgctgatcaccgattgtggaatcaaagcagtcgaaaaagtcaaatatgccaattccagacaggtggatatcatcatttgtgaccaccatactccgggagatacgttgccggaagccattgcggtgctcgatccccaacgtccggattgtccctacccttacaaatggctgagcggatgcggggtcagtttcaagctggtacaagcacatagtctgaagcacaatcttccgatgtcggagctttacaagcttttggatctgttatgcgtcagcatagccagcgatatcgtcccgatcacgggagaaaaccggattctggcctatttcgggttacagcagttgaactccaatcccagtctgggattaaaaacgattataaaaatttccgggatcgataaagaaattacgatcaacgacatcgttttcagaatcggtccccggatcaatgcagccggacgggtcgaatcaggccggaaatcggtggagttactgacagccgacgagaaatgctctgctgccggtatcgcttcggatatcaatactttcaacgaccaacgtaaaaaactggatcacgatatcactgaggaagccattcgtcacatcaaccaatcggaactcgaaccgtcgaaaaaaacgaccgtattgttcaatgccaactggcataaaggagtgatcgggatcgtagcttcacgcctgaccgaatctttctatcgtccgacgatcattcttaccgaatcgaacggcttggcgacaggctcagcccggtcggtcgaaggtttcgatctgtattacgctatctcgcaatgcagtgaatttctggagaattatggcgggcataaatatgctgccggattgaccttgaaaatcgaaaatatagaaccgttcaaacaaaaattcgaacgtattgtccgggaaacgatcgacgatgaaatgttgacccctcagatcaatatcgacgctaaaatcaagctgaccgatatcactcccgatctgtatcatatgctgcaaaaattcgccccgttcggtcccaacaataccatcccggtcttcatgaccgagaaagtaacaaacttcatcggcaccaaacgggtgggacgtaacaacgaacacctgaaactggtcattgtcgacgataccagggcctgtaacgaccggagcggcatcggtttcggcatggggcatctctatgataaagtgaactccggcggatttttcgatatctgttatacgctccaggaaaatgaatttatggggaaaaacgatattcagatgatagtgaaagatattcgtttgagggaggagtgagggggagaaagaaaaaaggagaaaggaaaaaagggtgaattcttcaaggttattagataaagcggtcgatcagtttgcttccctgccgggagtagggcgtaaaacagctctgaaattcgtattacatcttctgaagaaagatgtgcaggaagtcgacgactttttgaaaagtatcggtgacctgaagaaaaacatcaaggaatgccgtcgatgtcataatatttccgacggtgaaatctgcgagatctgttcagacccgaaacgagataacacgacgctctgcgtcgtagaaaacatcaaagacatcttatcgatcgaggccacctcacaatacaacggtttataccatgtgctcggaggaatcatctctccaatggacggtatcggtcctgccgatctgcacattacttctttagttgaaagggtagagcaggaaccgatccgggaaatcatctttgccctcagtgccaccatcgaaggagatactaccggctattatatcttcaaaaaaatgaagaataaagaagatctcgtcatcagcaccattgccaaaggcatctctatcggcaatgatctggaatataccgacgagctgactttgggacgttccattgtcaatcgtgtcaaattcagcttcaacgattagaacacaaacgcaattacttttttcccaccaggtcgtccgccagtttttcaaaaaagcctttatatgaactcatgcttacttttccggtgacccgttcttttcgttccatttcctgagctgcttgtacaaaccagtgtgccgctttgtagcgaatagcttcgtcaggacaattttcattgattttcactccccagctgtacaattcggcatcgggaattttttcttcgtaccatttttcctctgccaaatcgacgaatgtacgccagtccccggtgcgttcggcagcatgcatccgggcattccggacaatttgccgccactcttcgactttttcttttttcagtcgtttggtataagctttgaaaccgacctcatcaaaaacgccgtcctgaacaaaattttcagccccggcaatccagaccgccgctatctttttccgaaccttatcttctccgtaaaggtcgtacaattctttgcggtgagtcaatacatattgaaaaaggtctgtatcggcaagcatataatagcggtcgaaaatatcccaatattcagcatcccggagacaatccgaaggtaaagccgaaaaataaaccgccgcaatctctccggcttccctgtatctatcagcccgccccaacatcgccatataactcttcagaaattcgggccggcgacttccctgacggaattccttctccattccggccaatccttttccttccaacaccatccgggcctcctgcagcaaatcttcgggactcatgatatttctcacccggtgcaattcgtttccccccgcatccgtaaaaaccaacaccgcctgacccgattcgcgggctacattgacaaactgctgctcgaaaagggcagccacttccgggtcggcaaatacggtacgcaacatctctttatgtgcaccacccggaatataataatcgataaacaccggtttattctcctgttgcgctttagcccgagcctcctcatccgataattcctgaaacgaaattcctccggcttttttcaaagcaagagcagcattgtccagcaattgctcctttgtttccgccccttcatcctggtaaatcactttccctttggcattcaaaaacagaaaagcaggacactgttttatcccatatcgccgggccaactcttgtgtccgcgaggtattcacccgcagattgacaaaatggtcattgtaataatcggccacctcgtccaggttcaacacgtttttctccaataacaaacaagcctgacaccggtcggcggtaaaataaatacataccggctgctccgcttcctccgcttttgccaaagcttcttcgaacggcaaatcctcgaaacgaacagagcggctatttctttttttcactgcagcccgttccttcgccttttcgagtgtttctcttaaagcagaaggatcttgaagtacctcccccggttttatcatttccagcaaatctccataaggcataaaaaaagcaaacaggggaggctcgtacatcaataagcgcgtttgaaatccactgtttttcgtatcgttcgcattcagccggattgcaatcacattccgctgcaaataattcaccagatcgggtttcgtctgtattcctctctccactttcaggtcgatcggtcccacttcgaccagaaccagcttattttcccgggctgcctgtaaactagcctgttcccaactataatcctgaaacaagtcgacagctctctgggctaatatccggtttaccggcatcagtcctcccagccctaatataatcatgaataaaatcctcttcatcaccgatttatgtttatacaaaagtaaacgcataatcgctcatttccttttctattcgacaagatttaacatttttaactttgaagtgatacagaatttttttccggtatgaccaatttttattagttattggccaatatttcacggaagttgagacaaatatttcattcttttgcgacattaaataatcagacgaataacaaataatgaataacatgaatcacgatttcccctctccttcacgcatcgtatggctggatgtcgtccggcttacagcaatgcttatggtgatcggcgtacattgtatcgatcccttttacatctccccgaccctgggaaccctacccgaatataaattccgggcttctgtatacggctcattatttcgtccgtcggttcccctgtttgccatgatgaccggattactcttacttccggttagtcaacaaccgttaggcgttttctacaagaaaagaattttccgggtattatttccttttttgatatggtcggtgctttacaacttattcccatggtttacaggagtagtcggacttccgaaatccattataggcgattttttctgttatgtacaaggaaatgaatcccagtctttcagcgattcgctgaaagacatcgccatgattcctttcaatttctcctttaaagagaatcatatgtggtacatttaccttttgatcggactttatttgtatatgccctttttctcagcctggatcgataaggccgatcgtaaaatgaaacaaacttacttgtggatttgggtgatcagcttatttctcccgtatatgggcgaatatatttcgcattatctctatggcaccgccacctggaacgaattcgggacactatattattttgcaggtttcaacggttatctcctgctcgggcattatgtcaaacaaggaaattcctggtccgtcggaaaaacactgcttctatccgctctcttatttgcagccggctattccgtcacttttaccggttttagtgcagcagcccataatccggcagctaccgaatcggatatggaattattcttcactttttgcagccctaacgtgttatgtatgactctggcggtttttctggctttgcaaaaagtagtcgtctctacgcccgccctcatccgttcgctcgccaatatcacgaaatgtggtttcggcatttacatggtacattattttctggtcggcccggcctttttactgatcggtaatttcaatctgccgattccgctacaggtgccggtaatggcaatttttattttcctgtgtgcgtggggattcacggccttgatgtatcgcatactgggtagaaaggctcgttggattatgggataaaatttatgtgctgatgtgctcattatggagtaactcccgggagcacatcagcacatggttattatattaatcgaacatccgtcccggacaattagcaatcactttcctcatacgcaaaacctgctcataggtcagggaagtcgatgccgaacttccatccatgatattacaggaattataataaatcaccggagcctgtttatcatccgaataagtattcttttccaaagcaataggccctaattcataagtataagtatccgaacaaaaatctacatctccgttaacaaagggaattcccgaataagtactgaacaccgtaggcattaatccgaaatgtgtacccagataatattcatagccccctttattgatcgagaatatcgaacccacagtaagagtaatgcctacttccttatacgaagtaaaacttacttcatcagctgtagcaaccgaattcattttcaaaccgggtacagcggttccgttatccaaaatataagccggagcataagcattggtcccataaatttcatcgtttacccagatattcaatatccggttcgggtcccatagtaaattcttgttaatataaccggcaacttcgccataagcaggagttcccatttccactctgtttattcccggggtagcgagtttattccctcgtacatccaccgtagccaattcaaagcgaattttactgtcgacggctaccggatcgtcggcataagttcccgcaaacaccttgttggcccgatcgataaatccctgtaacaacccggtcgttatgccatcatacctattgatatttttatctgtaaccaacagatggaaaacaaccggaacagtaatagtcggaaaatccattaccggatcggcgatcaaatgcactttacaaggttcactttctatcccatgaatagtacatacaaattcaacatccgttccagccccttcggtggccgagaatttctgtccctcgatcaacttgccatccctggtcttaatctgtatttcagatgcttcgaaacgatccattttcattgcagaaatcttcgtaaacacagagtctttgacaatatgttccccatcgatcacctgttcgatcgtccgtttatctttcacaaacgaataagcttttacaagaaaactcaactgagctttaccattcgcgatcaaaacgggactattgggataaatagccaccgaatcgacggcttcgattccgggttcgtacaaccaggtttcatattcactcttttcgcacgaaaaaagcaaaacaatcagcaaaatataacctattattttcatcttattcatcattttaggattacaacatattccatccgggattttgttcgatctgattattttcctgcatttcttccagcaaagggatagggaaacagaaacggaaatcattatcttccagcatatagacggcttcttccggattttggtaagaatttctggaccatcccttctgaatccggatcagatcacaccaccgcatatcgtattcgaggcaaaactctctccgccgttcattcataatctcttgtaacaaatccgctcctttgtatccctgataatttctgatccgatggcgttggaactcttccaaggcttgccgggcttctccttcctgtccgttacgggcataactttcagcctcgatcagatacatttcggaaaccgggaaaaagtgtaacaccccataggaattcggcagatccttgaatttacggatagccttgttttcgggattaaagtaaagggaacggcgaacatcgttttcatcgaacaattcgaacagttcatcccggacaaattcgagtaaaccataagcctccatcgtcccatacatgcctgcatcaccggtataccacaaaaaggacaataaggcctgatctttatttttatatactcccccctcacttgtcttataggtttcaaaaggtttgaattcatctatcccctgcaacggataatttttcataaccgcctgtgcatgcgtaattgcctgaacataatcctctttctcgccagctcccgaaccgcctttaaaaaggtagatctcagccagcaaagcatgggccaggttcttatcgtaaaaaatattataagtcgcccggggttctgtcttacaatcaatgaccgtagtcaactcatcgatcaaaaaccgatatacctgagcctgcgttttccgctgtttattataacttccgactgcttgcgaatcggtattaaacggtatccccagttcattgctgtgatagggagaaaaatattgcaacactttaaacaaataccaggctctcagaaaacgggcttcctgttcgacgatatctttttcttcctgtgaagcactgacattcgccagttcgtcgataatcgtattataaaaaccgatattactgaaatagtttccccagatcgtcccgggcattgtggtattttgccagttcaaactgtttgtatacaacgctcttttattattagccatccaatttccgttcagccaggtatcggtattcaaatcgtcactataaaaaccgaaaaacaaatacaaatcgtccgttctccagggaacgttcgttcctgccaattcatgggagctgaaaaaagtcacggtgtataatttcaaatgcgaccccaataaagatttcacatcgtcataagttttcaaggccagaatattcgaaggtttcacttccagatatttctcgcacgaagtaaaactcagaatcagggtgacatataagaataatttcttcatctctttcaattttagaatccaacatttaaagtaatcgtatatttccgggaattcggataaccgaacgaacccatcagtgccggatcgatcccgctataactggaaatcgtaaacagatttttcgctgtaaaactgagccgggcagtgctgaaacctattttatgcagccattcgggtttcaggttatatcccagcgtcatatagctacagcggaggtagtttcctttctccaataagatatcgtacatataggaagaataggtggtaaaggcttccgacatagcaggtacattggtgatatctcccggttcacgccagcgattcgcttcggaggtgtgacgattacgggcatccaggcttcggaaggtattgaacgatttgattttatgtccggtcttaaactcaaaattagcagaaaaaatcaattgtttccaattggcagaagttgaaaatccgcccacgaccggaggagtaagatttcctaaataaaacaccgaaggggtaggccatgtagctccgctaaccgacatatccaaggttgcctccccattgccggtataagtcattaccgctccgttgatgggattgattcctgcaaatttatacccataccaaccgttcaccggctgattctctacaaattgatgtgcattactcaaggttgctttcggcagatccttcgtctccttataatacgtatttttcactttattatcgttgatcgcaatgttcgctttggcataccattgaaaagatttatttttcaacagcgttactcccagatcgatttcccatccgctattataaatatcggctacattctccgtcacctcactccgtccggaagaatagggtaaagctttccggtcgagcacatcccgggtgatgttgtggtagtaattcactcccaattccaaccgatagtcgaacagcgaaaggtccagaccgacattcatatcctgtttggtctgccattttacattcgggttgggataactgaaagaggtcggtactgtttgcccgtcataaaccacactttgtccgagggtcatcaccacaaaaggcagtgcattcttgtcgatactcccggtatatccgaaaccaccccggacagcgaactggtctacccacatccaccgcttcataaattcctcccgatgcagattccagcgtaagccgacattccacaacggagtaaactggttgtcgtttccgataatatccgaaccgtcatagcgcaatgctccggtcaaaatgtatttatccaggtaggaatatgaggcattggcaaaaaaggaagacattttgctgaccgactttcctgtccctcccaaggcgttataattgatttccgatccgtcgataccgtccatttcagggaatccgacgatccggtgttcttcgtcgaataccggagaataattgaaggaattataagcggtccgctcctgaatttcctgcccggcaaacaaagagatataatgttttccggcatattcccccgtatattgaagtgtattccggaatgtataggcattggtatatcctgtagcctcccgcaaagagcccttcaccatgtcatgcggaatttctcccttgtaggaataccagttattgataaaattggtataggtatccgctccttcgataatccggttatggttggaattggcattataaaccccatgggtcgtaaacatcaggcctttgacgatttcccattccaccttcaatgaaagctcggcatccagataacggttggtattggtatttcggttcagatcgtcgagaatattgaaggtatcccaatccagcccgtcccggatactactttcctttgcattgtagctgatatcgtaagcctttgtaccatcctcatttttcaatcgttcataagggttggcatacattgcatattccagggaatttacgctactggccgtcactctgtcgtttttcatagtggcccccaacccaccggtaatccggattttttcggaaggattatgggttaatttaatgttcatccccaaccgatcgtacttattattgggttcggtaccgacctctttcaggtagttcaaggaaacgtaatgttgtgttttctcgttacctcccgacatgctgaaattgtattgctgactgatcgccgtgcgataaatttctttaaaccaatcggtattgattttagctaattcgccgatccgccgttcggcctcatcagaagaaatttctccataggctgcttgctgcaataatttagtcacccgcccgggggtatagatatatccttgctgatcgtaaaagatctcgcgttcgaactggattttctccgcagtattcatcatgtcgatgttattccggggtcgttcggtaatccccacattcaccgaagcattaaaccgggttttcccggaaagtccgcttttcgtttcgacgacgatcaccccgttcgcagccctggcaccgtaaatcgctgtagcggcagcatctttcaatacggtgatcgatttgatatcgtccggtgcaatattaccgattccggtcgtaaaaatagtcgcctgcaaatcggtagaaccgctttggatgttgggaatctctccttgtaacggcataccgtcgacaatccacatcggctcggtactccccgtcaacgaatttaccccacgaatctggatctgtgcgtcctgtccgggccggccactactgatcatattcaaccccgagatcgtactattcagaatctcgtcgatcgactgtaatccccggcctgcaatctgattggcggtaatcgtcgccgtcgtaccggtcattcgttccttccggatcgtctgataaccggtaaccaccacttcttccatttcagcctgatcgggctgcagcctgacttcaatttcatctttcccctgtacgtttacttcaactgtccgataaccgataaaagatacttccagcacctgtgcatctccggctaaagccaattgaaagcggccttcgaaatcggtcgcagtacccatccgggtacccttgattttaatcgtagcccccggcaacggatttccctgctcgtccctcactataccctgaatcacccgggaaacaggaggtgtggtttgccgcgcaggaccgatgacaataatcccgttgcggtcggttgccaccaaaccggttccccggatacaggcctctacggcttgcaaaagagttaccttttttacatcgacagagaccggttccttcacctgctccacttcctcccgcttaaacatcagctgtcggttgtattgccggtttaattcccgcagcgcatccaataccgtcacctgttttaattttaaagacacattggcttgggttgtggcttgtgaaaaagccggccggtctgttagtagtagtcctccgatcagcatcagacagcaacaccatagttgccgccaggacaaaaactttccaaacgattttttagtttcgttttttttcataaatttgtacataaaatagttagacaataccttgtttctggacaaggtctttattccggagttgctggccaaaacaactccggtttatttttcaatcagatgtatgatatttccttcccggcggaattccggtcctcccgctaattcaatagtctcgagcacggtatccagggattcgtctttactcatccgtccactgaaagtatgcttttctttccttcctccgtcgaatacaaattccacttcataccagcgggacaacatccgcataaccacttcgatatcttcttcctcaaaaataaaattcccatatctccaggcaatcgcatcctcggcattgacagcttccacctgaatagccccgcttcccttttcccaaatcgcttcccgtcccggagtcagcaccaccgcatcaccgccgtctgctaccgccacccggatacttccagtcagcaaggtcgtatataccgatttctcattacgataagcctgtatattgaatgaagttcccaatacccgggtctgtatccctccggcttccacgataaaaggctgttcaggattcggagccacctcaaaataagcctccccgctcaatttcacgatacgttctttttttacaaattccacgggatattccaactcgctgtccgcattcagccatacccgggtcccgtcgctcaaaatcaaggcatactctcccccgatagcggttaccactttattgaacagctcttcggtcgccggactatttttactttcatatatcagttgtccgtgttcatttttaatcactgcatcccctgcttcgattctctgttctttcttctgctccaaagcaatctgttcaccggagtgcaggatcagttttaccttagcagtctctgtttgttgtccggccagcggcatagcctccggtaccgcccgcacaccggacaattcccacaaaacagtcaccgccacagcacagatacaagccgcagcagccacactcctccataagcgcacacgccggctccgtctgcgtcccaccaaactccggacgaccgaaattcgtattttctcataatcggtctcttttccgatccgttcttctcctgctatccgttcgcgaatcgcctctccgcgaataatccttttgtatgtccggcgattctcctcgctctcgtcgagccagtccagcaattccgaacgttcctcttccgtcacattccccagttttacccgaatgataattgtagctaaacgatatgccttttgtaaatccatttcatgtccttttatattaagacaccgcagaagcaggtaaaggatgaatgaaacttaaaaaaaaataaattttaacaacacctcgagcagtctgcctcgaagggctgagatggtatcagattaccgcatactcgctcggggagaaacagtccggatttatgttgccgaagaacaggtacagaggtgccccgtccgattgggcctccctggaggggatgccgcctatagaacattttccgaaacttctatcaaccacttctcgatatttcgtgtcttcgcgctaaagttgacgcctattttgaacaccttgcgcctgtctgcctcgaaaggaagggcataacgtttgtcgttgatttgttgtagggcttcctctgccgttccattcagtttaaattccattacatagatatagtctgaagtcttcaccacgagatccacccgcccctcagcagtacggtactccgtctccgtgtagaatcctaccagtttgaagacaatgaataatacattctggtagtgacgttccaagtcggttgccacctcgtagggcgtgtcggcaaagaaacttcgcaaacgcctgaaaaaggcatccggttgccccatttcgatttcacgggtgaattgttgtatttcgaaaggaacttctattttgttgaaacgggtatagaaaggcattaaaaatttgataaaaccttcttctacctctttattcgggaaaccaagacgatatagatcgaatcgtttgtcatacccttttatcgtaagatacccgctttggaaaataacgggtatcggctgctcgtcgccgtaaatgctattcaacacatcggagttggtttcctcgtttgccatgcgttccaagtcgtagtggtagcgcctgagcaattccaccaagtaagtcggtgtccccgtttcaaaccagtaactgccgaacttcattttgaagaaagtattgagcaggctgaaaggattgtatatgccttcggaatcttccacaaaatgataaccgtcataacaggctttcaattcggctttggcttcctcgtaagtcattttctgcgcctcggctaactcgtgtaaatcttcctcgaaattgtcctgaatttcttttccggtaattccgcataaggcaacatagcgtgcgtccatggaaatatctatcaagttgttcaagtcgctgaacacgctcactttgccgaatttcgttactcccgtcagcatggcgaattgtatgtagccgtccatcgttttgagcacaccgtagaaaggtttcagcgtgttgcgatacgcggattgcaactctttgttgccgatggcttgcaaaagcggtttgtcgtattcatcgacaaggatggctacccgctgaccggattgctggctggcacgttccacgatacccttgaagcgtagggcgagggtcgtctccccgacaccggtgccgtacgtaatctcccatttggacagggcttcctcaaggattttgtccaaactgtccggagcatcatatttcccgatattcagatcaagatgtaacacagggcggcgtatccaattcttttccagctgcgccattgctagcccctcgaacaactcctttttcccgaggaaataggcttccagcgtggaaatcagcaggcttttcccgaaacggcgcggacggctgaggaaataataactgcccgttttcaccaatcggtaaattaaagccgttttatcgacatagtaataaccctcgttgcggattttctcgaaattctgaatgcctatcggatatatcttgtcgcccatgcttgcggatttttaattgttttccaaaacaaagttaccgattatttcctgattccacaaatcgggatgattttaatcactatatttgtcttgccaaatgaaggtcacagcccatgaaagaatatgcagaattggaaaattttatccgcaagcattatgcggctttatatacttctgccctaaagttcgtcaaatcggaagctgtcgcccaggatattgttcaggaaatcatcatccgctactgggaaaaccaggaaaaatacaacacaatcgaatcgatagagaattttctctttgtctcggttaaaaatgaagccctgaattatctccggggcatcgaaagggaaaacaaccgttatgcccgcctcgaaaacccggaatccgaggaaccccagattttcaatttattcatcgaagaagaaaccaaccagatgttgctgaccgctatcggccagctaccggaacaaagtgcccgaatcatccgtctggccttatccggtttggaaaataaggaaatctcacgtttgctggatgtttcagtcaacacggtaaaaaccctcaaatacagtgccatccggaaactgagggaacattttcaaaaaaaagctatttaggaatattcagtaaatgtccctataaaatacaatggcatatgaagatgccccagtataatcactt

SEQ ID NO: 6206 - DNA, 739 bp, Unknown
  gut microbiota DNA sequence
cggcggggacggtccacctgtactgctttttcgtttcggcggacgggtcggcttattcttccggcagttatttgtgtattcatttaaactctgacgtatgaaaggaattgtagaaactgtggctggcgtgatagaacgcctgtcgatatcctcgaccgagaaaaaacggttgaaacaggaactggaaactcttttagtggattatgaacgggagcatttgcaggtgcagtcgggcgtgttgcgcagcgaggcacagggcaactggctgcaacgttcgtggcgtccggtgattatgcttgcctttgctgtggtcatattggcgggtatgtttaccgacttgcctttgctggaagacacctcccggttctgggatttgctggaaatcggattgggcggatatatcgtcggccgtttccggatgagaaagtgataaattttattattggaaattatggaaattttgaaacatcgtttggtagatggcggcgtgcagcatctggtctgccggaaaaacagccggaagctgtcgggaccggatatgatagtagtgcactacacggccgggagtagtgcgcgcacggccgccgagttcctggcaaaagaagaagtgaaagcctcggcgcatttggtcatcggcaggcagggcgaactgttccagttagtgtctttcgatacggaagcctggcacgccgggcggagcagttatgacgggcgggcgaacctgaaccgttattccatc

SEQ ID NO: 6207 - DNA, 192 bp, Unknown
  gut microbiota DNA sequence
cgggtgccggctcctgttcgtcttcttcggaatcaccgcttccgaaagatttaaatttacaacttccccatctggactccactccaaggccgataactccgtaagagataccgccgccggtgacaaaataagaagcatagtttcccaggagggtatcgtcgtcgtataaagctgaaaaactgggggcaaacc

SEQ ID NO: 6208 - DNA, 1014 bp, Unknown
  gut microbiota DNA sequence
ctgaagccgtcactttcaagaggcgagatacaggtaataggcgcaacgactttcaaggagtacagaaagtatatcgaaaaggattccgcacttgaaagacgtttccagcctgtaacagtttccgagccgacagttgaggacacaatcacagtcctcaaaggcataaagcagtattacgagaatttccatagagtaaagatatcagacgatatgctcagagagtgtgcagtgctttctgaaagatatatcaacgacagatttctccctgacaaggcgatagatcttcttgacgaagcctgcgcctgcacaagtataagaacacctgaaatagaggagttcaacgcacttaacgaggagcttaaaaagcatgaaaagctcgttgaggattacgagcagaagtcagaccctgactatgagataatcgcaaaggaaaagggcgagatactcaggatacagaacagactcaaagaggtggaagaaactcttaaaaacgttcaggtcacagaggaagatatctcaaaggtaatagagctttggacaggtatccctgccaataaaatagctcagaccgagtatgacaagataaagcatctgaaagaagccctttcaaagcgtgttatcggccaggacgaagccgttgataaggtcgcaaaggcaataaagcgtacaagggttcagctttcaaaacgtcgcagaccggcttcatttattttcgtcggcccaacaggcgttggaaaaacagagcttgtgaaagtccttggagaagagctttttgacgccaccgagccgcttatcagagttgacatgaccgagtatatggagaagcactcagtatcaaagcttatcggctcacctccgggatatgtaggctttgatgaagcaggtcagcttaccgaaaaggtgcgccgcagaccatattcagtggtactttttgacgagatagaaaaggctcaccctgacgttatgaacatactcctccagatacttgacgagggacgtatcaacgattcgcag

SEQ ID NO: 6209 - DNA, 389 bp, Unknown
  gut microbiota DNA sequence
ggatatactttactatccaccggcatctccgcggcaaaccgccgggcttcctcctccgaggcacactgtttcacctcatatcccagactatgcagaaaccggtcggcgatagaggagaaggtcatcatctgctctgctcccagtttcgggaaaaagatctcccggttctgccccagaatgcaggccagcatacagatctgtccactctcgtcaggagaaacgaaatagcgtttcacatcgttcggagaactcagcggctgacgcttcatcagccggccgataaatccggccagcagacttccgttcgaaaaagccacattggcaaaacgggccgtcgatattttgaaccgcgaagaataggccatgatcatttcctccatgatcttctt

SEQ ID NO: 6210 - DNA, 443 bp, Unknown
  gut microbiota DNA sequence
gagttgggtgttatcaacaccggtggcgatggagtagttaccgtagacggtaaagaataccccatgaagtataaagaagctctttatgtaggttgtggcaataaagaagtaactttcaagagcaacgatgctgccaaccctgccaaattctatatcaactcggctccggcttacaaaccttacgttactcagttgattacaaccgatgccaaacttcaaaaggccaatcctaaaaaatatgctttgggcatttccgaccattacggaaaaatggaagacagcaacgaccgtatcgtaaaccagctgattgtaaaagatgttttggaaagagtgaaaaacggcggtacaaaccaattacagatgggacttaccgagcttgctccgggttctgtatggaataccatgcctgcccatactcacacacgtcgtatggaagcctatta

SEQ ID NO: 6211 - DNA, 1280 bp, Unknown
  gut microbiota DNA sequence
atatcataccgccacgcacccacctgatttttttcgaaagcactcttgttttgtccgttcaatgccaaagccctcaggtaagtcagttcgttctgattgccgaaaggctgcggtaaattcaatacaattgcaccaccttcccctgtcgttatattttttacggaatgcagggagaaaacggtaacatcggccacggttccggaagcttttcctttataaaaagcccctaaggaatgggcggcatcggccaaaagcattatccggcccaattgcttttgcctcccggaggcaggccggtacaatgccttcacttccgggtcgtccactactgcccggatggcatcgtaatcacagggataccctccgatatcgacaggtaatatcaccttggtgtgttcattgatcgcagcttttatcttttccggatcgatggtaaaatcatcttttacgtctaccatcaccacctttgcccccatattcatggcacacaaagccgttgcactgtaagtgtaagcggggataatcacttcatcaccgggacctactcccaaccaacgcaacatcagcatcgccccggaggtccacgaatttacacacaaaacagcttcacctcctgtgaactgacggatttcatcttccaaagcccgtgctttgggacctgtcgtcaaccagcccgtatgagtcagggtatcctgcatttctgctattacctcatcatcgatgacaggtaaggaaaaagggattttcatattatataaatttatatattaaggctatatcattttgtcagtccctttacaaaaaggaaacacaggtaagatattccggagaattccggaaccgaaaatgatggatgaagataaaaacttcgttccttatgccgtttgtaacacctttagtactttttcccccgcatccccttttccatacaaacggttttcaaagcaggcctgacctttttcctgcaattcttttacactttgtaatatccgatcgtgatcactccctgccaacagattgaatccgttttctaccaattccacccattccgtttcatcccgcatcgtcacacaatactttccgaaaaaataagcttctttttgcaatcctccgctatccgtcatcaccatcttacaattcttcaacaaccacaccatctccagatatccgacaggatctataaaacaaatcttactattggaaaaatcgtaattcagtgctatcaatttaccccgggttctgggatgcagagttatactaccgacaaattataatatagc

SEQ ID NO: 6212 - DNA, 313 bp, Unknown
  gut microbiota DNA sequence
ctgcttctacgctgaatggaatgctctcctaccgattgtatcatctacaatcccatagcttcggttatatgcttatgcccgcgtattatccatgcaggaccgctcgactagtgagctgttacgcactctttaaatgaatggctgcttccaagccaacatcctagctgtctaagcagtcccaccccgttttaattccaacttagcatacaattggggaccttagctgatggtctgagttctccctctttcgtcaacggaccttagcacccgctggctcactccctgtcttcatgttctagcattcggagtttgg

SEQ ID NO: 6213 - DNA, 644 bp, Unknown
  gut microbiota DNA sequence
atctccagttcatcaagtatagccgataaccaaagtggcatagcgttcggtatctttatctccattaccctcatgccagcaggcagaagctctttgccccaaatgccattgtcaagctccttttgctcctcacggtaaagaatgtgcgtgtcaaaggtcagcctaagggacgggtcttccgcaccgcagtaagcaagcctgtcatagctaagatacatagcaggagcaatgccctcatagaatttgagaaaatatttcagctcgttctctatctgcggattatcatgaggtacatctttgcctgcaaagaaatcacgggtctgtgcaagggtcatttcaatacgcctcttgtagaccacacccttgtatttctttttaagctccacaaaaaccatgtcttcatcattaggtacgccgtagctcctcactctcagcttttccttgtaaacaggcttttcaatggagtttctcacaagctgatgacttggtgtgtcataatatatgttgcagatagtacttttgtaatatctgtctttgacaaaatgcccatcgagcttttttataagcttttcataagtcggttcatcaacgatatattttttctctatccgtctgaacacttcctgattgccattcatatccac

SEQ ID NO: 6214 - DNA, 137 bp, Unknown
  gut microbiota DNA sequence
tgccaaccgaaagttctgtacaaaatatggaatatcaacatcctttgtacgcaagggaagggcggccaaggatgaatccttgagaaaggttctcagaagtgaactctccaaagaaagggccaccaggcttgaaggca

SEQ ID NO: 6215 - DNA, 646 bp, Unknown
  gut microbiota DNA sequence
attactacatgacaggcacaaagtgcggttttgtcatatccgaaattcacttatgatacctagtattagcacttatctgaaacgccctgtaaacctgctccaaaagcattatccttgcaagctggtgtgggaacgtcatctccgacattgataagcgcaggtcagctttcgcctttatctcaggggcaatgccgaatgacgagcctattatgaaattcactgtgctgaatccgttcagaccgcattcgctgagctttttggacagcttttcacttgaaagctgcttgccctcaatgcacattgcaatattgtatgcgcctttgatgtcagtgtagcttttcatggctttcgcctcgttttcaagcgccgccgctatctccttttcagaggggttgtcagataacctcgactcgttcagctcaactatttcaagcttgcagaacgcccccagccgctttgagtattccgccgctgcgtcacgccagtatttttctttcagctttccaactgtaataagatttatccttatcaaaatgccaccgccattccgctgccctcaggctttgctatatgtaaaatatagtcgctgttgcgctcgtaatccccaagtgctcccacagccgagttttcagcctgcaaaggcgtg

SEQ ID NO: 6216 - DNA, 334 bp, Unknown
  gut microbiota DNA sequence
atgcataaacatgaccgtcaagttcgaatattttattgattctacgcttgcgggcctcggcaatcatgaatgttgcgtactcttcgaagatgcggtagttacgttgctcattagccttactaagattactccgagttacagacttcccgattccgagatggtaaagtttttcagcatgagcttccatagccacaatcaaatctctgagactctctcgattggatagctgaccgaacatcatcgtaagtagttgattccaacaggtatagctcttgatatatttgtcgccttcatacttctttatgagatagttgaagtgattacgatcaagaaa

SEQ ID NO: 6217 - DNA, 206 bp, Unknown
  gut microbiota DNA sequence
agttggttatgggaaaggccggatctatcatgattccgcagaatatctggtagtggaggttgccgttgagatgttccaccagctgtctgtcggagaatccggtgtaggctttcaggaccataagggcaatctttgccagagggctaaaaatgttcctgcgtccaagacgctgttccgacaagcctatggcttttgccatacggtca

SEQ ID NO: 6218 - DNA, 36962 bp, Unknown
  gut microbiota DNA sequence
ctataaagtaccttggtatttcttacttaaaaatggttcaggaaagcttgaaaaagccttggttccagaactatagggaataggaaaccgtagatcgccccgtaaaaatgggcattatgattgatgttgtcacttccctggcgggccatatattggcagtaagctaaataaagaaggccgaacagaatacctggaatgggaattacggcaaaaagcagaattttgtcccacggattcaggaatatggctgtgaataaaacggcagaaaccgcaccggaagctccgatagaagtgtaccatgccgcattacggtaacggatcacatcagaggcagaagctacaaccatccctccgaaatagagtagtaaaaaagccccttctccgaatcccagataacggaatgtctcttcgatatacttgccgaatgaccagaaagtaaacatattcacgaataaatgcacccagtctgcatgaacaaaaccatgcgaaatgatacggtaccattcctttgcatgtacaatccgatagggtttgagtgaaagtttatcgaacaatagtctgttgttgaaacaaataaaagagaccacaacggttattccggtaatgagataggtgatcattgatcggggttattgcttgaaacgtatactcaggatttgataaatcagttttgaggccaggaaatccggggctttgttgatatcgttcggacaaagttcgacaacatcgagaccgacgatattatggcgttcgttgattagtttgagcaaagtcaacactgtccggtaggtcagtccgtcgggttcgggggtacctgtcgacggcatataagcggggtcgaatacgtccaggtcgattgtgacatacacattatcgtggagtttttgagacacctcgtacatccaggtagaatcgtccgattctttaatttcatgggcataaaaaatacggtccggatcgatattgtgcttttcttcgatggcgctgctacgaatacctacctgaacgacacttggggtaatttctttgccccgggccataacacaggcatgattgtaaggcgaaccttcgtattcgtcccgcatatccgaatgagcatccagttgcaggatagaaaatgtatcgtagtatttggctatagccttgaaagcaccgatactgaccgagtgttccccacccaataacaccgggaactttttatctttcaagatagcttccacgcgctgttcgacttcctgagccatagcttggggagaagaatcggccgtaacgggttctaaagtggcgataccgtgtttatatacttccgaatcggtttcgatatcgtaaaattccatgttgggcgaagcttcgagtatggcacgtggtcccttgtctgctcctttcagccaagtacttgtaccatcgtaaggcacaggaagaatagctatttccgccgtttcgtaatcggtgtattgttcttcaaagtctccgtaaagtaatttatccatacctaaatagtttatactacaaatctagatttattttgtgggaaataagcgctatacatgtgaaatatatttaaaatagtcagaacgttacctgaaatcctacacccagactttctttaaattgtaagcgtggccctttacttccatctttttgaacgattttagtatcgttgtcatagatcaggtttgtggaaatattggccgaaaaccatttattcacggtcatatttaattgtacatcccaacggacatccacgttttgcggatcttccagataattcgagaaaagatcgactcgtgaatagatcgtcatatttttcagaaattcgtattttacttctacctttaagttaccacccatttctgaaaaaagatgctcgccgggatcaacaccgaatgaaccttcgtcggaaagaattttactactgacaaaagttccccgccaggaaatggccgaaaaggtagctgttatccaattctttggattccaggtcaaacctagaccggtagtcaggtatcccggagacataaaacgtgaaatataagtccggggttctgttttataatcataccctttcgcaaattgcgtgttgaagttcaacagagcactcaaataaaggcttttggtcattccgtagccataggtcgacgaaaaataaagtttgtcattcgtttttttcgttccgcttgtttccgtttgattcaagccataagccatttcgatccggttttgccacaaatgtttattctttttataatcggcactataattgagtaatacatcgaagccgaccgcattctcgcctcctgaggcccaattgcttaagctaacctgagataaatttaatcctccgttacctccgtatgtccagcttgaatcccggctaatgtgaccggcagctgctgctgtccaattgaataaaaaggtaaatgcgctgataaatattaaatttttcatagttctggtttttgatttttaaactacaaaattatactttatcaacaataatttacaaattattgttgaaaatcgcttacatttttcggatttgaccggagagttgtttgattgcctccaacgtattttctttgtctacatggcatacgatccggttgcgcatgatccagtccccatttaccatagaagagcgtacatttttactgttcatggcatagacaatggctgagtattcatcataaacaggaagcatattggaagcatctgcatgtatcaatatcaggtccgctctttttcctatttcgatcgaaccggttattgtgtcgagtcccaaggcttttgctccgttgatggtagccatccggagggctgtctgggcttttacagcctccgggttgtaatggacgactttagcgagcaatgcggcaaaacgcatttcctctactaaatcgagggtgttgttgctcgccgttccgtctgttcctaaagcgacagtaattcctgctttcaggtaagtgtctatatctgcaacgccactggctaattttagattgcttttgggacaatggccgatcgaagtcccggttcgggccaggagttcgatctctttcggattgagccatacgcaatgggctgcaatcacgttccggtcgagaagcccgatcgaatggaggtactcggcaggtggcatgcctgttcgggctgtgatgtcttcgacttcttgccgggtttctgcgacatgaatctgaagaagagtaccgtaccggtctgccagttgtttggattgttggagagtggcttgggaacaggtatatggggcatgtacacaaacggaagggtgaatgatagagtctccttgccattttcggatcaaagcttcacatcgggcaagaccttcgtctaccgtttgaaagctcgctgttgcaaagtcgatcatcgattctcccataactccccggataccggcatttttagcctcctcggctatgatatcttcgaaaaaatacatgtcgttgaaacaggtcgtacccgatttgatcatttcgataaaagccagccgggtagcgattctgacattttcaggagtcaccaaccgggcttctgccggaaagatgtgtccggtaagccattcatgcagcggaagatcatctgcaaagccccttagcatagtcataggaagatgagtatgtgtattgatcagcccaggtaataagaacatcccttctgcgtctgtgatttccgcatcggtatcttctaaagattgagtcgtgatggcgctgatttttccattttcgatcaggatatttccgttagggagaatatctaacctttcattcatcgtgataatacgggcgttccggatgatctttttattcatagcttttgtttttacaaaaataagtaaaactttaggatagcggtattcgttaatatcaaaaacgtcagaaataggtaaaagttatagagcgaatgaaacgaataggatttattttacttttgtttacatcgagtgtcggttttgcacagaaatatgccgtgaaaacaaatctggcctattgggcgactacgactttgaatatcggtggagaaatcgctttagctccgcgaatgacattagatatgacggcaaattataatccctttcatttccgtgggaataagaagattatgcattgggcggttcagccggaatggcgttattggacttgtcgccggtttatggggcattttatcggagtacatgcacatggaggaaaatataacggtggtttaaaaaaataccgttatgacggatggggtgtcggtggtggtttttcttatggttaccaatggatcatcggtaaacactggaacttggaaacagaacttggaatcgggtatgcttacttgaagtacgataaatatttacgtaaccgatgcggacgatttatagacaccggacatcgcaactattggggaccgacaaaattaagtattagtttcatgtatctttttaaaagcaggcagaaatgaaaaaaacgatcggaatattattgggatgcttatgcatattgttgctggagagcggtgtgaaacggattgagaagaaaccggctttgactattactccttcccgcttgcaactatttgtcgatcaacatacagatccatatacgataaaaatagtttatacattgaatatacctcatgggtttatcccttcctgtgcccgtatggtttatcaaccttattttctgtctgccgggcatcgctatgatttgactcctttggtcgttagcggaaaaaacaatcttcggcaagaaaagcggttaactgccttgacggataaacaaccggattatcccgaagctcttcggcttatatcggaaggagaaggaatgcaggtccgtttgtcggaaacagtgcctttcgaattatggatggcacaagctaaattgagggctgatgtgacgttagaggcttgtgaccgggagaaacatattgaagttttaaccctggccgatggagtgatctggttgcctatggggccgggaccggttcgggtgaagtacgcaaaagaaagagtgatggtacaaaaagtatcggaattcgaatttttctttccttcaggacaatatatcttcaaccgggaatatgacggcaacgcttcgagcatgaaacgaatgatgaagttggtcgattcatttcgatcggattcaacgatgcgcctggaaaaactagtcattgccggaagttcgtctcctataggtacggcgactttcaatgcctcgttagccgaacaacgggccgaacaaatgaaacagcgtttagtcgaacggaaacagatggaggcccaagagatcgagctcgaatatatcggtgaaaattgggccggattgcggcaattggtcgaacagtcgaaattgcctgataaagctgccgtcttgcgtattctcgacactacaaaggatgctgcccaacgcaaagcttcattaaagcagctcccgcaatatgaatatttgcgcataaacttatatcccgatttacaggaagtgaggtgtatcttctattatactcaaaaagaagagatcacgaaagtgatccctgaataatgagaagagttcggcagttatgattcgggctgttggggaaaaatcagacgggaagtgtcgtatcctcgttgccgggccttttccagaatttggtttagggtattttggtcgagatgaggagtacggcttaaaatccacaggtatttgtctgtggaactgccgatcagcgaccattggtagtccgggtccaactcgagaatgttgtaatcgctgtaaaacgacaggaagaaagcgacctgcaattgaccgggctgaccgttatgggaaggccgtgctttcccgatactacatttttctttaccgtcgacagcatcttgatgaccacaattcagaactttgattttcccatccgggcgttttgaatattctgctgtgacataatgcagaccccgttcgaaacgatgatcgtagcgggcgatttcataccatttaccaagataacgttgtaaattgaactcttttacagtgcttttgtctattgttttcatagcctttttctcaggtttacgtagaacaggaaggatgagttctaacaaaactcaggacttttcgtattatatccagtactttatgaacttgttatgggtgaaatacaacaagacggtttgcctttgccacggcggaattgggccatggcagtaattgctttggggatgacgatggccgtgttggacggggctattgcgaacgttgctttgcctacgattgccggagatttacatgtcaatccatccagttctatctgggtagtaaatgcttttcagttagcaatgaccatctctttactggctttttcctctttgggtgatctttggggatataagcgggtgtatgtgttgggcttgagtatgttcacagtgacttcgctgatatgtgctctttccgattcgtttattactttggttatagcccgtggtttacaaggtttcagtgcggcagcgatcacgagtgtcaataccgctttactgagggtgatttttccggcccgttttttggcccgtggaatgggaatcaacgggttgatcattgctgtcgctgctgctgccggccctactgttgctgccggtattttagctattgccgattggccctggttgtttgccatcaatgtgcccataggactggttgcatttgtattgagtttgaagtttttaccccggaatccggtaaaagtagaaggacaacgttttgatgtaacgagtgcggtaatgaatgccctgacttttggtttgctgatatgtgtaatcgatggatttgctcacgatattcattggtatattctgattccgggttttgttatcatgctgatcatcggctggttttttatcaaacgtcagaaaatgcagacttatcctttgcttccggtcgatttgctgcgtaataagatcttttccctatccttgctgacttccgtgttttcttttatagcacaaatgctggctttggtgtctattcctttcttttttcaacgggtattacacctgagtgaagttgcgacggggttattgctgacaccctggccactggccactatgattacagctccgctggccgggcgtttgatggatcgttacaatgccggtttattgggggggatcggattgatgatattcggtacggctcttttgttgttggcgatgatgcctgcacatccttcacatatcgatattatctggcgtatgtttttaggaggtataggtttcggtctctttattacccccaacaatagtacgattattgcatcggctcccagagaacgtagcggcggagccagtggtatgctggggatggcccggctcttgggacagactgtcggtgcggcttttgtggcagtcctgtttgctatgtttcccggacatgggatgcgatatgctttgatttttggagccgttatcgctgttgtttcggccgttatcagtagtttgagactcaggaagtagaaccagatcggtatttttcatggctttggagcggtctacagctccggcatgtagaaggatatgtttccctttccagttggatggaatgataaaattccggcgataccacaggtcggtttcgtttttgccgacgatacccgaaagttcggttattccctccgacagtgagcgatgagttgctgaaataagggtaacattttgtccgaaccggccaggagcatttcgggatgccattggatacctacgacaaaagtgtgatcgggcatttcgacagcttcgataactccatcaggggctgtcgctgtgattttcaggtgacgtcctaaatggttcaggcattggtgatgaaaactgttgacttccagttgctctccccaaagtcggcctaaaatagaatctttttcaatacttaccgggtggaaaatatcctcccgtgggctgtattggctgtgtagcataaccggatggccgatggctgtgatatcctgccaaagcgtaccgcccaatacgacattcaataattgtattccccggcaaatggctaatagaggcttgtctgtccttaggatttcttcggtcaacgcccattgtgcccgatcgagtccggtatgaaattcctccaggcagggatgagggaagtctccgtataagatggggttgatatctcctccgcccgagagaataaaaccatcgcagacttcggcataccggacaatggaagcccgatcggctaccgggggaagaagcaggggaatgccccctgccttaacgactgcatcgatatagtctttgttgacgtatatcctttccatccccagaaatttacctttatctacggtatggagatttgtgctgataccaataatcggagtcattaatcgatcggcttggttttgataacggtaatgccgttttctgtataccggtctaagatcccgactaaactgatcaaatggggggctgccatgtgagcgttccaatcttcgacagtctgccaggtttcgtgaaacatgaaatctttcggatcgtctttactgacatgtaattcataatgcaaagcccctttttcagctaatgtaggcgcaatcagatcttcgagaattttttgccattctttttcagtatttcctttgttccggttataggcgaacaataccaacgaatccgggactatcacgggattcggagcttccgaacgttcccagcgttgtaaaaccggttttcggtctgtcagttcgtctctgcgggcccgaaaagcttgcagatgttcactttgggtatgttttttccaaagttcttcgtttgcccatatttcatgaaaaatgaattgacaggggtcttcccgatcttcatacaaatggtaactgatagctccttcttcctgacgggtcttttcgatgaggtcgagacaggctttttttaattctccggctttcccttcgcgggcatgggaaatagataccagagttaattgttccgcagtttttgacgtaaaatagttcattgtagcattattttaaaaaatccctcacttttttttctgcttcccggaaggcctcttccagcttatcgttgacgatgatcgtatcgaatttgtctgcgaaagtcatttcgtattctgcttttgccaggcgttgttcgattttttcaggagcatcggtcccccggccggtcaagcgttggcgtagtacttctacagatgggggctgaataaagatcgataacgcattgtctccgaatttctttttgatatttaggccgcctacgacatcgacatcgaacaatacagtatgacctttcgcccagatccggtcgatttcactgagaagcgtaccgtagtaacatcccggatacacctcttcccattccaaaaattctttattttcaattcgtttcctgaattcatctgctgtaaagaaataatactctttaccatgtatttcttttccccggggagcccggcaggttgctgaaatagaaaattccaaccctaaccccttttccaataagtaatttacaattgtactcttacccgctccactcggtgctgaaaaaataattacttttcccatacgatgatagtttataaggtttataaagtttgtaaagtgggatcaaagtttttttataaagttcgataacattttaggtattgtttcggtatctgagttcgacgtttgattttcgttcatagccttcggtgatgttattcataatcaaagcagttgctctttcgatttggtctttaaaaccgaaatcatggcttttatcgaatagcaaatagatttctatacacaactcttttgccttttgccatgccagactatcttcaaaacgttcaatcttcatgatttatccttattatgtttaacaccaagcgcctgcagggtccatgaactttaaaaatcttataaactttacggactttaaaaacttataggacattcaaactttgctcttttatcttttccagttcgtctttcattttaacgacgagtttctggatgtcgtggtcgttggctttagagcccatggtgttgatctcccgaccgatttcctgagcgataaaaccgattttccggcccggagcatcttcatgttcgatcgtttccaaaaagtatttacagtgattggccaacctgactttctcttctgtgatatccaatttttccaggtagtagataatttcctgttccagccggttttcatcgatattttgaatatccgtccattcattgattttttcctgtaatttctgacggatgacttctacacgttttacttcaaattgaggtacctgagcagacagttcctgaataagttcgatgcggtgacatatatctttgattaaagcttttccttcctggattctgaatttgttgatttcttccaaagctttttttattccagcttccaaagcctcccattcggtatcttccaactcttccgatttgatttgcaaggtatcggggaaacgcatgacggtttggagaatcttgtttttgtcggcttcgatgcccaattcgttggcgatgtctagtaattgattgaagtattgagttactacaggcttattaatggtcacatccttatcgctttctgtattgtcaaagtagatacacatttctactttcccccggtctaattgttcttttactatattccggatttccatttctttttctttgtaaagattaggcatcttcagattcaagtccagggtttttgaattcagacttttaatttcgatcacgactttcctatttccgttttcgatggtgatttttccgaaaccggtcattgattttaccataatattgatttttgattcttctgcaaaaataacgatttgtttgtaaatattcttattgcagattatttcatttttcttcgtatctttacaccccaaaataataaaagagaaaagatagcaaaatcataaatcaagaattgattcatggaaaacatccgcaatttctgtattatagcgcatattgatcacgggaagagtacattggccgatcgtttgttggaatataccgggacggtaaccggtaaagatttacaggcgcaggtactcgatgatatggacctcgaaagggagcgtgggatcacgatcaagagccatgccattcagatggattatcattttgaagggaagaagtacgttttgaatctgatcgatactccgggacatgtcgatttttcgtatgaagtatcgcgttctattgcagcatgtgaaggagctttactgatcgtcgatgctactcagggaatacaggctcagacgatttccaatctttacctggccgtagagaacaacctcgaaattattcctgtattgaataagatggacatgccgaatgctatgccggaagaggtgaaagatcagattgtggaattgatcggatgtaaacgcgaggatattatcgaggccagtggaaagaccgggttgggggtagagcaaattttgcaggcgattgtcgagcgggtaccgcatcccgaaggttttccgaatcagcccttacaggctttgatcttcgactccgaattcaattctttccggggaatcattacttattgccgtattgtaaacgggagtttgcgcaccggagatgtggtgaaattcgttaacaccgggaaagaatatacagccgacgagatcggtgtactccgtttaaaacccgagccacggcaagtgctcgagaccggtgatgtgggatatattatttcaggtatcaaaacttcctccgaggtaaaagtcggagatacgatcactcatgtcgacgaaccttgtgatgttgccatcgatggtttcgaagaagtgaaacccatggtatttgccgggatttatcctattgattcggaagattacgaagatttgagggcttcgatagagaaattgcaattgaacgatgcatcgctgactttcgaacctgaatcttcggcagccttgggattcggtttccgttgcggatttttgggaatgctccatatggagatcgttcaggaacgtctggaccgggaattcgatatgaatgtgattaccacggttccgaatgtgatgtatatcgctcataccaccaaaggcgaggtctatgagatgcacaatccttcggatatgccttctgccagcacgttggattttatagaggaaccgtttatccgtgcccagattattactccggccgattatatcggtccgattatgaccttgtgtcttgggaaacgggggattttgatcaaccagcaatatcataccggtaaccggatagagatcacctatgaaatgcccttaggagagattgtgttcgatttttacgataaattgaaaagtataacgaaaggatatgcttcgttcgattattatcagatcggatatcggcgggcaaatctggtgaaactggatattttattaaacggagagtccgtcgatgcactgtcggcattgattcatttcgataatgcctatggtttcgggcgtcgcatttgtgagaagctcaaagaactgataccgcgtcaacagttcgatatcgccgtacaggcagcgatcggagctaaagtcatcgcccgggagacaatcaaagcagtgcgtaaagacgtgacggccaaatgttatgggggggatatttcccggaaaagaaaattgctggaaaagcagaaaaaaggaaagaagcggatgaaacagatcggaaatgtcgaagttcctcaaaaagctttcctggctgtgttgaagttagattaaagtgaaaggaatgacaggcttattcttcgggtcttttaacccgattcacaatggtcatctgaagatcgcacagtatttgttgtacaaaggatattgtcagcggatttggtttgtcgtttcgcctcataatccgttgaaaagcgatcgttctttattggatgagcaaaaaagattggaaattgtgaaagctgcgatccgtggggatgaaaggatgcaggcatgtgatgtcgagttcggtttgcctaagccttcctacacttatgccactttgcagctgttgaaaaaaaaatggccggaggaagagtttgctttgatcatcggagaggataacctgagagattttcataaatggcggaatgctaaagaaattgtggaaaattaccgtatattggtttatcctcgtaaaggagagggggtatccgcttcgatgtgggaaaatctatttctgatagacgcacctcttgccgatgtttcttcgacggaaatccgggagatgctcggagaagggcaggatatttcaccttatgtgcctcagccggctttgcctttgatcctgaattattattccgtaaaatgaaaatcctgttttgtctattattatgggggacaatctcttcaggtgtttatgcacaacgggtgcttcctgcaaaaagtaaagaacagaagagaacagaaaaacagatagaaaagaaagaaaattctctccggcagaaagataccgagttgcggtgggatccccgccgattaccttcaaagagtaaaggttttccggaaatctctgcctggcataccgggacagcaggtattgtcgcttcggatgcagcagaaatcagtctttttaatcccacacggatcggtttctcaaaacgtacggaaatcctttttcggatagctgaggaaccttttttacctaatatcgggttgaaacaccgttggtgggggaacaggcgttttgcctgggctacagcacatacgttgtattattcttatcccggtttgaagatattgcagtcgaccggttttaaagaactggttccggattcggtacaggtggcccaggggatggctatgcggcatgaaatattgttttcctggttattgaatccgcaagtatggggatgtcccgatccttcggccgaaaaaatactgaccctgcatgcgggcatagagggttatgtcgggttcgggaataacgaagtaatgccgttcgattatgcccacaccttgtatcatactcagttgctcgacggtaaagtgctttattatggaggattgcagtttgattcttattggggacaccggtttcattatagtttaaacggccttttttatagtgttgatttcacaaaagcatatgctgtagaaggaaatttgcgtcttacttattatgtgtcaaggcacttcgggctctcagctgtttgtaaaattccctatatcaggataaatgaaaaatccggatggacttatgttcctttactcgatttgacctatctgatacatcccggacgtacagtgatcagacatggcttatataaaaacaaaagacgacaaagatagatcaaaatggaaaatgtattgttgcatagttgttgtgccccttgttcggctgctatcgtcgaatggatgctagctcaggatatccgtccgactttgtattatttcaaccccaatatctttccacaggaagaatacgaaatccggaaatccgaatgcagtcgttatgcacaaaaattaggtttggagattatcgacggggattatgatcatacagcctggttgagtgacgtggcgggcttggaggatgaacccgaacggggaaagcgatgtctgcagtgtttcaaaatacggttgctggccacggcaaaattggctgatgaaagaggctttcgtttgtttactactacactggcctcttcgcgatggaagagccttcaacaaatcaccgaagccgggaaatgggctgcggctcgctttgaaggtctggaattttgggaaaagaactggcgtaaaggtggtttaagcgaacgccgtaagatacttttggccgaaaatggtttttataatcagcaatattgtgggtgtgaattctccttcagaaagccccaaaataacgatttaccttaatatagggataccaaaacaggcggaatacctagaatcggggatttccgggtctatttagccggcctatctttgtgtcatcagaattttgtcacgttttattgattaatagttgcgaaagtcacaggtaaagccggcctgtgactttttttgccagaaaagctccgctccgaaaagacataaaaaaaaacaccggcaggatgcgactggcggatccttcaaataaaaaccctgtatctttcgtattgtggccacatcatacaatacttccgcatacaccatttttatctccggtgtttttaacagtacagtaaatatatatgtgcaggtgtcccactctaaatcctcgagagtaaagacgtttgctgttactggcaggtcttctgacttgcttctctccggacgccttcccgtcgtacatattgcagacagtggcaggagtattgtccggatctggttatgaagcttacagcagcgggactgtccgggattttcacccgattcccttttatttcttgtaccggatgataacaagaaaaccagtatggaacaaagataacaaaaaaatgaaatgctaatccaagtttttttattattttaatatttccggaatgggttggcctatacaaccattaggggcttgtatgtgcaataatgctgctatagtcggggctatgtctgtcagcccgacaaggcgccgggttgctccttgccggattccccaacccatgaaaagcaggggaacatgagtgtcataagaatgccatgtcccgtgagtagttccctgcggggtaggcgtcccgctttcataccagcctggtttgacgatgatttgtattgctccgctgcgttcccggcaatatccgttgatgattttttctctgatacctgtagggagtgtagaaattgcgactttttccatatctacggcataggctatgccttccagattgtttagataatccaggacggccgactttacggtttcatacgctagcctggaccgggaaataagctgacggtccagatggacctgatagttatccaggctataaaccaggccttgaacggcgaaacgattgttcaaggtactgtccaaccgatgtaagaccttttgatataaccagctgtcggaagggatccggtgggattgtaaaaagccgacattatgggctgctgcatgatcggctgtcagaaaaacggtataatgatcccggccgattttctcgtcgagaaactcaaagaacagaccgagatcctgatctaaccggagataggtgtcttcggtctcgatggcattcgtaccgaattgatgaccgatataatctgtagccgaaagactgacagcaagaaaatcggtttcttcacgctggcccatttcctctttttcgacagctgttttcgccatttccaaagtgaaggtatttccgtaaggagtttggcggatcatactatatccatttgtcttcaataatttggaagtcggaataggaaaaacaggtttttctccttttatgaatggggcttcataaggagtatcgtcttttgtactttgtttatatgtcccgataggatacaacgtattccagtcttgttgcaatagttgggaggctcggtcccgggcattgaaatcttcgacccagcggggtaatttatcggtgtaataactacttgtaatccatttgccggaatcgtagtcgaaccagtaagcggcatttgccgtgtgtcctgccggtagaatagcggcccggtctttgagagcgatcccgataactttagaatggaaatttgtacccagacgtaattcgtcggtgattgtcgttacccataaattccggggtgacatccggccggcttgtgagtcgctaccgacacattcgactgtcggatcggctgtacagtataactttttcttttccttttcaatatagaaatcattggctgcaataccggtcaccgagggaacagaaccggtgtaaatgcaggtatgcccgacggctgtgaaagccggtaaataattcaattgagtgttttcacatgtaaacccttctttcagcaagcgtttgaatccacggtctccataacggtcgtaataacggtagaggtaatcccagcgcatttggtcgactacgatgcctactactaatttgggacgcggaagagaagattcggccggttctgccccgagggacagcgaagtgagaatgaggatcaaaccataaaaaaactttattttcataacagtaaatgtgaattttatttgcagcaagattacccgaaaattgtttcaaacagattacgattttgctacaatcggatgtattgttcggattccgggttgcataaacaagggggtttttctaattttgccattccaaaatttaattcttcccttatgacgaacgctgataccgatattcaggaactttctaattttttacttgatttcgctacgactttgatgggtgtggggagccatacttcgcgggtagtaaggaatgtaaatcgcattgccgagtcgttcggttatggggtggatatgactatttttcagcgtaatataaccatgaccgtaaaacatgccgacgattattctatccggcgcacttatgtaaggcgtatcccggctttggcattgaatttcaggacgatatccgatttgagctcgttgagttgggaagcctatgatcatgatttgcctttggacgaattgaaaaaacgttatgccgtaattacgacgcaaccccgtatgtcgcgttgggtagtgttgattttggtggcttttgccaatgctgctttttgccgtttgttcggtggagactggatcgctatgggattagtgtggatggctactttgaccggtttttttgtcaggcaggaattgacggtccgtaaggtcaatcatatgttgatatttattgtttgttcatttgtggcttctctggttgcggcgctcggtgtgtattctgattggggtaccactcaggatgtcgctttaggtacgagtgtactttttttaatccccggagttcctttaatcaattctatcctggatatcctggaagggcatgtcctgatcggtttttccagggcgatcaatgccgctatcttgattatatgtattgccttagggttgtcgatgactttgctgatcctgggaaaagaagtgttgtaatttagaaatgataaatatgaatactgaatttgggttgtcggtcttgttcgacggttttttagctgcaattgccgctatcggttttgctgtgatttcgaatcctccgaaaaaagcggtctttatagcagctttattggcagcggttgggcatgcttgtcgctactaccttctccatcagactcctttggatcttacttcttctaccctgatcgctgcttttacgattgggatgggaagcatgtggttcgccaaattgattcattgtccggccgaggtattctctttcccttctctcttgcctatgattccgggtatgtatgcttataaaacaattttagctctgattcgttttatgaaaaatgacgacccgctggtgttgcaacagttgatcgtagaaattttccggaatggcttgacggctttattcgtactgtttgctttggtcatcggagtttcgctgcccttgtttatattttataaacaatcttttatgatgacccgccttttgcatcggaaaaagtcggcttgaagaaacaaatttaaatcgaaaaatatgtcacacgaccatcatgaccaccgatcccttgggattacttcgctgaataaagcttttgtcataggtattgttttaaatgccggatttgtcgttgccgaatttattgccggtttttggtataattcattgggattgatttcggatgccgggcataatctgggagatgtgttcagtttggtattggccatgctggcttttcgtctggctaaagtgagtccgactttgagatatacttacggttataagaaaagtacgattctggtttctctgctgaatgcagttattttgttggtcgctgtcggatttattttgggggagagtatagataaattattccatcctcgtccggtagatggagatgccgtggcgtgggtagccggagtcggagtgttggtcaatgcgctgactgcctggttgtttgtgaaagacaaagaaaaagatctgaatgtaaaaggggcctatttgcatatggctgccgacgcattggtttctgtcggggtagttgtctcgggaattgttattcagcataccggctggtatatgatggacccgttgaccggcatactgatcgctctttttatcgtctattccacctggggattattgcgcgatagtcttcgtttgtcgttggacggggtgcctcagggaatcagctatgaccggatcgggcagattatttcaactactcccggggtggatagtttccatcacatgcatatctgggggttgagtacgacagaaattgctctgactgcgcatatcgtcgttgcagatatggtagaaatggaacagataaaaagtgaactaaaatgccggttacagaaggccggcatcggacatgctactttagaattggagctgcccggacaaccttgtcaaaaggaaccctgtcattaaatctatttttgctggcaggaaatataaaaatgcttaattttgtcgatgaaatggtgattaaacgctgaatcgatatggctaattttctgaaatctttattcttcggagaaacagatgaatccgaagagactaaattgaaccgcaatttcgatgtattgaaatacgatggtatcaaagcattgaagatcggtaagaatacttatgctatccgttgtttcaatgaagcattgaaattgaaagaggatgtggaagtactcgaacatttggtcggggcctataaccgcgaagatcggatggaagaagcgatagaaacggcaggacgtttggtcgatatcgagcctgataatattcctgtcttgttaatgagggccaacctgaattttatggctgaaaaatatgaagcggccattgccgattgtaaccgggtaattgctttggatgcaaccaatgcttcggcttattatctggctgcgaaggctaaaaaagctgctggcgatgtattgggaacgatcgtctctttgtctcaggcgattacgataaaggaggattttgccgaagcattgttgctgagggcagagatgatgctgtctactcgggattataaagatggattacaggatatcgaaaaggtgatcggtttgatgcccgaagaagaaaacgcttttttgatccgggggcgtctgcatgaagctttgggtgacgatcaggctgcagagcaggattatgaagtggtgaccgggctgaatccttttaacgaacaagcgtatctgcaactgggaacgctttatattgcccgtgaacaaccggataaggccatcgaactattcgatgaagcgatagaattgaaaccggaatttgcgcgtgcttacagtgaacggggacgggcaaaactgatgaaaggagataaaaacggttctgtcgaagatttgaaaaaagcactcgaactgaatcccgaaggagaagaagcacagaaaataaacggaaagttttctaacttcgaagacatgtattcgaatcggattttataagctcgaacattttctttcttttttcgtaaggaatagaaaaaacgaaagaatatgaaaacgagattaatagttgtattacttggatttttgggttcgggtatgttcgttgcttgccgggacgatgcttcggataaagatgacgataggccggggaaagcggtagaattggcttttcaggctaaatatccgggtgctaccggtgtagaatgggaatctaaaggagttttccgggaggccgactttaccttgaacggacgtgaatatgaagcctggttcaatacctccgggatctggttgcaggcagaatatgcggtcacttatacctcggttcctgctgcgataaaagattttattgccaatagcattgattatcctcctactttatggacgccggatgcggctacagaagtgctcgaacggaaaaattatcccgattggtatgcggtggaattggagaacggggcgaatgaggtgacgatttgggctgatgccgaagcttatctgcaccgggcagtcgttgaagattatagtggaaacgatattcctcagacgattcttacttttgttactcaaaattataggcaggctttactgactgaagtcgggaaatggtccgacggggcatatcaggcgaatatgctggacggcaacgaagctaaacaaatctatttcgatcgctcgatgaactggcagtatacagaatggccggtattgttttccgaagtccctgcggtggtgaaagaagtcctgaatagtaccgcttatgaaaactataccgtacggggcgtcgattatcggcaattccctcagggagatcggtatcattttgttttgacccctaaacaacaaccgggactcgatatggctttggatatagatttgcaagggaatattattacgcaatagaagaaatagatttcctattctcacggtctttcgttacttttgccggacattaaaaaataggatgatggaagaccggatacagcgtgccgtcgaattattccggcaaggctacaattgttcacagtcggtatgtgctgcttttgcagacgagtatggttatactttcgaacaggcattacggatgtcggcttcgttcggtggagggatcggtcggatgagaatgacttgcggtgctgcttgcggaatgtttatattggcaggcctcgaaacaggttgtgtagagggaaaagatagggaagggaaagaagcgaattatagactggtacaacaattggcagagaaatttgtgaagcgtaacggttcgttgatctgcggtgaattgttgggggtgactcccccaagaatcgggttcgatccggtgcctgaagtccggacacccgaatattataaaaaacgtccttgtctcaaaacagtggaagaagcagcccgaatttgggtggaatatctacaaaatgaaaaatcaaaagtaaaagacgaagaataaaatatcaatgctgaaaaatattaactcgattaatttttggatttttattttggaaaacttttaaatgtttgattgcttgatgatttgaattttgttttgtagttatatgttgattatcaatagtttgaatgtgccggattctagattaaaagatttgtattggaaaactttgataatctgttgctttgaaaaaatgtcagaaaagtttctgaaaatatttttctcttcgtaaaaaactttctatttttgtcttgatttcggttcttatcctagcgtagggatgagatgaaaagggaatcgggtgagaatcccggacagtcccgctgctgtaagctccgtagagcggtttaaacccgagaagaaccactgccgttattggcgggaaggttgtttaaaccgggagtaagtcagaagacctgccgtaattattgttttctgaggctttcgaggaaaggccggaaagaaggattcgcttgtcttttttttgtcctctccttgccttatgagttatcggtttatgattaaaaagtaaaataatgattcagactgtattgaaaagagatggccgtgtagttggctttaatgaggagaaaatcgttgctgcagtgagaagagcgatgctgcataccgataaaggagaagatatgcaattggcacatgaaattgccgatcgtatcgcttgccggggacaggagcagatgagtgtcgaagatattcaaaactgtgtggaaatcgaattgatgaagagccgccgtaaagatgtggctcaattatatattgcttaccggaatcagcgtagtgtggcccgtaaagcgaaaacccgggatatctttttggaaatcatagagacgaaatcgaatgaggtgacccgggaaaatgccaatatgaatgcggatacgcctgccgggatgatgatgaaattttccagtgaaacgacaaagccgtttgtcgacgattatttgttggtagaagaagtaaaaaatgccgttcggcaaggatatctgcacatacacgataaagattattatccgaccaaaagtctcacctgcgtacagcatcccttggataagatcctgaaaaacggattctatgtcggtcatggtgaatcccgtccggcaaaacggatcgagacggctagcatcctcggttgcatttcgctcgagacggctcagaatgaaatgcatggcggacaggcgattccggcttttgatttttatctggcaccttatgtgcggaatagttttatcgaagaggtgaaagtattggaagagattaccggcgaagattacaaacacctgtaccattttcccatcaaagattatgtccggattgagctggacggtttgagcggggatgagcgggttttacaacatgcgatcaaccggacggtaagtcgtgtacatcagtctatggaggcttttatccataatatgaataccattcatagccggggaggcaatcaggttgttttcagttctgtcaattacggtacggatacttctgccgaaggccgttgtattattcgggaaatgctgacctctacctatcggggagtgggaagcggaggtacggctatctttccgattcagatctggaaaaagaaacggggcgtgaattatttacctcaggatcccaattacgacttatatgtttttgcttgtaaagtcagtgcccggcgtttttttcccaacttcatcaacctggacgctacttttaaccggcatgaattgtggaaagccgacgatccggagcgttttcgctatgagacggctaccatgggatgccggacccgggtttttgaaaaccgcttcggagagaagacttccatcggtaggggaaatctttctttctcgacgataaacattgtacgtctggctatcgaatgtatggatatttccgaacgggaagaaagaatccggacatttttctcgaaattggacgaactccttgagttgacggctttgcaattacatcgtcggtttgagtttcagaaaactgcccgggcaaagcaattccctctcttaatgagttctctgtgggtaggagcggagaagttgaaacctgaagatacgatagagagtgttataaatcaagggacactggggatcggttttatcggtttggccgaatgtttggtcgcgttgacaggtaagcaccatgcagaagatccggctgcacagcagttagggatccgaattataacccgtttccgggataaagcgaatgaattttcggagcgctggcagcacaattatagtgtattggctactcctgccgaaggattgagcgggagattcactcagaaggataaaaagagtttcggaatcatcccgggagtgaccgaccgggaatattacacgaactcgaatcatgtgcctgtctattatcgatgcagtgcccggcataaagcagaaatagaagctccttaccatgatctgacccgcggagggcatatcttctatgtagagatcgatggagatgcaacccacaatccggatgcgattatgtcggtggtagacatgatggaccgctataatatggggtattgttctgtcaatcacaaccgtaaccgctgtatggattgtggacatgaagacgcgaccgacggtttggaagaatgccccaattgcggaggacatcatatcgatcgcctgcaacggattaccggatatctggtcggtacgacaaatcgctggaatcaggcgaaactggctgaattgaatgatcgggtcagacataattagtttagcgatgaacctgtttttattggatattatcgaagataccgtggtagatggtccgggattccggacctctctctatgcggcaggatgccggcatcattgccccggttgtcataatccccaatcctgggaacgtgagcatgggcatgcggtcggagtagaagaggtggccgaacgcttgctgaccgatcctttttcaaatattacttttagtgggggagaccctttggagcaagtcgaagcatttactgaattggctaagttgattaaaaacaaaagcaaaaagaatatttggtgttataccggttatcgctacgaagaggtgtgccggtctgcccggttggcacaaatcttgccttatatcgatgttttggtagatggacgttttaatcagcatttgcgggataccgatttgcttttcaggggaagtagcaatcaacggctgatcgatgttcctgaatccctcttgaaagggaaaatacaactttacgattactcaccttatcctgttattgccgtatagggcttcaatcgttttcaatgcgatttcctgtttttgtataaatatgctctttcttgtataaatatgcctgtgtcttgttgtttaatagattgatatacagatataaacaaaacatgttgaaaatattttatgccaagaaaatgccgaaaacaattcgtaattttggtggcgttaaatcataaatcaaaatcataaatctaaagtcaatatgggatttgttacgaaagagaaatttctctctaaagatttttttataacctatgcctggttgttgggcggatgttttgtttttgccctgggggcggtgatgtttgctgagccttatgggtttgctcccggaggaacttacggattgtctatggtatttcaccatttgtgggggtgggagactgaaattgcagccctgtgtatggacgttcctttactcttgttgggaatttactttttgggaggtatgttcggggtaaaaaccattatctgtacgttcgctattccggcatttatgcgtctcatccactatttatacggctatgatgccttgttggagcccggtattacggatcgtacgttactgaacgaacagttgttgtccgctattttcggaggaattgtttatggtatcgggatcggtatgatctttaaggcacgggcaacttccggaggatccgatatcatttctatgattttgaataaatatacccacatatcgcttggaactttggtgattattgtcgactgtaccattacgttgtcgacggttgttgctttcggtgactggcgtttaccgatgtattcctggattatcgtatttatcgaaggaaaagtgatcgatctggtaatcgacggtgctgctgtacataagaccctgatgattgtcactgataagttagatccggtgaaggatgtcattatcaaggatatcaaccggggagctaccttattgccggctgtcggtatgtatcggggagaaagccgcaatatgatctacaccatcctcacacgccgtgaaatgatgattttacggcatcggattgcagaaatcgaccccgaagcttttatcaacgtaatcgattcgaaagaaattctgggacgcggctttaaaccgctgaaagaaagttgaaactattttactgccacttaggcagattgtcggttgtggttaaggaagagaatttttgaatagggtctgtgcagttgctttgcgcagaccctattgagttttcggattaatacatatcggtaatatcccagacaaaagcccggataccgttttctttgtttacttcatccaacgctttgacgtatttcagaatcaggggcaccatttcttcttcgacgatggtaatggtggcggagttcatttccggccaggtatgagatcccatacgaggttctccggtttctgttcctgctccgttaaccagaggccattgtgtaaatcctttgatctgtaattgattgaggagaaaagctactcgctctgtcagggcttggttgtatgttatgaatactgctttcttcatatttgattttgatttttgatttacaatttcagactttaatatcggtctgaaactgtaaatctgcattatcgattactttttgggtagatctttttcaggatcgaagtctttcataaatttaaattctttggccagtgcctttttcttgtcacggctaccgcttttgtccatagcagcgtatacggccgggacgatgatcatcgtaatgatggtggagaaaaccataccaccgattactgcgatacccataggccgccaggtttcggaaccttcacctgcactgatcgccatcggtaccatacccagaatcgtagtcaaagaggtcatcaataccggacgcagacgggaacgacaagcttgtgcaatagcatcgtacaagcgaatacctctttcacgcatcaggttgataaagtcgatcaacacaataccgttcttcgtcacgataccgaccaacataatagcacccaaggcagccacgatactcaaggtggtgttcgtgagcaacagggccagaattactcctgtgaatgcaaacggaatggccaacatgataatgaacggcatcttgaaagattcgaactgagcggccatcacaatgtataccaacatcagggacaacagtaacagccagatcaaagaactgaaggattcctgctggtcttcgtagttaccaccgatgtaaagactgacatcctgaggtacatcttccagattgtcgataatctgttgtgatgcctgtgcgatatctcctaaagctacgccagctgccggagtgatagacactttcaggatacgctgtttgcttttacgctcgatatttggcggtgagaaatactctttgatttcacccaattctttcagacgtattttttcgccgtggccgtctatgatcaggatattttcgatctccgtcagagaagaacggtatttctcatccaggcggacgatgatgtcgtattcttctccgtcttctttgaatttactgttacggaaaccgtagatccggttacggacataagaaccgacttctgaagtggtcaaaccatgacgagccagtttatcctgatctaaagcaatctggagttcggctttatcgtcgtcccggctgattttgatatcttcggctcccgggatctgacgggctttcactgcgatatcctgagccaaacgggtggttgtgttgaaatcgtgacccataatttcgatatcgacagagttgctacccatagaaccaccgctggatgaggtactgactgtatattgcagtacatccgggaaactcttcaagatagaacgaacctggtcggcaatgacgaaaatactccgttcacggtctttaatatctacggtacgtaaacgcatattcaggatattgttaccggtactgttcatcatagaagcgaaggaagcttcttcttcactaccgtacgacaagttgatgatcgtaatttccggtatatctgcccggatcattgagtcgatctgtaaagcgactcttttcgtctcttctacccgttgaccggattgcatttttgcatatacagtcatattgctctggtcgttctgcggcataaagtcggttttgataaaacgcgtaaggctgcaagaccccaggaagatggcagtcatgaaacaaatgacgaatgttttatgatgcagtacccaacggatcagtctttcataacctgaatccagcctatccaattgccgggatacgaaattgtaaaagctgaacttgctgttactggtcttttcctgtatccgcattaattgtgaacaaagcataggagtcagagaaatagccgtcagtgtcgaggtacatacggtgatacaaacgatccatcccaactgtttgaacaagattccggtcattccggttaccagggtcagcgggaagaacacagctacggttaccagtgtggtgacgattacagacaaccatacttcattcgttccgtatttggctgcttcacgtggccggcttccccggtcgatatgtttcgttacgttttccaacactacgatggcatcgtctaccaccataccgattgcaatagagagggaggacagtgaaattacgttcagagactcacccgttgcaaacaaatagatgaaggcgacaatcagtgagatcgggatggtcagagcaatgataaaggtggccctccatcgtcctaagaacagaaatacgaccaataccacaaagatcgaagcgtacatcaatgtttcctgcaggttgttgatcgactttacgataaagtccgagttatccgaaataatttggaacttgatgtccgtaggtaattctttcatcgccaattccagttgctttttcgcttctttagctacggcaacggcattggcgtcggtttgtttggtgatcatcagtacaccgccgcgtccccggttgatcgtttgttccagtgtgatgtctttgatcgtatcccgcacgacagcaacatcatgcaaatagatggttttattgttttgagtgccgagtacgatatttttgatctggtcgctttcctcgaattcaccctctatacgcaaagcatagtccatcagccccattttcacattaccggaagaaacatccttgttctctgccagaattttgttaccgatctgttcgagagtcaggttgtaagcatccagtttattcgggtctaaatcgacataaaccacacgttccggtgctccggcaacgatcacagaagctacaccgtctacccggttcaaacgggtgatcagtttgtcatccagaatcttgtctataccgggataagattggtcggccgtgacggcataaatcaggatcggcatcatagacgtgttgaaacgcataatggtcggtcggtcgatatcgtccggcaaattttgcattgctttatcgacagcgtcacgtacgtcgttggatgcttcgtccagattggcttcccattcgaactccagagagattactcctaagttgtcataggacgtagaggtcatctctttcagattatctacggagttcaattgatcttccaggattttggttacattttcctcaatatccgaagcattcgctcccggataagttgccatcactgtgaggtagggcgggtccatcttagggtattggtccaccggcaactgtatataagaggcaacacctaataccataatggcgataaataccattaatgtggaaataggcttgttgaccgctgtattgtatatactcatattcttactatttatttgatgtatttatcttattgagtgatagtaatgggtgaaccgtcgataacacgtccctgaccgacaacgatcaattcgtctccttcctggatttcgtcgctgatcaattcgatcttatcttcaaaacgcttccctaaattcacggatactcttttggctttaccgtctttgttgatgaatacgtagcggtcattcgcaccctgaagtttcaacacagcgatagcaggaacaacaacggtttcggtatttccgataaagaaattgatggttccgtacataccgggacgtaatgcttcgtcatcgttcggaatcttcacttcaacggtgaaagttctcgaagccggatcgatcgtcggataaacgatacttacctgtccttcgaatatccggtcggggtaaaggctacttttcaattctactttcgtgcctttctttaccgataagaaatattgttccgaaagatttacgtaggctttcaggggattgattttttcaattgcaatgatcgatggtttggaagcaccaccgaaagcagctcctgtatatacttctccgttttcgaaatattttccggtcactactccgttgaaaggagccaacatccgggtattttctttcaggaagtctacgttcgatttagctacctcatattgggtcactgcagcatcgtaggcttgcttactgatactctgagtttcattcagcattttagcccggttgtattcggtttccagattttttaactggacttcggcttgttgcagattcgtccggtccatttcgactaataattgtccttttttaatccggtccccaacttctacatagattttttcaatacgtccggtagctgcaggtgcataatacacttgctcgtctgcctgtaaatttgctgtgtagtccagggtacgggcaatgttttctttttccagtttttgaactttcaccgggatagcttcaactacgctggtatctttgtcagaatctttctttcctgaacaaccggctaatacagcaatcgcgagggtagataaaattacgttctttatcattgttttcaatatttaatttgtttctttttcaattacagagctaaaagatcgctttccgactattcactcctgattattttagctcgttatacagtttctccagttgagtttgtgcctgtaataatgttaaacaagccgaagtatagttgttttctgcggtcaggtaattattgttggcctgggtcagatctaaactggatacggctccggcattgtatttatactggtaattttccagcactttccgggcaacctgaatattctcactttgcaggttataatcttccaaagcatttttcagggcgaatttatattgctcttcctgtaagttcaattgatccgccaataaactcttgttcagcgtggtttgttccagcgtgattttctcctgatcgagctgcgctttacgttgcagacctgaaaaaataggaatactcatcgtaatggtagctgaatgtttcggactgaaatccaagctaggtttcaggattttataggtgtaaccgtagtttgcagagatcgtcggtgaataagcccattttttcaatcctaccattttcttttgtaattcctcctgggtctccatcagtttgtattgggcattctggttgatatcgaattcctggccggccagtttcaggaaattaccgacttccagaaaattatccagttgatcggccagggtgatcggagtcccggcttgtaaacccagttgcaggcgcagtaaattatagtttacgtctactgtccgttgcatagccagaaggctgtttttcaactgtccgacagtgatgcggatctgatcgacgtctgtcggctcggcagtacctgctgccagcatattttcggtatgacgctgtatctggctcatattttccaggttctgctttacgatttccatcaggcgttcgctcaccaggatggtataatacgaattataaaccgtttctttaatatccaattcggttacatccacttgctgagaagcaatcagtttagcaatcttactggtttgtattcccaatatccattcaccactgaatagcagttggttaacggtaaccccgacgctcgactggtctttcagtacggtagacgattccgatccagggaaactcatcttatatctgaaattggtgctatagttcagatcgccgttgatttgaggcaaaccttgagaaatggcttctgtcaccattttatttctcaattcgatattcatttgggatgcctgtagttctttgttgtgctctacggcaaaatttaccgcttgttctagcgtcagacgctggggatcattcggtgtggtctgggcttgcagcaaacacggaatgagaatcgcaacaaaaatgattaatactcctcttttcattctctttaattattagatttttgattttgattatacacgtttatatcccgaaattcagctaaacagcatagctcctgggaaagttagatctgttctttttcatggcttagttgttttttcatgaggtttattataaagtaaatgttccaattcatgcatcccttggggagtcgcgaaactgcggataatattttctacaatcgtagagacgatcgtagaaatcggatatttcaattcactgatcatttccggctcaccgatgagagacatttgctttacaaacaggtagacctggatctcacgattgatatcagaccggaaataaccatcccgtatccctttgtcgatcacttcgttaaataaattttggataaaaatctgatctttgttatttactcgttgataaacatccggatggtatttctttaaatcgaataaattcgccggcatcctgctgttgaagctccggatgatatggtctctgatcgtcaacatgatctctacagaattatgttgtttcagttcttcgatatccttctgtgtacggtaattatttctacggtgcatcatgatctgttcgacaagatcgtctttattactgaaatattggtataaagtttttttcgagatcttgagatgcgaacagatatcgtccattgaagtacttcttaagccatattttaaaaataactcagaaatattttctaatagttcttctcttgcccgattaaattcgctttctgtcatgataaaattaaatttgcacatgaaaacgttttgaatatatatcgtttccatgggacgcaaaagtacaaatattgtgccaaagcgtgattgtaatgtagttaaaatactgtgaaatataataaatagaaaaaaccttttactttttaccttttaccttttatctttttcctttttacctcttacctttgtactatgattgatcaagcgacgatacagaagattttcgatgctgcagatatttacgaagtgatttccgactttgtaagtctgaagaagagaggggtgaattatgtgggctgttgtccttttcataatgaaaaaacaggttcttttacggtctctccgtcgaagggtatttataaatgcttcggatgcgggaaaggcgggaatgcggtgaatttcattatggaacacgaacaattgtcttatgtcgaggctctgcgttggctggcggctaaatataatattatcatcgaagaaaaagagctttcggaacacgaaaagcaagagaagagcgagcgggaaagtatgctgatcgtgaccaattatgccgaagaatttttcgtacagcaactgttgcataccgatgaagggaaatcggtggggttggggtattttcgtcgtcggggattggatgatcggacgatcgagaaattcggtctggggtattgtcccgaaacttgggacggtttcacgaaagcagctttagaaaaaggatataaaaaagagtttttggtaaaaacgggactgaccatagaatcggaacgcggactgttcgatcgtttccgtgccagggtgatgttcccgattcgtgatttggccggtaagatcattgctttcggtggccggattatgaccaacgataagaaaagtgccaaatacctcaactctccggagtctgagatttaccacaagagccgtacgctgtacgggatctattttgccaagaaaagtattgtacagcacaatcgttgttatttggtagagggatatctcgatgtgatctcttttcaccaaaaggggatagaaaataccgtggcttcttcgggtacttctctgacgatcgaacaaatccgtctgatccgccgtttgaccccgaatgtaacgatcatctatgacggtgatgctgcgggaataaaagcgtctctacgcgggatcgacctggtactcgaagagggattgaatgtccgtgtcgtgtccttgcccgacggcgaggaccccgattcctatgcgcaggcgcatactgccgaagaagtgttggagtatatctccgggcatgaaacggattttattcatttcaagacaaaattattgttgacacaagcgggtagtgatccgatagaaagagcgaagttgattacagatatcgtcaggagtatttcgttgattcccgatacgatcacccgttcggtatatgttcaggagactgcgaaccaaatgaaggtggaagaaaagctcctttacaatgagatcgcccgtatccggaaagaaaaagtcggcgatccgacccctttgccctataaatcgcccactcaacagccccctcgggtgactctgactccggccaagactgttcaggtgacgccttgcgacaccgaagaaatggtgttggtgcgttatttgttgctcttcggaggacaggagctttacgaagaagagcgtgacgggatgccttattcggttactgtcggggaatatatcattcacgaactggctgaggacgaactggaaatgttgaatccccgtttgagagaaattcagaatgaataccggaagaattatcggaatcccggatttatcccttctaagtattttatcggcaacccggatgtgtcgatttgtgaacttgtcgcggatattctgagcgaaccctatgaattgagtaaactttggaccctgaaagattcctcgatgcggaccgaagagatgatgctcgacgaactattgcctaaaattgtagataattacaagatgcgccgggtagaaatcctttgccgcgaggctgacgagaagattctggaatttcaaaatgcaggcgatatggaacggcttgtcgaatggattaagaaaaagaatgctatgattaaagtccgctccagaatcaatgagaaattgaaaaggacgatttagcaaaacaactgtggttgatccagggacattcctaaaatattaggaaattagttgactgattcatgtgtaaattattgcgaattagttgacttttttatctttaggtagggatatttactgaatatcccgatctatcgatttacttttttaccaaaaaaattatgattaatagaaacgccatctgtactggaagatacgttacgaaattcccaattaaattctcctgtgtgattatctaaagcatataaccaatcatattcataattaccattattttctccaattacacctaatccatttgcaccattatggtgtccccatacctcatcataaatcataaaagaccaaaagaaaatggaaatatttacatgtgttatagattttatgttagcagtgccactttggaaataacaatgactattagctgccattgaagctaacaatacatttctttctgttgttcctccatcttcgcttgaagtttttaaacgtggggaaagaatatttaaattatttgtcgtattatgttttgtgaatatataacttgtgtgagaagctgaatatgtagttgggaatggatattgcaaatttatttcaagtgaatcattttctgcttgctctataactttatttacatctatgagatttgccaataaatcttcgtaggcttcctggcatacttttaatgaatctatagcaaaacagttattttttgtaaagataagcttgttatttattgctttaacatattcttttttggccagtcaaatagagtctttggaatctgaacttgcagacctggcttcgtcagagtttgacaggcagattaaacttcttacatccatcaaagaaattggtatcactttggctacggccttgattgtcgctaccggaggattctcctatttcgataacgcaaagcaaatttcccgttttatcggaatatgcccgacataccagcaatccggaacatccgtgcacatcaaaggtgggataaaccgtaacggggatgtgagcctgcgttcactgctatatgccgcctcgtggtcggcattacgtggtaacacaacctgtaaagagtgctacacacgattgaaagccaacggaaaccttccaaggtggctcttattactgttgcaaacaagctcgtcaggcaagcatttgccgtaatcaaatcagactctccttatgtggatggatttgtatctacccggcaaacaaaatagcttatggtggagttttttctctcattttacttgcagattaatatagttcgttacttattcgtctccggtgttcgtgttatcactgcatggaaaacgaactgtgacctaaaaagtataaacttctatcaaacagatgtttttctgatactttatgcattagagattaatttaataatcagtattttatagaaataatccgatctaataatccaggtattcgtactccggtcagggtggcctgccctttcattcaataaaactttccttctttgccctgtagtgctgacggaagatggagggttttgtggcggaagaccattggagcaggaacgagtgtccggttaggttttccgaacgcccgaccggtggtgtctgacgaacatagtgaggagttccgccggtcagtgaaggaaagccttaccggaccgttccaggcgaaccggtctgacg

SEQ ID NO: 6219 - DNA, 24893 bp, Unknown
  gut microbiota DNA sequence
gtttataacgtgttaatatgtatataactgcctaaatatttagggacatttactgaatatcctcagttaacggaaaaatgagaagggttggggatggggaatggcggttgacgaaccgggaggcgctggatatgcccctttgggggtgggagaaatatatctcggatacgggtggatatttctcctgggcggactcggtgagtcagatgaacttttcccggttttgtgtcttgtaaagtcctaccaataagaatatgaaggaagagagtaagataatcaatcggttgtcgaacagggtgttataaaaaatttgcggatttttatccaaggggacgtcaaaggggttcaaaaatacattccatttgctgacgtccagaattttactcgatgcgaacagcaataaaccgataatgataatcattactgccgtaccgttgccattccggatgagtgtactgagcataaaacacagtaaaccgatgaaaagcgcaggtaccatactttgcaaagcgagttgcaggggaggtacctctacaaccagccagtcggtgacggcagctaaaagcaaagtgatgataaaacaaatcatataggcgatcaaaagccggaatagccagattttataccgatagttcggaataccgaaaatgatttctatgattttggcatcctggtcgttctgtataccgaaacaggtcggatagaagatcgataggatagaaggcactaataacatactgtatccggtagccgtcgtaatctccgaatccgaaataagatttaaccccaccgtcaggatataaaaaccgacggcactgagaataaaatacataaacttattgccgaagataatctttatattataccgggcgagttttgctataggagtgatgtaatatttcatggctttacaagtctattgagtgatgatattttcatgattagctaattttacattcctcaacaaccacagatacgagtcttccagtagaggagaagtatgtacggcattgggaaccggttgggtctccgacagacacctgactttgatattctctccgttccggatatgatgtaccaataacaggtcggaaggcaattttacaaattcccgggccggaatttcgaaagtccatgtcacatctttagcaatttccaccatttcggaaggagttccgtgatatttcaacgaccctttgttgataacacccacctggttacaggaactggcgatatcctcgataatgtgggtagagaaaataacgatccggttgcgcgacaattctaccaaaagatttctgaaacggattctttcccgggggtccaatccggcagtcggttcatcgacaaccagaatgcggggcaggttcagcaaagtctgtgcaattccgatccgttgtttcatacctcctgagaaacctccgatctttttatctttgttttcatacatatgaaccgcttcgagcacttctgtgatccgtttgctccgggttttgggattataaattcctttcaggagagcctgatattccaaaaactcccaggaggtcaggttttcgtaagtaccgaattcctgaggcagataaccgatcaatccctgcaattcttcccgttttttctgggtatcgatgccattgatgaatatttttccatagctctgctcgaatatgccgcagatgatacgcataagggtggttttacctgcaccgttaggtcctaacaaaccgaacataccggtatggatctccattgagacggcgttcaaggctttgaacggttttttcttatatccgatcatcggaatttttgtggcgatcttatatactccttttttcaattccctgaaccgaccgtcgatcatatcgatgttgatattgtatttatggatccggtccgataaatagcgggcaactatagcgacataccaaaggagaccgagtaaaatagccatgccggaatccgagaattttatagaagcccatatgagcgtaaacaagggcgaaaagtaataaatgaagattccgcatacccgtatacaccagctcaagcttttgattttatgagctttaaaatattcacctccgatggcaatcaattttgtcagcaacatccaggtgcagacggcaaaaatgatggcccagaaggtcaatgtttgatagaaataggtgaaataaatcaggaagccggtgataggtaacatccataccaaaggttttaaatccgaccattgccggtattcttcctttaatcccagccgttcccgtacacgttggccggattgccattcccgttgaaattcattgggacggccgtagatcttcaccagattacggattgaaatatggatttcctgatccggagggataatccggctgttggcctgacgcagactagtctccataaaccaggtggctgccggtatcagtataatggctccgacaaagtaacccaattgccatatcagcgagtcggttatcatcactataccgatgactgccaggatcaaaagggtgagttgaataatcttcagggttaaactctgggtacgcagccgatgaagtgcttcttccaaaccggaatatagggtggggataatcaccagggtcaataatgtactcatggtcaatcctccgatcaccgtgatggcgaaaggagctccgagtcctgatacaaattctccttgtcccatggctaacgggaacatggccacgatggtggtgatggctgtgatcaggataggacgtaccctcgagattccggcgatgatgagggctcgcggtttacggttaccctgtcgccgcaattgcgaagtgtagtcgatcaggatgatactgttgttgacgacgataccgatcaggataatgacaccgatcaatacattggcattcatcaacgaattgctggtaaacaataaggccagtaaggaaccgatggcagccaggggaatagcgaacatcaatacgatcggggctgtaagtgattcgaaaacagacgccaggatcatgtaaatgatcacaaaagcagccagaatcagaaaagtgaattcgctggtttcgtcctcttcatgtaccacctcgacagcgatgccggtaggaatatcggtattctgcaccagttcgtctatctctgtccttgcggcttccagaatattcttcgattcgtttacatcggaattgaaccggtagttcaccgtgatttctttatcctggttgacccggtttatgtttccttgtccccgggtaaggttgatattactgaagctacgtaattcggtaagggaattattcgtgttggtgacttgcatattgcgcaagtcttccagcgtacgtaccggatcctggttttcttcttcttttttctcggctagccgtttgtctttgatgatgatatcgtactcctgatctcccgctttgtatttgatcgaagtcgtattttggggggcgaaattattgagctcggtgacgacattattcggagttacatcattgattcccatcagatattggtcgaacatgatcctggcttcgggttttccccgggatgagctgaccgatgaatagctgatattgtccaattcttccaattggaatttgagcaactcggccaggttagccattttttcgaaatcctggcccttgatgacaattttttccgtttgggtacccatacccatttttttcatcagttggtcggcacctcccatgagtgaactgccaccaccccggaagttctcgctgctctcgatagcttcgaggctgatatcgctgactcttaacccatcggagagggatagaatcgtactcttgagttcgttcagtgtttttttgttgatcttttcgaagtcctcttttagtttgatggtgacactggcatccgtggaatagatctttgtactgtattgttcgatttcctggatatcgttcaagcgttcttcataagcttttatcgtttcgtctgtccggttgagggtattcccattagggaaagtcatatagacattgaacgtatcggcttcgatttcttttaacgtattcatggtcagtgtcaaagataaagctaccgtgacgatcaataccaatatcgcagtaaatacgactgctgccggtttgcgcaggcacattttcagtaaagcgatataaatctgtaccggccggctatgaatcgataatgtactgaaatttacccggtcgccctggcctttcatgaattgattgacggccatagggatcagtagcaaagccacggccaacgacaggataagagtcgtgatgatcgacacgccgatatgttcaccgatcagcttcaggataaaatcgtctgaaaacaggaaaggaagaaatacagtgatcgtagtcagagtggcggcgataaccgctttggccacctcctgagtgccccttaccgctgcttcctgactattgactccgatcgcacgcaaccggaagatattctccatgacgacgaccgaattatccaacaacatgcccacagcgagggctatacccgttaaagtcagtgtattgatactgataccgaaaaagtaaaagaaataaaaagcagagaataccgaaatggggattgccacggcaatgaaagtgacgatcttgaagtttcgcaaaaacaggtagagaatgaaaatagccagaatcgctccggtcaaacccagattgatgatggtgttgatgttttcactcatcgtttcggctgtgtccgtatcgactttgatagaaactcctttggtagccagttcttcattcaactgggcgatttcttcccgtacccgctgtgaaagatcgatgatattgaccagcggagatttggaaataacacaggtgataacttctttcccattcacccgcgaataggattcttcttctttaatgccgaaattgatgtcggcgatgtctttcaacaataccggaccttcggatacaacgatgtttcccaggtcttctgtcgcgagatattctgccgtaacgttgacaaaaaaacgtttgttatcctgaaataccgaaccggcgaaggtcttttcagacatattcttgccgatcagtgagctgacttgtgatgcggtgatattgagcgctttgcatttttcatcgtcgagaaggatttcgatgctcttctgacgtccgcccatgaccgtgaccgaggctattccatccgtactttcaaggatgggagcaatgtcgatatcggtgatattccggacataatcgacatcgtcgtctcccagaatctgtagagtcataaactgatcactggccattccgctaccggctttattgacctggatggtgaagtcttccggaatacttttggtgatcgctttgattttttcttccagcttcaggtaagcatatttgacatttgtatttttggtaaaggaaacagtgatacgggcgttcctattggaaatcaatgtcgttatatcctcgacgccttccaagccgctgattacgccttctaccggaatagctgcctgactctcgatgtacttcggatccagctcggtcttggtggaaatagttacattcagggaggggaactccgcatccggatataattccatcagtaagtacctgtacgaaaacaaccccatcatggtcaaaccgatgaagatcatcgaaatcagtactttacgatttattagtttgttcattttttcttatttagaatcaaaaatgtcaaaagctcgaaaatgcctttcaaatcttctctacgtttttgacttttttgtcaaaaatgtagtaaacacacgggatcactactaatgtcatcagggtagaagtgaacagaccgccgatcaccgccaaagccataggggatcgcagtgaagcaccctctccgaatccgaaacacatcggcaataaagccaggatagtagtcagactggtcatgatgatcgggcggatacgctgttgggcagctccttttatggcctctgtcagagcgaatccttctgccttgagcctgttggctgcatctaccagtaagatggagttgttgacggctatacctgccagcatgatgataccgataaaagccatcatattcaaagaggctccggctagcaaaaatgcgtaaatacagcctactccggccaacgggatcgtcagcaagatggtaaacggatgacgcaaggattcgaattgagaagccatcaccatatataccaatacgatagatagtatcagagcaaaggacaaaccttgaaacgattcggcccgtttctcttcttctccggtaatttgtgctgaatatttagcagggaattggatatctttcaactgtgctttgatttccggagtgacactgcctaatgtatagcccttttcgagcattgcggtgactttaccgatccggttttggttgctacggttgatttctttcggagctgtcgtaatcgaaacctctgcaatctcacccagacgatatttcttttctccttgtacgatttcaacattttgcaattcatcgagcgatacttccggtactttgatttcgatatcgatcggttcaccttcggattcgaaattgctggccgtcttcccgttcagcttttcttttatctgactggccaccgaagcgatatctaccccgtaaatcccgcttttcaaccggtcgatagagatgttgacttccggagctccttgttccatagaagttttgatatcgtagagtccggggatagaggctattttctccttcacctccgtgctgagttcgtcgatcatttccagttcctcccctttaatctcgataattacaggagctccttccgttccgaggatgctttgtaaggcagattgttccttttcgaacgatatttccacgccctcgggaatcgtgtaattatgactcagattactgataatataatctgcatcggctttggctttgtttttcaatttgacttttacctctgcctgattttcgccttcgagtttcccgctagtcgtttggctttcggttgttgtcgaaggtccaacctgagtaaaaatccattccagatcgtctcctgccaactctataatcatattttcgatggtagcggccgcattatccgtgctttgcagacgggttcccggctccagagtgatgtaagtcgaaaattcccgggaatctgctttaggcataaattctttatcgatcaacgggagcagcaggtaacttccgatcatgaccactaacgcggtcaggacgacagcgtaccggtgtttcaaaagtttaccgacaaactgaccgtatcctttgatttttaaagaagcctgatttttggcaggtgctttcacatattgtgaagctaacatcgggattaacaataccgcaacaaaaagagaagacaatagagagaacgaaacggtccaggcctgttctttaaaaagttctccggcagctccctggatgtaaacgataggtaagaataccactatggtcgtgagggttgaagacgtgatagcccctgaaacttccgaagctcctttgatagccgcttccttgggagaaaggccgttttccagattccggaaaatattctccatgacaacaatggcattatcgatcaacatgccggctcccagggctaatccccccagtgtcatgatattgatcgtcaatccgttgaagtacatcaaattgaacgtagcgatgatggacaccggaatagaaacactgacgatcaaggttgtattgatgcggcgcaggaaaacgtacaataccagcatggccaataaaatacccataacggcagaatccttgacctctccgatcgaagctccgataaaatctccctggttactgatgacgtgaaattcataaccgggcatacttttctgcaattcttccagtttggcagtgatattttcaactgccttcaccgtattgtatttattctctttgtagacactgatactcagactacgttcggcatcgtagcgcaccagattttcaggatctttattttttagttcgattttggcaacatctttcaggtataccggagctttcacggtagagctgttccccgactcggtgtcggtactaccgggggttttgaaagcaacgataatattcccgatatcttccaggtcttttaataaattcaccccttttaccgtatattggatgtcgtcgtttacaatggtacctcccgaaacattccggttcatactttctattttcgacgcgatcgtttcggcagtcaggttgaaagcttccagcatataagagtcggttttgacctccacaaaagcattttcctggccgttgagtcggatatcggccacaccttccagtctgaccagttcgctccgcatatagttttctgctattttccggagttcgttcatatccttgatttctttatggctcatggaaatgatcatgaccggcgtggcattggcatcgtagcgggaaacattcagggaagtgatttcttcgtcctgagcgatttgagacatgctgcgttgcaaatccaaaaaggcggcatccatatcctgatcccagtcgtattccaccgtaatcgtggctcctcctaccttactgctgctactgacgtctttcacaccttcctggcgtgctgccatagcttctattttttctacaaactgtttttcgatctcttcaggtggacgctcaccggcttgcaaatcgatatataaagccggattttttaaatcgggaaataaatctgttcccaatttattgtatgatatgattcctagcagacatacccccagtgtgatcattaatacactgaccgggtattttactgcaaattttgtaattcccataatttaatcgtttaccaatttggacgtttaccgacaaagaatttttcagactgtcgtgaatacagttacttcatcacttttactttgctccggttacgtaaccattcgtaacctttcacgacgatcttgtccccggcttcgagtcctttttctacttcgatgtatttatcgtcactgataccggtatggatgactttttcttcggcactgtttctgtcgaccgtatatactaatttacctccccggcggtttttaatgatatctttgggaatagagatgacagagtctttccgtactgtgacgatatctgctttggcgaacatacccggacgaagttttaaatccgggttatcgatttcgatataccccgagaaggtacgggtttcttcgttgatggccggagataactgagtcagtatgcctcttaaagtatccgatttgatattgtaattggtgatatgtacttgctgtccgattctcagtttggtcaatgtgttttcagggaattgggtttctacatacattttactataatccatcaggccgaccatcacactaccggaagcgacttctacccccggagtataataaggaagattgacgataactcctttgaacggagctttgatactcagtttttctaaagtgatataaccgttttccaaagctaatttcgcattgatataagagttttcagcgttgtttacgtctttttcggttgctccgcctttctcgagcaggattttctgaccttcccattccttctcggtgatctggatttgtaatttcttactttccaactgcacgttgttttcatattccttattttccagacggatgatgacagctccggcttcgacgatgtcacccagctgataaggacgaccggttttcggatttttctgtaagtagtaagctccgttggtttccgattttatttctatcgttttagctgcctttgctgttccggttgttgtaatatattcctcaatgtttctgagttgtacgtcctcgacccatactggggtagtggcttcagaagagttatttccctgattgttattacaggaaaacgacatgaatcctaacataacagctcccaggattttaaaattcttattcatgattatcgtgattttacttgttaacggacttatagggttatttttatttcaatagatctacaggtaaataacttttatgggtttcaaaatcccaaagggtttggattttcaggttcaagagctcgattttgtagctgataatagcgctcgtataatcttgtttggcagtagtcaactggttttggaactgttgtaagtccataccggtcagattaccgttgcgatatttttccagattgatttcataggtacgttccgcattttcaatgcttttctttttgatttcgatttgacggatcagcgtcggcaggttacggcaaatctggcggacatcgatgacaatctcttttttctgttcttcgaggctgatttcgtccgattccatagccagttggctggattttacttttgcctttttagccccccaatcgaagatcggaatggtgagggttacgccaatctcttcgttgtcggtgggcttgtcgtacatattttttacttttccagccagggcatccatacctacccggacacttaaatcacctttgaattcgctttctgcttttgtccggataatcgaaaatacatcctgttccagggtaatctgtttttggcggatttccatgcgttgatccagggcgtatttaactgcatcgttaatattgacatcgactgtcggaatattattgtcgaacagtatcgcgatatcttcatccagcgacattcccagtaaaagcttgaaattgtctttcgcattttcaaaactgatctctttcgaatatacagtggattcactgttcgccagattgacttccgcctgataaagttcttctttggctaacagcccggcttcgaccttatttttgatgatatcgtagttttgtttctggttgttgtattcatcccgggagatgttcagatccttttgtttttgatatacatcgtaaaattggctggtgacgtttttttcgatacttaattgttggagggcataactgattttggcattttcgagtgcatattccagttctttgagctgcatctttgtcctgttataagtgaacaaaggctgcgaaatacgtaaagacagattatggttgaaggaggtattgttgccaccggaagtcctgttggaagcgtcctgccaggaaaagtcattatatagagagatggttccgtctgtccattttatgggttgcgtgataccgaatgaagccgatgacattttggtctcgttggcataccatttactgttgaaattatcgtattggttgttacgggtatacctgaaaggagtgacatccaatgaaaattgtgatttcagggaagcatcctgagcttttagattcaattgacgttgctcgaggctgagtttgctttgaatcagtgaaggactgtgttcgaaagccgtgttcaatgctttttcgagtgtaagtacttcctgtgcatgcgcactatataacccgctgagggttaaaagaccgaggaccaaagtttgtttaagcatattgtctgcgtttatcgggttattcgtttattattcttctgtggctgtaaatttaacggcgtctgcaatgacgtaatctccggaaactttatctgtcaaagtgatgatgacttctccttgaggtagatagaaattcccgatcgaaacccatccttcggtttcttcatccaggtccagtgtcaccgattctttctctttatcgtattggatggtataagtctgattacgttcctctttgtgacgaccgcggcgtctgtccataaaaaacattctgcccgacatttttgcattccagatggacacctcgtagtaaccgtctttagggatttccgttttccattctacggcattggccccactgcctttatttttataaaccgcagagtttatcgtttcaccgtagcaatagtcggcggctatggccgtccattgggaaggcatccaccagggcataaaattcttatacttttcgtcatcttttttcttgaaaagatccttcagtttatgccggttattcgaggcgatcgtcctgaatcccggatcctcattgtcgataatgatttcattcggattcggcttgaagacatccgggtttatcggataaattcccgaagtagtatcgctgatcgtattgtcgattttagaaaaattgaaattatgcgatgtcggtagattgtgtgaaatattggtatttatcgaaatattggccggacgctcgtcactgataatcttgatttcccgggcttctccggccggaataatgtaatttttcttctccgtttcaaaactcataccgcctccccgccgcataccgcctcctccgccttgcatgacttccgtactgatgatagcatctatgtcggagggattgttgaccttgaatttaatttggtatttggtaaactcatccaacacaatttgattggcatccacatccttgatatagatggtcggggtatgggaggccgtataccaggtgtcgataaaatcggacaaccgaatcccgaacctcttctctatttcgtatcggagtgtatcgaacggtatattctggaactgacggctagtaaaaaatgcctttaggaattgattgaaatcttcctgtgtgatccgggaagtgatatagttattcaatgctgcacttttcaatttcagcaattcatagaaaatttccggcttcagttcggtatctccgatcgctgtctcgaaactatgtgattccagatagaggttggctcgctgtttgtcgttgatgatacctccccagaaacggaagccctgatcggaagaagtattcatcatgttgttgactgcgatgtcgattaccggatattcgggagagctgatgtagttcgtatgtccgaacaacatcggagtgatattggatttattgatcagtttattgtccggattccagccattttggctgttttcggaggttaaagagctcacgaaacgattgaagagggaaatattttgttccatctcgtccatagggcccccatgccgtccccattcattcatccgtcttctttctgcctcaaaatcctggcctagagaaattcctcgttccgggacgaagaggatttcaggcatgacatattcggtataacctttccagttacgggcataagtggcaaattgtaccggggtttcggctaagacaaattttccgaaaggataatcccggtctttctctatttccaggctgttttttacttcccgaatgactccgggcaaggtatcggataagggttcgaagtattttgaaaaataatcgtggcctttaaagtaatagatctcgtaatccgtggaatctacccgtaaagcctttttatcatagtcggcgatggttagactgattccgggcaaggcggtggcgttcgtaaaggtgatgaccgaaccgtcgatcttacttttgccttgtgacaaaacggtcttgtcgccttcataatgaacggtaagtgtatagtctgtgaaattcttcctgacattgtacggagctcccgggttaacgggggcgatggttaccggataccagatacattcgggagtcaatagggtaaaggtattactcagccatgcataacgtttaccgaaacgccagaatacctgcgggactttagtatccaggtaatcttctgtcaggacatcggtataacaaatattttcactgattttcccttcatagttgatcgtcaacgtaagctcttcttgctgctggatgggttgatctacttcgataacctggtgatctcttcggaagagcaggtttttcccggccatttctacagaggtaaccgttagctccggattaaggtaaaaaataattttatccagaggctttgcattgttattggctacttttaccgtactctttcctgctagtctgtatccttgaggagtaaccgaaatatcgttgaccagcaagtcgacatgcgggacatctgcatatttatcgaatgtcatgatgtactgatgacggagatcgagctgatgattataatgcaggatgtataacaatcctccgagacaggctgccaatagaaatagtgagctaaaagtatatacgacagctattttccacggtttgtgaggcagacgtttcaccagagcgatggtcatgctgatcaggccgattcctgccagtagataagaaaaccgctggagtaaaaaaagccggagatcggcatgtcccgtgacatctgaaaatatggccgggatatttactccgaagaaatcgaataccccatataacgtatcggtcaggtaaaagaaaacagtgccgataattcccagcattacgatgaaagtgaccgcctgatttttaaggatgcacatggccgtaaaggataaacccaggacaaacaacagggaaggtaccgaaatcgtcaataaatagaatagatatggaaacagatcgaacggagatttattgatcagtatgtttaaaaaagccgtaaataataaggtgataatgttcagtgtaatgaaaacctttacaataccccaggtcttaccgacaatatagtcggcattactcatcggccggacatagatgacttcggcggtatcgagttttttgtctcttttcaggaagctgccggccagaaatacgacgatgaccgattgagcgatattataaaaataagtgttacagaatggcatcagtgaagaaacggcgattctcggccaaagattatccatccggttgacgataccggtttgataacccaacataatggcagagatgaatagcagcgcgagtatggcaaaaatacgaaacaaccagcttcgtttcaccagttttacttcgtatcgggcaataacatttatatggtttaaattcatatcaaaacattaatacattattaattaaataggtctccaccgattttttcgctatacatttccattttatcctttagcagatagtccataaaatagacgtaagcatgttcgatattggggataatggctttgccgtcgaaaccttccaatttttcggttacgatttggatctcccagcctccttccgaaggaatagtagaaatgatcggatatttttccttgatttgctgcaattcagggtcggtaacgaagatttcccatactttcccccggactaattcaatcatatcgtccggagaaccttcgaatttcaattctcccttgttcagtaaggccagttttttgcaggtgctggatatatcccccacaatgtgagtggataagataatgatgacatctttatcactgacttccgaaaggatatttctgaaccggattcgttcttccgggtccagacctgtcgtcggttcatcgacgatgatgactttcggattaccgatgatcgcctgtgcaatcccaagacgtcttttcataccacccgacaaccggttagcccaacggtccctgacttcatacaaaccgacctttctcagcatctcatcgacgatttccgaccttttccgggtgccttttattcccgccagtcctgccccgtagtctagaaattcccaggtttttagtttttcgaaaaaacggaaatcctgaggtagatagcctaaaacagaacgaatagccttacgatcgcgcaaaatatcgtaatcatcgaaaaaaatagtacctgaagagggattttgcaaaagagtcataatccgcatcaacgtcgttttacctgctccgttaggccccagtaaaccgaacatgccgggttctatattcaggttcaagccgtttaacgccttatgaccatccgggtaaaccttggtcaaatcttggattttgatattcatattcctgtttttaaagttctacttgcaaatcttgactataaatataataaaagatgttaactttgtactgcaatattctcattttataaaatatttaaaatattctttccaatcagacggggaaataacattttttttaacaacactctgaactttaagacaatttctcaacttcaaagtttatttcttttttttatttgaccaaatattatagacgaagggtatttttctatcgactgttggggaaatatcgggaatgttcaggcaaaaacttcccggataacctgtatacttttaatattgaaattgatattcagatggatgctgtaaaaaagcaggataacatccaatagaatattgcgcgattgccggttgagaggaatggcttttatttcggccagaggacaagtacatagctggtaaatgattttagcggtattcggtcccgaaatatacggagtggccggatcggaaggataaaagctcccgtcgttgatattgaaaacgtaattctcctgccatgaagaagtgttgatccgaaaaccgataaaaccggccagacgatagagaaaataaaggttaaagtttccgatgtcgttatgggtcgagttcaggtattcgatggaatgggtcaggtaatcgaacaactcttcatttttcccttcattttttaaaatcaggttcagaatttctccccacaacaaaaggatattcatcttgaaaatatcgaaatataactcgggcaggttgatgatcggagagatttgacggagtttgtgcaaatcgctcttttcattctcgaaaaattcgatctcgctgatttgcaggagatggacagttttggtttttcttttgaatacgacagaaggggatatcatggacagataccccttttctttcgtatagattcggataattttctgagtttccgagtaagggctggtttttaatatgattccctgaacaatttccatttttgagttttcacttgttgtgttgctctttcaaaaatgcgattaattgctgaatagctcttccccgatggctgattttatttttttcgtccataggcatttcagcaaaactgaggtcgaacccttcgggttgaaaaatcgggtcatatccgaaaccggcttctccttgttgggcggttaatattttgccgtctacccttccttcgaacaggtgctcttcttttccttgaattaaagcgataaccgtacggaaacaagctttccgatcggatatcccctccatttcgcgaagtactttcttcatgttttcgacagaatcttttgcaggaccggcatagcgggcagaatatacaccgggacgcttatccagtgcttcgatttcaagccccgtatcatccgcaaaacagtcgtacccgtaatgttctttgatgtatcgggctttttgcaaggcattttcttccagagtgtcgtgatcttccgggatatcctcctggcaaccgatttccgcaagcgagccgatttcggcttcgccttctaataaatggctgatctcttccagcttatgcttgttgttcgttgcaaatactaatttcatagagcgataacaattgattcgtttgtcgacgcaaaaataggtttatttttatagctttgcaggtataaaatgataattttggacgaaaaagatgaaaagaggaattgtcgtaaaatcgaccggtagttggtattgggtaagattggaggaagggaatatggtgcagtgccgtattcgggggaaattccggatggaaggaatccgaacgaccaatccgttagctgtcggagatgaggtggaattggaagaaggaagtgaaggctatgttattacggcaataggaaagagacgtaattatattatccgtagatcgacgaatttgtccaaagagtcgcatattattgcagcaaatgtcgatttggctttgttggtggtgactgttaatcatccggtgacttctaccgtatttatcgatcgttttttggtaactgcagaagcttataatattcctgccgtactggtttttaataaaacggatctgtatgatgccgaagatcaggcaatgttagggggattgacggtgatttaccgtaaaatcgggtatccttgttatgccgtatcggcggaaaccggtgaacacgtcgatgaaatccggagtttactgaaagacaagatcaccgtgctttccggcttgtcgggagtggggaaatcttctttagtcaattgcattgagcctggcttggacctgaaaactgcaggaatttcggatgcccacgattcggggaagcataccaccacttttgctgaaatgtttccattgaaacagggcggtttcattatcgatactccgggattacgaagttttggaattatcgatttgaaaaaagaggagttgtcgcattttttcccggaaatattcgcgaagtccggagaatgccgcttttataattgcacccatacccatgaacccggttgtgctgtgttggaagctgtggagcaagacgaaatcagtgagagccgttatgtgagctatctgagtatgatggaagaaagcgggaaatatagataatgtattttcgaacagctcaatgttaatttagttaactctgtcttttttttagcctttcgttttttgtttttagtttttgtattatctttgcgccgttttacgtcaaggcttgtggatagattgagagaatataagatagcattcagaggattaggagagggaaaacactcttttgagttcatcatggatgagggattcttcgattgttttgaagcaacgaaaggaacccggggagaagtcaaagctaccgtcctgatcgtgaagagttcacttttaatggaagtacgtataacgatcgaaggaatggtaaaagcaacctgcgacagatgtttaggagaagtaaatcttccggtgtccggtgttatgaatttgtatgtaaaacaaaacggacgggaagaagggaacgaagatgattatataatattgtcgccggaggatgactatttggatgtaagttcgtatctttatgaaacttatatgttgaattacccgatgcgggtagtgcatcccgaaggagaatgcgacgaagatatgcaggaagtgttgcatgaatatgtgatagaagaagatgataaaccaatagatccgagatggaatgaattgaaaaaattaattaataactaaataaataataaagaaatggcacatccgaaacatcgaacctcaaaacagagaagaaataagagaagaacgcatgatgcgattacggtaaccgctattgctaagtgttctaactgtggtgctgctgtacagtatcatacagtatgtcctgaatgtggatattacagaggaaagttggctattgagaaagcagtagtagcataatcttgacacgaaaaggattgttttagaatcatacacagccagcctcctaagccctagggggctatggttgtttatataattcatgaaacttacccttgcgtgtgcgggggtaatctctgatttaaatttatagttatgcaaacgaataggctgagagccataataaccggagtaggggcatattatcccgactatatcctcgacaatgaggaattgagccagatggtggatacctctgatgaatggatcatgacccgggtagggatcaaagaaagacgaattttaaaagatccgacgaaaggaagtgcctggctgggtgcacaagccgtaaaagatctgttcgagaaaaccggaaccaaaccggaagaagtagatttgttgatttgtgctacagtgacaccggatatgcatttccctgctaatgcgcagattattgccgatatggttggagtgaagaatgctttcggatttgatttgaatgcaggttgttccggattcctttttggcttggttactgctactcagtatgtagaaagtggtagatataaaaaagtggtatttgtcggatgtgagaaaatgtccgtgatcaccgattatacggatcgtaagacttgtccgttgtttggtgatgctgctgcagctgtattgctcgaaccgacagcagaagagcttggtgtgatggatcacatcctgcgctcggatggtatgggacgcgaccatttgtatatgaaagccggtggatcgctgaatcctccttccatagaaacggttactaaccgtgaacattttatttttcaggatggccagttcgtatttaaacatgccgtaacgaaaatggccgataccgcagcagaaattatggaaaaaaatcacctgaccgccgacgatatcgcatggttggtgccccatcaggcaaatctgcgtattatctctgctaccggcgatcgtatgggactcgatccttctaaagttatggtgaatatccagaaatacggaaataccacttctgcaacgattccattgtgcctgtacgaatgggaaaatcagttacacaagggagataatctgattctcgcagcgttcggtgcgggatttacctggggagctatctggctgaaatgggcttacgatcccaagaagtaaagttggaaaaaggatatggaaaaccggtttgaattttcaagccggtttttttatagccaaagaagtttataaagtccataattaaaaccttttaatgccggcagttgatcggacgaagtgtagacttaactcctgtaccccttgtaactacagaaaaaacgaatttttgggggagctaaaaaaagccgtgtaagtcgcttttatatttcaattacttgttatatcttcgatgtgaatttatagtttatgaatcaggaacgttttgatattgaatatgaggggaaccggatactggaaaataccagaattgacggtaatttgaagaccgataagagtgtatacctggatggtatgattcaaggaaatgtacatgccggaaaactggtgatcataaacaaaggggggaaggtcgacggagatgtggattgcgatgaattatatatcaacggcactattacaggtaatgtatgtgtggcctgtaaaactgttatgggaggagatgctgtgatcgaaggtggcttgattacagatacactcgaaataacgtttggtgcaaccatcaggaaaggattgaaattaaaaaagcgtcgaaataaattaaggtgattattatgggtaaagagaatcctggaaatgctgtcaatttgttgtgcgaaggtacggttattgtaggtgatataaaaacaaagaacgatatccggatcgacggaatcataaaaggtaagatcattacttcagggagattagtggttggtaatacggccaagattgaaggcaacatcgattgctgcaatgtagacgtattgggggttgtacttggtgatatacaagcttccgggacggtttcactgaaatcgtccgccaaagtgattggaaatattgtttcatctgtactctcgatcgaaccgggagtgatattcaatggcaattgccaaatgacaaaaaaagaggggcgtgaaccggctaaagaataattgaatgaatgttttaattttgattccggcgcgttatgcatcgactcgttttccgggtaaacctttggctgagatcggtggtaaaccgatgatccagcatgtggtagaaaaagcacagttggtttcacaagacgcttttgtcgcaacggacgatcagcggatatacgaccgggttgtagggttcggaggaaaagtagtgatgacttctgccgaccacaagagcggaaccgaccgttgttgcgaagcctaccggcatattgtggctgattaccgaaaaacttatgatgttgttgtcaacatacagggagacgaaccctttattcaacccgatcaggtacgtgctttgatcgcttgttttgaagatccccggattcagatcgctaccttggcaaaacaattcgacacgaatgcggatattttcgatcccaataaggttaaggtggtatgttcgtctctgcagaccgctctttatttttcccgttctgccattccttattgccggggaaaagagcaaggagaatggagtgctgtgattcctttttacaaacatgtgggcatgtatgcttaccggcctgaagtattacgagagattacagctttgcctcagggaaaactggaaaaggcagaatctctggaacaattgcgttggcttgagaacggttataagattgcggtaaggttcaccgatcacgaatcggtaggaatcgatacgcccgaggatttggagagagcgagaaagatcagtgaaacctctgatctctggtctgcgaaatactgattaaaaaactacgtttcggatcgaatattcagtcagaaccgagggttcgttaatcagcatcgaagatgcactgatcggaaaaaccgaaggtctgacaccaatccggaacgtagttccgctaatctattttctgtctttgacagaaaatcttagatggtcataatatccttttcctttgcggtcaggatttcatctatctttttgttatagctgtctgtgatcttttgaacttcatcttcggcatctttagcttcatcttcgggcagaccactcttcaccatttttttgaattcgtcgatagcatcgcgacgggcattccggatacttaccttggcggtttcaccgacccctttcgattgtttcaccagttcttttcttctctcggcagtcaagggcggtacattgatccggacaacttctccgttattatccgggttaaatcccagattggcattcataatggctttttggatagggccaagcatatttttttcccaaggctgaactgcaattgtacgtggatccggagccgtgatattggctacttgtgacaatggagtcggtgatccgtaataatctaccagaacatcgttcagaattttggggtttgctttgccggctctgattttcgccaattcattttcgaggtggaccaatgcattttgcatttgttctttggcctcgtccatgtacatttttacttcctcgttcatatgcttactctattaatttttacaattataaagcaaagataggaaaaaaaataatacgctttctatcttactccaatgaaaagcttatgggtaaagtgtaagcgactctgaccgctttacctctttgttttcccgggatccattggggcatattatttacaattcgtaaagcttctgcatccagcagagtagatgcacttctggcgatcttagcatttgtaatgcttccgtctttttcaataacgaactgaacaaagactttacctgtaatatttgcttctattgcttctttcggatatttgatatttttcatgatccattccgccacgtttccctctgcaaattcgggcatctcttcaactacctgaaatatgcaaacctccgtactgttttctgtttcagaagaatctttcactaatgtcggtgttttggcctcattatggggaggaattatggtaaccttcggagcgaagttgccggcttggtctttgagactgaaagtaacaggcagggtataaattactcgcaccgcttttcctctttgttttcccggaatccaatcgggcatggcctcgattccttttaaggcttcggcattcaatagtgactgggtacttcgttgtatttcagcatgtccgacccgacctgtcgagtcgataataaaattgacatacactttcccctcgattcctgcttcgatcgcttttgaagggtatttgatattttgtgtcgcccacttggagagatcgcctgaaaattgaggcatattctctacaatctgaaaaacttgaagctccggcgactccggttcttcgcacatgtttttacaagagaagagataaaatagcattccggctaataaaaatgccggaatataattgatcatctggaatttgcgggattgttttttggtcaacataatggttcttttttttagattcgaacacgaaaaatagttcgtaaaagaaaaggctcctttcagactttgctgaatgagtaattcaaggtatccgctgattttatatttacggataacctgttgatcggcgatatattcgtggttttcgagaataagctgttttattaaccacacaaaaggattgaaccaattggcgatgcagatgatctcggctatacacaaatccagactgtggcattgttgtatgtgaattttttcgtgtgcaaatattttccgtctgttttcctgactcaaagagtgggggttgataaacagataattaaagaaggagaaagtaggtaggccttcctgaatttggatcatatacaatccatgtaatcgtttgcgtggatttcgatgaacgaataagcatagccggcatagagtggttaaataacgaaggaaaaaaaacacaactccgatcccataaagtaggggaatcatagggatcggctgttctgtggctgtaataagcgtgctttgactgcttttccctatctggttttcctccaacaattcactgactgaggcgagagtgggaaaaccgatcatatcgttccggtttatttcaatggaaataaagggaagcaatgccgataggaccaatacgcctagcaaaaaaatccggttcagattaaagaaagtctgtcttttcaggaaaaattgataataggtcaataatacgatcagaattgttgaagatttgatcatgtaaaggaggaaagtttgcatggaggatagattttaaagagttagttttctgatcgtcgtgcttcgtctgcacgttttagaatttcttccaattccttcaaatcaatgttttcctctttggcaaaaaaagaaaccatttggctgaatgaatttccaaaatagttaccgatgaaattctttaaaaactttttggtataagtatctttggctaccaaaggataataacaatgacttttcccaaaagtttcgtgaccgacaaatcctttatcctgcaaaatccgaacgatagtagagactgtgttgtaagctggcctgggctccggaagtttatctataatatctttcacaaaaccttttcctaaatcccaaagcacttgcataatttgttcttctgctcttgttaattctttcatagttgtttttattgaatttctttttacagacaaatgtataactaattttttagttgtaaaatataattctaaaata

SEQ ID NO: 6220 - DNA, 382 bp, Unknown
  gut microbiota DNA sequence
tcaatgacttttctcactgacatattcagcttttgagcaagagttttgtacatggagaacttcataatacagccgaaagagcgtcccaaagccgatgcattgtttgctattgagtaatagttgtagaaccctcgtatttcggtattaaaccgagatacaatctcgtgcgcttcattgtcaatcatataagtcctgccttttgacacccatgtctccttgccgtgtttggtgacaactttcatggcttcgaggctgagcaacttgttcttgattacttctcttgaaacgtgtagtatcacattcccgttgaagtatctgcgcactgttccgttactgtttctctttgtggcatagtctttacggacatatatttcgtaaccca

SEQ ID NO: 6221 - DNA, 626 bp, Unknown
  gut microbiota DNA sequence
gcaatttgaccgcttcgtatctctcctgtttctctgtttatcgcaataatcgctttcggctgacgccccccggcggatgtacctacagtcaacaaagattgcatggttatggactcctccggcataatacgggcattctccctttctacaaaaatgcgttctgccaaatctgccaacgacttaacatctattttttctgttcttcgctccctgttagtttccggaataaattctaacgctcccattcctcgtctgcctataaacgagagcttatccaacggatttatctctgaattggatattttttgctgttgacgccataaatcaaacaattggttaccccaggcatcaggcaatgaatctgcgacaaatgccggaagcttctggtaaatcttggcatcttcaccccaaacaggcaacagccctctggtaccgtcaacaggtgcaaccaaaggggatatattcaatccttttctgataaaatcgggattatatgtgaaataagaaagatgtcggcgttcatcccaagccaaacgaccgatttcttcttcccaaagtattatttttaacgacttcatcatatctgtatgtcttatttagagtgtctgattcgttgcgcttttttc

SEQ ID NO: 6222 - DNA, 765 bp, Unknown
  gut microbiota DNA sequence
attttcacgcataagataaggcgattcgggcaattccggcaaaataccgtctaaagaattaatctgaccgacgaccttcaacaagagaataaatgttgacaatgaaaggttgcctgccgtgccattttcaaacttgtgtatggtagtaagcccgacacctgaaagttccgacacttctttttgtgtcagattgcaccgcattctatattccttaaaacgagtacccaacatgcgtaccagttcaggagtggagtattcaaacaaatctttcatacttatatatcattatactgataattaaatactttatattgctattatattcactatattgacatttacaacacaaaagtagtaatatgttttgaaatagccaacgaatgcgcataattattggcttgccaaaagaaaaagatactcaacttgactttaatgaccgttattatatacacgggcaataaagtcaagtcaaacagagggaaaaggaagatttacccgactgatttttcttttcgccagcaatcggtataagtcacttcgtattcaatcttggaaaaataatctgcggtataatcacaacataataacagatgaaacaccctacaacatctttcgtaaatatcattgaaagacttacaaatttgcacccaaaatcaccttttttatcaaagtcttctcatttgtttccttgtaccggaaaaacgcattatctttgcaaaagttcagcgcagaaaaaggggcaaaatcagacttttataccattta

SEQ ID NO: 6223 - DNA, 307 bp, Unknown
  gut microbiota DNA sequence
ggcggaactcctcgcaagctcgtcagacaccaccggtcgggcgttcagaaaaagcaagacgacactcgacagagctccaatggtcgccaatcccgatcacctccgacttacgttatcactgaattgcaaaccagtcttgatttaagaaagattattctcactggaaataatccggacggtccggcttcctgctgttgcaaatttctggttgtattttctttgccggttagctctgccgcgagatgaagggttttatgccggaagaccattggagcaggaacgagggtccggttaggttttccgaacg

SEQ ID NO: 6224 - DNA, 21046 bp, Unknown
  gut microbiota DNA sequence
agtgtttgacggaaacgtaacgtaaagttttttgcggagtgaggagttccgccggtcagtgaaggaaagccttaacggaccggtccaggcgaaccggtcggacagcacaaaacccggaatcggaatagaaagaaaaaatatacctgccataaaattaaagaaagggagaattgaaggttactcttcttttctccctttttcagattataggacgttttaattatacactcagcttttagaactgtaacagcattgctccgcaggagtagcccccgccgaaaacggtaaggccgaccaggtctccgggtttcactttatgcaggttttcggagagagagatggcacagctcgggctgccggtgttacctcgttgttcgatattcatcagaaaacgttcctccgggatatcggtttgcctggctatcgttttgataatgcgctggttggcctgatgcgaagaaatccaattcaaatcctggacagtcttaccataactttgggttaccttttctaaagcttcgaccatataatgacaggcattgataaatacatcgcgtccttcaggcattccgatgccaccgttctgtgggcggagatacaccgcttcggctgctttgccgatgtgtcccagaccttgggtatagatatcgataattcggggatcatgcccgctataattcccggcagagacaaagaacgctacagcaccgtctccccataggtggccgctttgcggatcgttttcgttggcataagctgtgttgtgttctgctccgatgatcagggctttggtcgctttccccagagcaaaatagccttgtgcaatttccatcgcattgataaaagaagaacaggctgaggaaacactcacacatttggcgtgctcgatgtgataacggcgttgcaccatatgggccggggtggcaacggtatcgtagggggaataggttgctgcgatgattaaatcgatttcctccatgggataaggcaaatcggtggtggcaagatccactgcttttatccccatcgtattggtgttttcatttgcagctgctttactgcggtttttgataccggtccgggaataaatccattcgtcgtccagaccgtttacttccttgaagtaagaattaggaaccacagagtccggtaaatagtgggaaattttgttgataaacaattccatagatttagcattatgtttctgttagctgtgattttgacatcaaaccttcgtgctaacaagaagtatgccatatcctcagcctttgtttaatattccattaaatagtaagtcgacatattcacgcagcgactgataattccttttccggtgcccgatgataataaagggttgctccagacttttgaacataatcagcagcgtttttgcgaatgaggaaggattattgatattgaagaggccttgctctttaccgttctgcaagatacgggttagcaattgccgttctttcatatcgatacccttacgcaactgttcaactcgcaaattgttgaaaataaaatcataacggatgtatttgttctgacggaccagattgtcgatcacattgaaccgcgctaaaatatataattttaatttgcggtcgggaggaagtgcagagtctgcggccttctgcaatttctcattaatgtctttgacatgatcctcgactacatagtgataaatctcttctttactcttaaaatgcatatataaagtccgccgactcatgtttgctgcctgagcaatatcattcatcgttgctttataaacgctcatttctgagaaaagagacttggcaacatgtatgattttattctttgtcttacttaattttgttctcataaatcttgcggttgtgactttaaattgcacaaaacacaaaattttgtgcaattatagctattttctatgacatttatgggcaaagatagtttttttaacggaagaaaatgaggttttgaggattgttaagtgttccaacgattgcataaccccggtattttatgttttatccctctccgattcgtgtaaaaggatgacaaatgtcatgttttattgttgaagcgggtggtatctttgcgcgcgaattgggagaggtggtggaggtggcgatcgttttttacagcgtgtaatttaattgtctgattatgaatgttacaaaagtttccttctacaaggaaaaaattttttcggcccggtggtttcaaacttggggaactcttttattgggatctatggtgatagcgaccggttacacttttttcatgactccctaccagatcgttccgggaggaatttatggtatttctaccattttgaactggaaactgggattcccgatcggtatggcggcattgtgttttaacctgccgttgagtttgatcggttttaaaatattaggccgtgatttcggtttgaggacttttatctgcttttggttggtagctttgtttgccgacggttttccgtgggctctggaacattggtgtggctatacggcagaatttgcacatgatcccctgcaattggtcaaaggaggtatcgacaatcccgatgcaacgaaggaaggggtattgttggccagtatcttcggaggtgtggttatcggagtcggagccggattgattttcaagacccgttcttcgagtgccggtacggatgttttggctgccgtattacataaattgacccgcaggcctttggggatgatgcagatgactgtcgacctgattatcgtggtattgggttttgtggctttcccggattggaaaactccgttttattccctgatcactatttttattatggggaaagtaatcgatattgtcatcggtgggtattccagcgataaaacttttttcatcatatccgaaaaaacagaagaattacgtcggtttatactttcggaattacaccggggcggctctatcgtaccggtcaacgggatgtggaaccgttcggagaaagaaatgattatgacggtcgtcaaccgtaaagaggtgactactttgcaacgggccatccagcatatcgatcctcatgcttttaccatgatcctgaatgctcaggagattatggggcaaggatttaaacggatggattgggacgataacaagtaaatacctgagttgcacggtcgaaaatgccctggagccaggcgatagtcatgccgtagttgctgaccggaatccgggcatcgatggccggttgcagacggtggcgcaattgggtggctgtgatcatacagcctccgcattgaatgatcagggcataatccgttatcggacgttcgatccggtctaagccggcgatatggtcgaattccagctgctttccggtatacttgcgaagaagggcggggattttgacccggccgatatcttcacaggaaacatgatgggaacaggattcgagcagaagaatccggtcgccgtctttcagttccgggatgcgggaggtcccggccagatatcggtcgaaattgcctttatggtgtgccagaataatgctgaaactggtgaaaggaatatcctggggaatccagggggctattttgccgaatacctgactatctgtgattaccaggtccggtcgtaacgaattccgctgaaaataagtcgtgatttcttcgggttggacgacaataccgataccatgccggtccaatatctctcttaacatttgtacctgaggcaagatcatccggcctgtcggagcttccgaatcgatgggggtgaccagcataaccacttggccgggacaaaccagatcccctaacagagaggaagaattttgccggtttaccaaagtgccgattttttgaatcagcatttctcttttagcctggcaagtggagaaaccgataaccggggtaccgtatttttgcaagagtttttcccgaagttgctcctgtaaaggttccaggtccgatttattgtgtacgatcaaaaaaggaagttttaacttttgaaattcttcggtcagtatttcttcgaaatgaccgaatcggttgccggtgatcaccagtaaggctgcatcggcttgccggatggtttcgaacgttttttttacccttaattccccgagttcaccttcgtcatccgttccggcagtgtcgattaaaacgaccgatgcaactcccgggatttcataacttttctttaccgggtctgttgtcgtgccggcaatgggggagacaacggctttgtcctgttgtaaaatcgtgttgacgatagaactttttccggtatttctccggccggtgatgacgagatgaaatttatccatgaatcggggttatttatacatgctgacttcttctgctgtgattgtcgggcttccgagaataatcaaacgttcgacgacgttgcggagttcacggatatttccggtccattcgtaacttttcagcgcttgtaaagcttccggtgtaatatttttttgtgctatccccatttcgttgcaaatggtttccagaaaataggtcactaactcgtcgatatcttccggacggtctttcaaagggggaacttcgataattataacactcagacggtggtataaatcttcccgaaaccgtcctttggcaatctcttctttcagatttttattggttgctgcgatgacccgcacatctatctgaatatccgtgtcgcttccgatccggctgattttattttcctgtaaggcccggagtactttagcctgtgcttccaggctcatatccccgatttcgtcgaggaataaagtccctcccgaggctagttcgaatttccctttcttctgtttgatcgccgaagtgaacgatcctttttcgtgtccgaacagttcgctttcgatcagctccgaaggaatagctgcacagttgacttctataaaagctctgtcgttacggtgacttttttcgtgcaactgatgggctaccaattctttaccacaaccgttcggtccagtgatgagtacccgggcatcggaaaccgccactttatcgatcatgatacggatatgattcaatgcatccgaatggccgatcatctcgtatttcttactgactttggtttttagcttttgggtctcctcgataagctggtttttgtccgttgcgtttttgatcgtaatcagaatccggttcaggtccagcggtttctcgatgaaatcgtaagctccttttttgatggcttcgatagctgtatctatggtgccgtgtcccgatatcatgatgaccggcacatcggaagtaaattctttgattcgttccagtacctcgattccttccattttaggcattttgatatcacagaacaccacctccggtttttcagttttcaccgacaccaatccctccatgccgttttcagctaatacgacttcgtgtccttcgaaagagagaatgtctttcatcgaattacggatgctacgttcgtcgtcgattacaagtatttttgccatggtcattttttttacacggatagcaaaattaggaataatttcgaaatcctcaaatttccgaatcttcaaatgttttcatagctttgtagctaggatgattgtcaaattatttggaatacgcttatgagatatattttatctgttctgattgttttttgtttgatttgtcccgatacgctgggacagcgtaaaaaagtaggagtcgtgctgagtggtgggggggcgaaaggagttgctcatatcggtgtgctgaaagtgctcgaggaagcggggattccgatcgattatatttccgggacgagtatgggggctattgtcggagggttgtatgccgtcggatataatgccaaggcgctggatagtttggtcaggatgcagaactggcctttcttgctgagcgataaggtatatcgtttcaaccagccttttaccgagaaagaatccaatgagaaatacctcatttccctttctttttcccaggaaaaaggtctttcggtaccggcaggtttcgtgagcggacagaatatttataacctgttttccgaattgaccatcggttttcacgattcgattccgttccgggatttaccgattccgttcgcttgtgtgtcggccaatatgatcgatgggaaagaagtggtgatggacaaggggatactgcctttggcgatgcgggcgagtatggctatcccgggagttttcgctcccgtaactatcgatagtatggtattggttgacggaggtatctcgaataattttcccgtggatgtggctaaaaatatgggagccgaaattaccatcggggtggatctcagcacagggttgaaagatgagaaaggactggataatatcatggggatcgtcgatcagctgacggcttttatgggcatgaagagttatgagaataataaagcgatggtggatttgtatatgaatccggatctgaaaggatttactgcggccagttttactgcggaggctatcgatacgatgattcaaagaggagaacgggtagcccgggccaattgggataaaattatggctttgaagaaacagatcggtcttgaaccggacgaagatgctgctccccatctcgaaaacaggtttttggaaacagacactcttattataggaaaaatttctatcgaaggagtgaaggaaaaagatgaaaaatggatacaacggcaaatcgggatcaaagaattttctgtcatcaccatggatgatttacacaaagcgatttcttttttatacggtaccggggcttttgccaatgtaaactatgccctcaacggggatcagatttatgacctgacgctacggctgaaagaaaaaccggccagttcactgaatctgggattccgtttcgactcggaagaaatggcttcgatcctgttgaatacaacccttagccatagggcgttgagggggtccagactgtcgattaccggacgtttgaataaaaacccttacgtattggtggattattctttcggcagtaatatgctgagaaaattgggcgtatcctatatgttcaaatacaacgatatcaatctgtacgataaaaaagacaaagtcgataatattactttctcttatcatcgcggagacctgaatttatcggatatttatttccggaatttcaaatttcaattggggttacggtatgaatatttcaattataaatccgtcctgtacaataccgattatatagcggaaaatctgaagtcacaaggatttgccagctactatgctttagctcatttcgatacttacgataagaaatattttccggacaaggggatgagtttccgggctgattattcactttacaccgataatatggtcaattatgacgggcatgctcctttttcggccttatcggccgatttcgaaccgaccgtccggctgacccgtagggtatatcttttgccggctttgtacggaagggtattgatcggacgcgatatagccattccttatctgaattatgtcggtggagaagtagccggaaggtatatgaatcagcaattgcctttttacggtatccataatctgcaggtgttcgataattcggtggtcgtggggcgtttacagttgagatatcgcttgggaatgaggcattacatcactttaaccgggaattatgccaaacagtcggaaagctttttcgatattctgaaaggagacgatgtttggggtggaggtgccggttatgcttataattccattatcggaccgatcagtgtcaccttcgatatgtccaattgggaccagaaattaggggtgtatttcaatctcggctattatttttaaattggagtaattgtaataaaaacggaaataaatgggaaaatattggatttgcatctgtttggcctgggggttagggatcggaggttgtacaccggtacagcaatatcggtataccgaaggaaagatttacggtacattttatcatatatcctatgcttctgacgaggatttgaaagaggaaatcctccggcaaatggagtcggtaaacgcttctctttccatgtttaatcccgaatcggttattgcccgtctgaaccgcaacgagacggatagtacagatgccctgtttcagaaaatgtatgcgatggctttgcaagtaaaccggaaaaccgaaggagctttcgatattacggtcggacctttggtcaatgcctggggattcggttttaaacaaaattctttcccggattctgcccgtatagatacattacggcagtttgtaggtatggatttactgactttgacggaggggaaattgcagaaaaaatatccggaaattacgctggatgccagttctattgctaaaggacttggagtagatttggtggccgaatacttcgagcgtaaaggcttgaacgattatatggtagagatcggaggagaggtcagagccaaaggacaaagcagtaaaaaacggccctggcggataggaatcgaccgtcccgaggaagatgtgaccgctcggaaccgccggttacaaatgattgccggactgagtcagggggctttggctacttcgggcaactaccggaatttttatgtgcacgacggtaaaaagtatgcccatacgataaatcccaagacaggttatcctgttcagaccgaagtgctcagtgcatcggtttatgctcctacctgtatggaagccgatgcttatgccactgcttttatggtattgggattgcaaaaagcccggcagattgttttggccgatcctgaactggaaggcgcttttatttatctggaagaaggaaaaatgaaaaactggatttcacctggctttgaaaaattgattgtagaaaaatagagaggagtgagggaaaatgatgaagagaatcgtatttatactcatcatttgtttttgggttggaagggtactggctatagaccataggattccggcagtacaagattctgtgcgcctggataccgttaagaaaagtttacaggcacagtctttacaacatcttttggagcgggattccttgccactgatgaccttaccggttgatgcacagatgaagatgtctccggtgtatttaccggatagtctgatccgggataccctgcggtatgaatataccaaaattaaagactttgcctataaggcgaaatggacgaaagaactttataaaatggtcttcgtcaatccccatcgtggatatctgaatgtcatgcgtacgcagaacagtgaggaacgatttaaagcttattccgggaaagtgattcatgatatttctattgttgttctgcctccttatgggactagtgtttacgataccacttacttcgaggaagatatgggatggctgaaaaacttagccaacaaaacccatatgaaaacggccgaaaaagtaatccgcaggcagttgacgataaaacccggcatgttattggtaccttttgagttggtgcaaaatgaaattttgttgagaagattggattatatcgatgatgcgaatatgatcgttacggaagatccggacaaccctgctcaggtgaatgttaccctcatttgtaaagatcagctttcgtggggagcgacggtcgaatcgaatttcttgaattctttcgatatcggactcgaaaataaaaactttatgaaattgggacatgtcctgaattatgagttcagttaccggggaaccaaagacaaaaaatggggaaacgagttggaatataaggtgaacagtctttgggggactcatatcaacatccggggatattaccgcaatgattaccgtgaaaaagaagttttcgtagatgtcgaaaggcaattcctgaccaaccggatgaaatgggccggagggatgggagtaggacgtgttttttattcggatgatttaccagaccggaatgtaaaccggttggaagagttgttcaattatcattatcaggacgtatggttaggtaaatcttttttgttgccttaccggtatagctataaccagaatatgtttctgacggggcgtttttttacgacccttttcaataatcgtcctttggttacagacgataccaaccatttgtattataaccggagggattattttgccgcttttacttacatcaaaatgaagtattataaggccaatctgatctatgatttcgggcgtacggaagatattcctacgggattgatgcttagtctgaccacggggtatgaaaagagtgaattcgataattatggctatatcgccggagagtgtcactattcccattttaataaatacgacgagcgttattacgccctggaagcagccttggggtcttatgtcaacgaagacggtttcacccgggggacgctgaaattgggagccagtcatatcagtaatttgtgtagctggggcagttttaaattccgtttctataacgacgtacattatgtgaaaggaatccggcgttatccgggcgattttttgtatatggaagatcggaatattcgcggattttcatccgatacactaagaggaaatcaaaaactgtcgtcttctttggcgactacttttttcttgccctatattaaaaaaggattccgggtttccatttcttctttctgtgatttcggtgtgattgccgccgacaataaaaaattggtacacagcaaaacgtattggggattcggggtaggagtcaacctgagaaacgataatgtcgtcattaaaaatatttcttttcgttttgccgtttatcctactattcctgaggatggcaggagttttcaagcgatactttccagtgggaacagaggcagtttttatgattatcacgtaacaaaaccacaggtgattcagtatgaataggaaatacggataggtcatgacaagttttgcgtcatctgatatttggttagcttttattatgactctggttgcagcgatttctacttttatgggagcgatgacgtcgttatatttcagaaaagtcaaccaggttaccctttcggtcattttgggatttgcagccggaataatgatttataccgcttttatgaaactgatgcccgattcgatcagcatcctatcctcccaattgtcttatgctcagacgaaaatcaccagtacggtctggttttttgtcggtatcgttttgttgtatcctttaggatatctggtgaagttgtggaagaaaaaagaggtggaacgctacgacgcttcacttcaatattaccggcgggtagcgatattggtgcttctgacgattaccgcccatagtttcgtcgaagggctggcgacttttctgtcgtttttggctactcctttggtggctattcctctggttctttctattattgtccacaactttcccgaagggatgacgatcggagccctgtttaataaaatcagtgattcgatgaatcgccgccgggctatattctacagtgtgatcgcttccttattcgaaccgatcggagccctgatggcttatatttttattctgaaatattctaatccggttttaaccggaatactgaaagcttttctttccggactattggtagccactgcactgaatgaactgattcccaattcccaactgaaagggaaccggaaggtgtcggtacagagtattattttaggcatgtttattatgggtgtcgtcttggtcagtgcttcgattttttaaaattttacaacaattgtaattattttcagaattttttaacgtttctccggtctgaggtttggaggatgtgcctctgcggtttatctttgctgaaaatataaagatagggtatttttttgattcataaataattaattggttgtaaatgaaaaaagtcttcttgttttctttatttttggttttagggttagttctttcacagtgtttaccggtttggttgggggaggcattcctgacagctgaaaaggtagcgaagactttgatgttcgtttgtctggcatttattatgattaatgtcgggcgggaattcgaattggataaaacgaaatggagatcttatgctgccgattattttatagctatggctactgctgccgtgccctggattatggtcgctttttattatatgttcttattgcctgccgatttgttcgggaattgggatgcctggaaagagaatttattattgagccggtttgcggcccctacttctgccggtatattgtttaccatgctggctgctgccgggttacggcgcgagtggatctataagaagacccaggtgctggcgatcttcgacgatctcgatacgatcttactgatgattcccttgcaaatatttatgatcggttttaagtggcagttatttgccgtggtgattgtgattacttttttattagtgatcggttggaaaaaactgggaacgatccggttgtcccaaacctggaaatctattttattttatgctgtatgtatcgtagctgtaacggaaagtatttatcttttgaccaagtggatgatgggagctgacggagcgattcatatcgaagtattgttgcctgcctttgtcttgggaatggtgatgaagactgtccatcaacacgggaaccgggacgaaaagataaccggaatgatttcttatctgtttatgtttctggtggggttgagtacacctcagtttatcggtatcgatcatggacaccggattacagaagctgtggggattattgctgcacagcctatgccttcctgggaggtattggttgtgcatgtgatcgttgttactttactttcgaatttgggaaagatgtttccgttgtttttctatcgggatcggcaattggaagagagactcgccctttctgtcggtatgttcacccggggggaagttggggccggaattattgtcatcgctatgggctataatctgggcggtcccgctctgattatttctgtattgagtttggtactcaacctgcttttgaccggtggttttgtggtcattgtgaaacgtttggcacaacaggcttatggactgaaagaatagacggaataaagataccttttcttgggaacaatggagaaaagaagaataaactttcattctccgtttctccaaatttatggtaggtttgaataagttcataaagtctatggacctgcgggtgtggccggacggaaccggagtttgtattatttcgcctctttcttcttaaataaccgtcggaaaaatcctttcttttctttggttttttcttcggtagttccgggatgtttcactttttccagtttacggttcgagatcttttcgagcaggttcaaatgttctttgaaggtcggtatttccgtttctttttgctgagatggtaaggcaaaagggaaggagagtctgttccaaacctgataattcgggctctccaggcaatctttcataaaccggccgaaaataggcatagccatattggcgccttgtcctaaacggatggtgttgaaatggatgtttacatcgttggctccgactctgattccgacgactatctggggattatatccgataaaccagccgtctacctgattttgggtcgtaccggttttcccggccatttcattatgcagaccgtataccgaacgcaatctttgccctgttccttcgtcgatgactgccgaaagcatattgctcattaaatgggcttcgttttcaggcagtacttgccggggaatttcgggctgagctttgaatatcagattaccctggcggtccttgatttcttccaggtaataaatcggacggaggtttccgttattggcaaaagtcataaaaggacgaaccatttcctgcaaggggatatcggctactcccaaggctaaagaaggatagggaggaagctcggaggtgatacccaaacggcgggcatgatcgataacggtgtctatgcccgtctgaagcaatacttcgacagcgatggtattgatcgatttactaagggctcctttcaaggtgtaatatccctcgtaattgttgtccgaattgcgtggggaccagtcgtcatattccggataggttttctgttcatttttgtaataagcgtccagacgggtcccctgatgtatagctgcactgtatacgaccggtttaaagaccgatcctacctggcgcggggcttcaacctggtcgtattggaaatatttatagttcagatcaccgacccaggcttttactttcccggattgtggttccacagcaatcatcgccggatgcaaaatcttcagataatgcttgatcgaatcgatcgaagaataatctacccgcatttctccctcttccgggctgtataccagcatcgcttttttttcattcagaattttcagtatgtctttttcagccaatccctgatgtttcaatcgttgatagaccgtactgttctgaatagcatttttcagtatcgcgggatttttgtcccagggttcttgtttacccaggtgggtgtaataggattgctgtaattttttcatgtgctcttgaacggcattttctgcatattgctgcatctctgcgtccagagttgttttcaggataagaccgtccttatataggttgtagttcgtaccgtatttttcgttgtattctttgaggatccggtcggcatcccggcgtattttttcgcgtaaataaggagccagaccggaaaaatggttgaccggaatgtaatgcagctgtagttcttcctgctttattttttcaccggtctcttcatccagataatcgtatttcatcatttggtcgattaccgtgttgcgacggttgagcgccctttccggatgcagacgcggattgtaacgcgaaggtcctttgagcataccgatcaacgtggctgcctgagggatagtcagatcggaagcagaggttgaaaaatatttttgagcggcactctcgataccgaatgtattttccccgaaagataccgtgttcaggtaaagggtgaggatatcgtctttgctgtaaatgttttccaaacgatgggctgtaaacatttctttgagtttcacaaccggtataaaggtcacctgctgttcgtcccggggatacagatttttagccaattgctgactgagcgtacttccgccgcctgaactacggtgtcccagcagaacagttttgaaaaataccctcagcatactgattttgtctacgccttcatgttcgtaaaaacggacatcttcggtcgcgatcagggctttgacggcataaggggaaatatgattgaaattgacattggtacggttttcgacataatatttaccgatcagcaagttgtcttcgctatacaattccgaagcttcgtcattacggatatcccgcaattcggcataatccggtagcttaccccaaagaccggcatataccgagtagacaaatagagtgataccgattgcgagaaacaggataaatagcaccccgtatttcaatagcttgaacttgtggtggtgccggtgagaagaaaccgcttttttatgttttttctgatattgtttttgggccatatgctgaaaagctaagcatataattcgacttagccggacaaaaatacaaaataatttcttttatcggtcggacttcggctagtaccgacatgcccgctggcagtttgaagggtacgaggatgaagtgaaacctgaaatgctgggggaaagtgaagaaaatatttaaaagaaaagtccggatgtaaagtccggactttatacctaaggaaacagaagggttatttgatgatttcaaccatggcacaacgattccatttgttgttgttgttgtagtaaggtttttctttacctacatattcgataaccatccggttagaattgatgccgtaatcttttttcaacatattggcgacagcctcggctctttcttgtgaaatccggagatttacattgatcggaccgaatttatcggcataacctacgatgcggattttgacatccgggttgtttttcatgaaagttccgatattgtagatcaacgggtcataaatatcctgaaccacggcgctattgaatttgaacgggatggtagaggggatagattctacgatttctacatttttcgtttcaaccggtctaaccacttctttctcgataactttgatctctggcggacggttctgtaactgagtcacttgattagctaataccaggttggcggcagccatttcgtcgatgacagcttgtttcggtgcggtacggaaacctctgcctttgaaataataggtaacccctgcagtaagtccacccagcccatcgttcgggaaaccaccggtttctaccatcttatcgttgaagatcatgccctggaattcgatgttggcatcgaatctttcagaaatcttgtatttggcttgaataccgccatggatggtgaaagattgctgatgtttccgggtcatacctccgacaccgaagaaaggaacgatatcgaatttacggtcggggttgtatttcgcgaagaaatttatcaatcccatcataaagtcgatgttcatgtgcatataatgcatgtgtaacatacttccggcattatcggtgaaaccgtgtaatgctccgccaccgccttgtaaccgtaatccccaccaggggttgaacattttacctacagccaactcaggcataaaagtaatcgtgtttttaaattttgcctgtgaggaatgttcggcaaagaaagcattcgctccaaaatttgcagaaacaaaccagttatgccagaatgggttggcttcaaatgaggttttgtatcccggaagacgttgttctataatgacttcctcgacttgcgcctgggcctttgttattccacatagaccagcaaccaaaacaattaacattaatccttttttcataacatttttataattaagtaacttataatattgacattacatttcgtttgttgttattatcttttgatttaaaataatagaggtgtcaatgaacttgtattttaatgtcaaaacttaccggaataacgtagtttggggggaggacgtttcaaaatagggtcaataaaatgtgagtttttatgatttttaaccttttacttttaagctttacatattttttttatctttgaactccgatcgtatttcttccggggagtatggtcggaggaggatgattgcttatttttaatcagatacatataaaacaaaagtggacccgtccacagacaaaaattgacgaacatgttaaacattgcattatttggtcctccgggagcaggaaaaggtactcaggcaaaaaagattgtagagaaatataatctggcccatctttcgacaggagatatgatccgcaaggaaattgcggaaggaaccgagttaggtaaaatagcggaagagattatcgcaaggggcgaattgttgtctgatgaatttgtggtgagactgatcgaaaatagtatggctcagcatcggggagtgaacggattcctgttcgatggttttccccgtactgtggctcaggctgagattctcgaccggatgttggaaaaggaaggtactcctttgaaaggattgatctgtatccatgtccctttcgaagaattaaaacgccggatgctcgaacgggctaaaatcgaaggacgggctgacgataacgaagaggcgattgctaaacggttccgggaatataatgataaaaccgtccacgtggctaatcattataagaagaagggagtgcatatcgatgtcgaaggaaattgtccggtagaggaagtgttcaatgctattacgaaagcgatagaggaaatgaaataaggtagatcggcttggtttcgatcggaatcctttagaaatgaatcggcggaactcgggtcgggagtcagtgtttatcccgaacgaagttccgccgatcagtaaagtgccggtcacgaaagaacattattttttcagtccttttctttccaatagcggttcgatgccgggttctttgccccggaattgtttataaagtttcatcggatcgtccgaacctccccgggagagtatattttcccggaaagctttggctttctccggattgaaaatatctccggtttccttgaatgcagcaaaagcatctgcatccaacacttctgcccaggtgtaggcatagtagcctgccgaataacctccgttgaaaatatgtccgaaataaggactgcggtagcggacggtgatttcaggtattaaaccgatcttatccagtacttctttttcgaatttttccgcatcgatcggatcgctgttttgaatagtgtggtacgccatatccaatagggcggccgacataaattccgtcacaacgaaaccctgattgaaatgactgctgttttgaattttatcgattaactcctggggcatcggttcaccggtttgccaatggtgggtatagatttttaaaacttcgggatctccggcccagttttccatcacctgggaaggcaattcgacaaaatcgcgggcaaccgaggtgcctgccacactggggtaagtacattcggatagtagtccgtgtaaagcatgcccgaactcatggaatagggtacaggcttcatcgaaagtaagcaaggcgggcatatctccggccggtttggtgaaattgcagacattggtaatgaccggactggaattcaataatttagattgcgggcggaaagcgtccatccaggcgccgctgcttttaccggcccgtggaaaataatcggcataatatattccgatgtgtttaccgtcggcatctttgacttcgaatgccagggcttcggggtggggaagaggaaggttgtcgagttgttcgaaagtcaggccatataacttgttggctacataaaaagcacctttacggacttcttccagcggaaaatattggctgatttcggtttcgttcaacccgtatttctcttttttcaatttttcagcataatagcgccagtcccagggagctagtttgaaccgtcctccggttttatcgatcattttctgtagttcccgggcttcttgcctggagatcggtaatgccgcttcccaaattcgattacataatcgatatacgttctccgaatttttagccatattatcgtcgaggacatagctggcatagtcggggaagcctaacagccgggctttttgtacccgtaaagaaaccattttgctgatgttggcccaattgttgtatgcattgtcctgactgccccggtcgatataggctttgtagatctgttcgcgcagattacggttgtctgcatattgcaggaaaggcataatactgggattctgcaaagtgaatacccatttcccttccaaaccgttttctttcgctgtctcggcagcagcagcgatgacaccttgcgggagcccgctcaggtctttttcattatcgatcaccaaccggtaggtattcgtttcatgcaattggttggctccgaatttcaaactcagtaaagccagttcactattgatttttttgaatttttccttgtcttctgccgaaagattggcaccaccacgaacaaagttgttgtaatattttttcaataccattttttgttccgtagtcagattttctttgtcctggttatcgtataccgttttgatccgggcaaatagctcggcgttcagatttataccgtccgtatgagccgtgatttcgggcataatctcctctgcaatggcattgatcgaatcgttcgtattggcttcccggagattgaaaaacacataagataccttgtttaacaactgccccgatttttccatggcctcgacggtattggcaaaagtgggagcttccggatttttcaggatggcctgaatttctgcttcctgttcttttatcccttcccggaaagccggaaggtaatgacgattctgaattttgtcgaaaggaggcacttcgaaaggagtatcgaatgggattaaaaacggattgtccgtaaccggttggtgttgattgcaggattgcaccactattcctgcaaaacaaatgacatacataatttttttcataaaagtgaggtaaaattgtttttgatctttacacacaaagatagctatttaataggctaaagtgcaaataaacggataaatatagtaaaaacggggactgcggacagttattgttcccagtttgaggcaggtataaatccatgacggggaaattattcgaactttttttgtaagacatttgcttatctgaaaaaaatgtatttcctttgcatcctgtttggaaagcgtttataaaaaatactgagagatgtcaagagtttgtcaaataaccggaaaaagagcaatgggtggaaaccatgtatctcactctaaaagaagagtaaagagaacattctcgatcaacctgttcaagagaaatttttattggccagaagaagacagatggattcgcctgaatgtttcagccgatggtcttcgtttgattaataaaagaggtttaaatgcatgtttaaaagatgctactgctgctggattaattaaaactatttaaaatcactgacgatggcaaagaaaagcaaaggaaacagagtgcaggtgattcttgaatgtactgaacaaaaagaatccggcgtgccaggaatgtcccggtacatcactaccaagaatagaaagaatactcctgaaagattggaactgaaaaagtacaatccgtatttgaaaagagtaacgttacaccgtgaaataaaataattgaactatggcaaagaaaaccgttgcaacattgaaaaccggagatggtcgtggttatgcaaaagtaatcaaaatggttaaatctccgaaaactggtgcctatatgttcaaagaacaaatggttaccaccgatcaggtaaaagaagtattgaagaaataagatgtttcttttatataaaagaaaagcgctttatcaaaaagcgcttttttatttgccttacgtttatataaacgttcatgtataaggtaggccgatagttacaagaggaatggttgcctgtgttattttagcaggcttgtattcatgtgggaaacatgatgtttatgaaggagatgggtaagacaaggtagaatttttgaactgtcttgaaaggattttatggggcagttctttttcctgacttcgtcactacaaaaaccg

SEQ ID NO: 6225 - DNA, 137 bp, Unknown
  gut microbiota DNA sequence
caagcgcggcctccgcgcttctgatctggtctgctccccggacgtggctgacaccatcatcaacgacgcggccgtgcagaagctcctcgacaaccgccgcatcgagatcggcaacgtggagcctgagctgctgcatg

SEQ ID NO: 6226 - DNA, 293 bp, Unknown
  gut microbiota DNA sequence
ccatcatctcttctcttccgtaaagagaattccgatgcagattttccatatccgcatctgcaaacagtgcgtacgccttgatctcccgttccgaaagccatgcatataccacctgggtcagatcggtacggagcgctaccagaaattctctggtaatcattccttcccgttccgtccggtcaaggtatttctgcagccgctccagcagctcctccggtttttcctccgaaagcagagctttccacacatccagctccttattttcgtagctggtctgcggagcctgaaattca

SEQ ID NO: 6227 - DNA, 158 bp, Unknown
  gut microbiota DNA sequence
tagaatttcacacgcaaggcgtcaatgtaatggttaagttctacggagtttcggtctttgcctgtcgatttctctttttcctgcgaccagagtgggacttttacgctccgctttagttgaagttccacgtataggcggtcataagtgacacgcacacg

SEQ ID NO: 6228 - DNA, 35215 bp, Unknown
  gut microbiota DNA sequence
aaacttattggtaattaggatgatgaaaaagagaatattattgtatgtttggatgatcgtgggaaatttcatatttccttttatgaatgttttgtttccttatctttactggaaacagaatcaacgaacggaagatgcagcttttacgaaggaggcttgtaatttgttgaattttcaaatactgttttcttttattatgataggggtattcgtatttgggtggtatcgtgcaattgtacattggagtgtgggtgaagttggaggttgggattttatcaaatgtgcatttgtgctttggttggcggtgaatgtcgtttatccgttgtttatagtatttattactgccgtcaagggaaaatcttttcgggcttggccgccgacaataccgtttttccgggcttgaacaagtatttttagagaaagaattttataaaacgatatatcgaaaaacattaagcgatgaaaactttaatcattttagcgattgctattttagggtgtgtgaacgccatggggcaacaaacggtagatctggacaaggcgagccagagattgaaaaaatccgatttgcctttcaaaagttgtaaggtgatggcttatacgaatcagggggtagagtatcggggcaaggcttgtgctacataccgggatctaagccggaaacgtaaatcgcaggaagaaacgggggaaatgtacgtacccttctggttcgaggtcggaaacggatgcaagcttttttctgcggtgctgaacgtttcaccttgcctgacggaaatgctggtgacttataaaggtaaccgggaagcggaccggttggagacaaaactctattttaacaatgatattgccgtgaaacagtggcagctgactgccgaaggcgaggtgatcgtctatgaattggttttcgccggagatacgggcgaggtgacggaggacggttttgcaggagcggaagctcaacgggtggatacctactaccggatcagtcgggacgggacgttcgaacaagcgaaagaggtgcgctatgcgccgaagtattatacggccgaagaattgggcgataaaaccaaaaacatttgggacggagacgaaacggtgttgtaaacagaactgtcgaaccattaaaggaaaggtgcggaagcctggctttcgtacctttttgttgcaggatgaaaaagattgtgttactatggggagttatcctgggatgttgtgcctgtatggatctgcctgcggacgtagaagaggcgttggcgctggcaggaggaaaccgacgggaattgaaggctgtgctgaggcattaccggcaggattcactgaaattccgggctgcctgtttcctgatcgccaatatgcgttggcattattcggacgatagcggatattgcttgtacagtgatgcgaaagattcggatttatgtgatctccggcgattcgaccggtctttcctgatttctcatgtcgatcatgcttttgatgtgtgggagagttcgccttgtgccgcaggactttctttctgtgaattttgtgagtatattttgccctacagaagtttggcaggatatccggattgtttttccggggcggaactgtatgatttgttcggaaagtatgtcggtgcagggcaaggggattcgctggcaggttacgtagcgaggtataaccgggtcaagacggattttgagggagtgacggggaaacgatcggcattggatagtagtttgtacaggccgttttttccgggacgggaatgtacggatgtggctgtgatcggttgtcagattctccgggcttgcggattgccggtgatggtggaattttgcaatgcttaccgggactttcccggccggcatttttattgtacggtccgggacgaccggggacgttggtggccctttaatccggagacctccttgcccggtgagggtaaatcggtaccggtggagccgatgaatctttaccggcagtatttcggagcacagcgggataatcccttttttctgaaagctgcgggcgaatatgtgccgcctttgttcgacaatccgtgtttgcgggaagtaacgggcgaatgttcggaggttttccgggtaactcttccttggaccgggcctgcgaagaatcggttggtttatttagcggcatttcaggcttggggcgatatggcgccggtgacctgggctgaggtggatacgttgaatggccgggcggtgtttacacaggtgatgccggatcggttgtattttccggtgtattatgaaggacgacggatgtgcgtattcggtgagccttttgtggttgcccgggattcactcacgccggaaggttttacaatacaggcattccggacggacaccacccgccgggggacggttgtactgacccggaagtttccccgtaagccggccatgatccgcctggccgagaggctggtaggaggagtgttcgtgggagctaaccgggaagatttttcggatgcccgggtgttgtatacgcttaccgaaccgcctgttccctgcttgcaggatgcggtgctgcgtcatccgggtgccttccgttattatcgttttatcgctccgcctgcctttccgcaggctaatctggcgatgctggaatttctgacccgccgggaccgcggatatacaaatgttgccgagccgggaccggcggcggtattgtctcctgacgacacattggcggcaaaaggagaaaaatgggtaaaattgctggatgcaccttcatgggaggagatgaaatggaaacctgaatatgacgggaatatgctgacggctcccggtgctttctctacgattacgctgagattggcacaaccgcaggtggtggaacggatccgctttgccccgcaaaatgccgataacggtatccggcggggagatttatacgaactgtttggttggggaaaacaaggttggcatagttacggcaaaaagagggctgaatatgaatttttgctctatgaccgcattcctgccggagaagtattgtggttacggaattactccgaaggccgggaagagctgccttttatcgtcgaaccggcaggaaatgccgacgggttcgcccaaagatttatccgcttgcccgacaacaaatagtaaataataattgaaagtaataactatgagaaacagaattttaatgactatggtaatcatcgtcattgttgggattgcaatacaaggtattattggaataattgcgggaataattgttgcgtcaattgtgggtattgtttatgctcttattaaaaaagataaactaatgaaaaaatggtcagttgttgtgtttattcttagcattgtttgtttaatactgttttatgtttgtttaataaattcaaatatgtaatgtgattatattttatacgaattttaatcaatgaaaattatgttaaatcaatcgttatgaagaaggtaaatttgtattgtttgttaatctctgttttgtgtctgatttttatttggggttgtggacaaggtactgaattagaaaattctaatgacagcttggaagttgaaataaatttagcaaaatctttgtctgtcaataagcaagatttgaaattaattggttttaaaacattttatgtttcagatgaaaatgaaagaattaaaataaaagaacttacacctataattaaagaaaaggcttcgaattactatatagcagaagatggtagtttttttagagtatattttcctttacatacagctattgtcaaatgtaatggtaagatatattatgctgatgaaaaaggtgttgtcaaaactgatgatgttattaatttggatgaggttgacgtggcagttattggaagaaaacgttcagaatatgttagaggaacaggtacaaatattattgaaggtgataaattatttttagcaacgccattattaaccaataggaatatactaaatagagggtatgtgggggacaaaaagtgcaagttataatttatgtgtttttgatttaggagagcaaattgtaaatagtaatgaatgttgtaacgaggtagtgaaaataaaaacgagaagtgaagggggagatggtggcaaaatttcttgtatggcaaatcatggtggtaaaaattgctcgaatgcttttggtataaataatgggcgttgtacttttaatcctaatgtttgtatggactataatggttggtttactgattgtgttaatggaaaagtgtcaaatttccccggaagtgattgcgacacagcgatggggcgtggagaatgttggaatgaaataatgtagcagggaatgccgacgggttcgcccaaagattcatccggttgccggacaagccggataagtaaaaaatagaatcaaaatctgttcggaatatttgcaatattctttttttgtcatacatttgttccgataaaaagaaaaaatgagaaatagtttacatcataaccatcatcattgccatcactgtttcaggtgagatgatgttgttatgctgttcggtcttcaataaaagtataataagctcgcctgattcaggcgggctttttttgttttttgcctacccggatcagtcgggcgctaactctaaatagcgttatgataaacttaaaaattgcaatccagaaatccggccgtttaaatgaagattcactgactttactgaaagagtgcgggatatctatcaacaacggaaaagatcagttaatggcccaggcctctaatttccgattggatgtattgtatttgaggaattccgatatcccgcaatatgtgcgagatggggtggccgacattgccatcatcggggataatacggaaaaagagaaaaaaacgggtatccgtcatgtgctcgacctggggttttccaggtgccggttatcgatagctgtacctaaaaatgtcgattttcaggacatctcttatttacaggggaaaaagattgcgacttcttatccgaactctttaaaagattttttgacggaaaacgatatagaggctgagattcatgagatttccggttcggtggagatagctcccaatatcggattggccgatgcgatttgtgatttggtcagttccgggagtactttgtttaaaaacggcttgaaagaggtatataagatttttgaatctcaggctattttggtggctaattccggtttatgcggtgagaagcaggaattgttagcccagttggtatttcggattaaggctgtattggctgctaaatacaacaaatatattttactgaatgctcctgaaaaagctttggatcggatctgtcggcttttaccgggaatgaaaagtcctaccatcatgcctttacgcgaaaacggatgggtgtctgttcattcggttgtgaatgaaaatgagttttgggaagtaatcggtaaattgaaggaagccggagcggaagggattctgatcgtgccgattgaaaaaatgattttgtaatactgaaaaagagatagctatggaaagaataataaatcccgtccgggaaagatgggtggacttattgaagcgtcctcggatggaaaatgctgatctgcagaaaatctgtaaagctatttttgcagaggtcctgaaagacggcgataaggctttgaccaaatatacctggtttttcgaccaggctaaagtagaacgcttgcaggtggctgaagcagaattccgggaagctgaaagagaggtaaacaatgatttgaaaagggcgataacggaggcccggcaaaatattgaggcctttcatactttacaactgaccggacggaacgaatatgtcaatccgaaaggattccgttgctggcaagagactagagggatcggaaaggtgggcttgtatattcccggaggaagtgctcccttgttttctaccgtattgatgcttgccgttccggcccggattgccggttgtgaggaaatcgttttgtgtactcctccggatcgttcaggtagagttcatccggctattttatggacagcccgccaatgcggagtggataaagtctttaaagtcgggggaatacaggctatcggggcgatgactttcggcacggagagtgtgcctaaggtgtataaaatcttcggtcccggtaatcagtatgttacagcggcaaaacagctggcctgtaattatggtacggcaatcgatatgccggcaggaccttccgaagtcatggtgattgccgaccgttcggccgatcctcgttttgtagcggcagatttattgtcacaagctgagcacggtccggacagccaggtgatattattgacaacggacagctgcctggtcgatcgggttcagaaagagatagaaagccaattggccgtattgccccgtaagactatcgcttcgaaggctttggaaaattcgaaagcgatagtactggaaaatgtagatgaatgtttggaattggcaaatgaatatgcaccggaacacttgatcctgagtgtggaaaattatctcgattcgataccacaaataaaaaatgcaggctctgtgtttctgggtaactattctcctgaaagtgcaggagattatgcttcgggtaccaatcataccctaccgacccatggatatgccaaagcatatagcggagtgaatgtggatgcttttgtgaaaaaaattacttttcaggaaataacccgggaaggcctgctcgatctggctccgaccatcggggttatggcggagcatgaacttttgtatgcacaccggagggcggtggagatacggaaagaagagggaaagtaaaaagtgaaaaaagcaaaaggctggaggttggaagtgaaagggagggacaatgaaataagaggatatttatggaaatagaaaaattgatacgtaaaaatatttgggaattacaaccttattcgtgtgctcgggaggagtatgaaggaggacaggctattttactcgatgcgaatgaaaatcctttcgatacgggagtgaatcgttatccggatccttatcagcgggaattgaagaaagaattggcccgactgaaggaagtgaaggtggatcatatgattttgggaaatgggagcgatgagctgatcgatttattgatccggagtttctgcgaacctgcggaagataatatagtcgtcttttctcccggttatgctatgtatgaagtgagtgctgcgattaatcgggtaggagtgaaaaaaatcgatctgacagccgatttgttacccgactggtccgagttgagacgacgagtggacgatcgcaccaaactgattttcctttgtacgcctaataatcctaccgggaaggttatcccttacgggcagattgagcggttgtgtggggagtttcagggaatggtgatcgtcgacgaggcctatatcgattttacagacgcaccttctgcggtgcatttattggataaataccggaatgtcgttgttttgcagactttgtcgaaagcttggggaatggcaggattgcgtttggggataggcttagccgatccggaagtagtcggaatattgaatcgggtgaaagctccttataatatcgggggactgacccaacagaccgctttggcccttctccggcaatatgatcttttccagaatcggcggactgggattatcctcgaacgggagcgtctgatccgggaattgagagggttgggtatattccggcgagtatatgattcggaagccaattttatattggtcatcactgaattttgtcagaagttatatcgctatctgattgcttgtcgggtggttgtacggttacgggatattccgcctttgatcggaggaggaatccggatcactgtcggtacccgggaggagaacgatcggttgctggaagttcttcataaatatgataatgtaatggaagtgaatgccttatgaaaaagatgttatttatagaccgggacggtacgatcatcaaagaaccgacagacaattttcaggtggaccggccggaaaaactggagtttatgccgggagtgatcggagcactgcgggagattaccgggaatacggattttcgattggtgatggtgagtaaccaggatggcttagggactgccgattttcctatggaagattttatgcttccgcaaacattgatgttgaaggtgttggaaagtgaagggatcgttttcgacgagatatgtatcgatccgagccggccggaagaatattcccgttttagaaaacccggaatagggatggtagaaaaatatttgaatgaatatttggatactgaaaattcctatgtgatcggggatcgggagaccgatatgcagctggctgctcatatggggataaaagggatttggctgggagaatggcgggagaccgatttaccggtggtattgcatacagattcctggcgggaaattacccgatttataatatcaggaagccggaaagtccggatttgtaggaaaactgcggagacagaggtaactgttactttaaatttgaatggggaaggtcgttgcagtataaagaccggtttgtcgtttttcgaccatatgctggaacaaatcgcccggcacgcagaggtagatctggagatcggggtacggggagatttgaaggtcgacgagcatcataccgttgaggatacggctattgtattgggggagtgtttcgctaaagccctgggaagtaaaaaaggaatcgaaagatatggttttgctttgcctatggacgatgcaaaggctgaggtattactcgatttcggcggaaggacttggttggaatggggggttactttgaaacgggaatatgtcggagattttccgacggagatggcccggcatttttttgcttctttttgtcagagcgggctgtgcaatctgcatatctcggcccagggagaaaatacgcatcatattctggaggctgtattcaaagcttttgcccgtgcagtacggcaggctatccggcaaaccggaggagggatcccttcgtcgaagggctgtctcgcttagtttaggaatgacgaaatgattgtacagataaataggaaatcatgaaagttgttattatcgattatggagccgggaatgtcttttcagtgacgactgctttacaacgcttaggggttcaggcggtcttgagtagtgatgtcaggctgatcgcccgggccgaacgtgtgatatttccgggtgtcggacaagctgctgctgccatgaagcaattgaaagataaaggattagatcggataatcccacaactggaaatgcccgtattgggaatttgtctggggatgcagttgatgtgccggttttcggaagaagaaaatacatggggattgggtatctttcctatggaagtgaagaagtttgcagacagttgtaaagtgcctcatatggggtggaatacggtccggaagctgaaaactactttgtttcaagggataaatcccggggaatggatgtattttgtacattcctattatgttcctgttacagcttattgtatcgcaacttgcgactatcagcgttctttcgccgctgctatttgtaaaaataatttttatggatgccaattccatcctgaaaaatctgccggtgccggagaaaaaataataaagaactttttagatatagtataaaattgaaaatgaaaattatacctgcaatcgatattatcggtgggaaatgtgtccgtttgactcaaggaaattatggacagtgtaagatatattcggctaaccctttagaaatggcacgcctgtttgaagaggccggactggatcggctgcatttggtcgatctggatggggcgaaagcgtcgggagttgtcaattgggctgtgcttgaaacgatttgtaaacatacccgtttgtccgtagattttggaggaggggtgaagactgatgaggatatgcgtcgtgtgtttgaagcgggggctgattatgcttgtgttggcagtatcgctcagacaaatcccgaacaaaccgctgaatggctggaaaagtatgggtatgaaagagtaattatcggagctgatgtctggaataccaaggtgtgtattcagggatggaaaaaggtgaccgatacgacgatttttcaattgattgagtcctatcggggacggatcgggcatttgatgtgtacggatatcacccgggatgggatgatggatggaacggctatcggcttgtatcgggaattacttcgcctttatccggagattcggttgatcgcttcagggggagtgagtggaacggcagatttacaacagcttgcagaagttggagtagaagccgtggtcgttgggaaggctttgtatgaaaagaaaatagatttgaaatcacttaaaaatttttgattttgttagctaaaagaataatcacttgtttggacgttaaagagggacggacggtgaaaggagtacatttcaacgatttgaaagatgccggtgatattgtagaattagcaaagaagtattctgttgccggtgctgatgaactggtgtttttagacatcactgccagtaatgacaaccggagtacccgcctgagctgggtggagcgtgtggctactgcagtcgatgtcccttttactgtcggaggcggcattgcccgggaggcagatgttgaggctttattaaaaaagggggcggataagatatcggtcaattcggcagctctgtccgaaccggatttaatcgatcggttagcctatcattttgggaaacaatgtattgttgtggctatcgatgcccgatatgaaaaggaagaatggtgcgtatacagtaaaggaggaagactaagaactgaaagagaattatacacttgggcactggaagtcggagagcggggagccggggaaatattattcacttctatggaccatgatgggacgaaccggggattcgcctgcgaagcgatagcccggttgagcggattggtgaatgttccggtcattgcttccggtggtgcaggaaaactagcggattttaatgaagtatttacaaaaggtaaagcagatgctgctttggctgccggggtatttcattatggcaggctgactgtcggacaggtgaaagcctacttgcggcaaaacgggataacggtaagagggtaaataattgaaaagatataagatggaaatagaaaatttgaaatttgacgaaaatggtttgatccctgctatcattcaagatgcagagaccaggacggttttgatgctcggctatatgaaccgggaggccttgacattaaccctgacgaatggaaaagtttgtttttttagcaggtcccggcaaaagttgtggacaaaaggtgaagaaagcggacattttctatacctgaaagacatacaagccgattgtgatggcgatactttattggttaaagccaaaccgctcggaccgacttgccatactggaacagatacctgttggggagagaagaatgaggaggcggattttttgttcttcttacaaaagttcctgcaaaaaaggaaaaatgattctccggaagagtcctatacggcccgtttgatttccaaaggaataaataagatcgctcaaaaggttggggaagaagctgtggaattagtaatcgaagcgaaagacgacaatgaagatttgtttttaaatgaagcggccgacttgatgtatcattatctggttttattgattgccaaaggatatgggctggaggatgtcatccgggtattgaaagaaagacacaaatagaatggggataaataggtatttatatacatgtttacactaaatgtaggttttcttgggtgcaacggagaaaggggaaaagaaaaaagtaaagtaaactttaatttccccgttctccaaatctatggtaggttcattttttctttctattccgatgcagggttttgtgccatcagaccggttcgcctggaccggtccgctaaggctttccttcactgaccggcggaactcctcgcaggctcgtcagacaccaccggtcgggcgttcggaaaacctaaccggaccctcgttcctgctccaatggtcttccgccacaaaaccctgcatcttccgtcagcactacagggcaaagaaggaaagttttattgaatgaaagagcaggccaccctgaccggagtatggatacctgggttacctgatcggattatttctataaaatagcgatggctgaattaatccctcatgtagggggggcagaaaaacagctgtttgatagaagtttatacttttcaggtcacagttcgtttcctatgcagtgataacgtaagtcggaggtgttcgtgttgggggaccattggagctctgtcgggtgtcgtcttgctttttctgaacgcccgaccggtggtgtctgagcgaagcgagttccgccggtcagtgaaagaaaaaggtagacgaccgacagaagcgaccgggtcccccaacacgaacaccgaagacgaacaagtaacaaaataattctacatttatcggtgtaaggtatataactgccaaaatttattcattgaggactttccagagtatatctttcaattcggtaaggccggttcctgtcacagaggagataaagacataagggatatcggggagatcgcactccatctctgccatcagttctttatcggcacagtctgattttgaaatggccaatacgcgttttttatccagaagctccggattgtattgtttcaattcgtttaacaggatgttatattcctgatgaatattctgactgtcggcaggtaccagaaatagcaataccgagttgcgttcgatgtggcgcaaaaatcggatacccagtccttttccttggtgtgctccttcgataataccgggaatatctgccataacgaacgaacgtccatcacggtaattgacgattcccaggttaggaacgagtgtcgtgaaagggtaattggcgatttcgggtttggcagcagatactaccgacaataaggtcgatttgccggcattggggaatcctacgaggcccacatccgctaatacctttaattcgagaatgaccgtccgttcgacgcggggctctccgggctgtgcaaaacggggcgtttgattcgttgccgaacggaaattccaattgcccagacctccgcgtcctcccttgaccaggataaaactttccccgtcttgtgtgatttcacaaatcgtttcgccggtttctgcatcccgggcaaccgttcctaaaggaacttcgattgtaacatcttcaccatcggcacctgtactccggtcttcacttccgtttccgccgtcacctgcaaatacatggcgctggtatttcaaatggatcagtgtccagtaatttcggtttccacggacgatgacattgcctccccgtcctccgtcacctccatccggtccgcctttcatcgttcgtttatcccggtgtaaatgggcggatccccgtcctccggcaccactccggcagaaggtttttacataatcgacaaaattcgtagaagccataatatgaaaaagtaaaaggtaaaaagtaaaaaatcttaggcattcaggatatagagatccggataatttcttcccaaaccatcgtaatccaagcctctgcccacgacaaaatcgttttccagttcaatgcctttgtaggcgatgggtacctgacagactgcggctttgggtttatggaataaagtggcgacgatcacttgtttcggattcttagcatgtaaatattccagcaaatgcttcatcgatcttccggagtcgatgatatcttccagaatgacgaccgtacggttctgtatgtcctcttttagcccgatcaactcttggattgctccggtagaacaggttccgctataggaagcgactttgacaaagctgatttgtgtacccggaatgacgatttgtttaatcaggtctgatgtgaacataaaagaaccgttcaaaatacttaaaaatagaggttgggtatcggctagctcccggttcatctgttcggccattcgggtaatgacttgatcgattttagtagcttcgataaaaggacgaaactctttgtcatgtaatatgatatttcccattttgctaaattgctatccctttgagtatttatttggacaaaagtaatatttttaaggcatatatggagggacaaatcagattatatttatttttgtatcgattagtctgatgaattttaccttataaaacaaatatcgaatgaatccaagagtaagtattattatggggagtacttccgatctggccattatggagaaggcggcgaaagtattggatgacatgggtattccatttgaaatgaatgccttgtcggctcatcgtactcctgcagaggtggaggcttttgccaaacaggctgcagagagaggaatagaagtcattatcgccggagccggtatggctgcccatctgcccggagtcattgcggccatgacaccggtgccggtgatcggggtgccgatcaacgcctctttgaacggaatggatgctttgttggctattactcagatgcctccgggaattcctgtcgctacagtggctatcaacggagcgatgaatgctggaattctcgccgtacaaatattggctgtcggagatcgggagttgaaagaaaagatgattcattttaaagaatctttgaaaaagaagatcgtcgatgccaataaagaattggctgcggtgaaatataatttcaaaacaaattgatctgaaccgactgatatatcatcccgtaaagagttatctattctttacgggattttcttttgtaaatatttttaaattaagtttgtttttaagtaaataattcataaatttgagaatataataagatgaggtgttattgttgtgtggtcatagcgtgatgccggcggtataaggtaatttattttttgttcgttctgtttcgtcgcttaatttcataccgtcggtatttttaatggagagttcccccttgtggtaacgggatgttaggattttatatctgatgcagaactacagcttactgcttgttgcgaggtccggcctggcagaagttgtataattttcagtacgatgagatgctggcaatttgggttatttctattgttttcactggtctctttggatgtttgggcacaggatttacctgatattgaacgtttgttggaaggaaatgatattctgaatacagaagatggatacgaggagatggtcgatatcctttctaatctgttgatgactcctgtgaacgtaaatacggccgggttcgattccctcaagatgttgtttttattgtccgacagtcagatcgaccagttgttggaatttcgaaagaaatacgggaattttcttcatatcaacgagttattgttggtgccgggaattgggaagaaagatctggagaatatccggtctttcattactttagggcatccggaagtgcaggaccgggtgaaagcgataaggttacgtagccgacaggaattactgacccgtgccaaagtgagtctccccttgcaggaagggtatacaacctattctccggttgatttcgatacccggaaagagtatgaacgcaaagcagataatcgcttccatggccctccggtcgggctgttactcaagtataaagcgacgatcggacaacatctgcaagctggtttgactcttgaaaatgatccgggtgaaggatattttacccggtatcagaaaaccggttttgattttttatcagcccacataagtattcatacagatcgttttttccaacggattcttttgggtaattaccgcttacaatgggggcaaggcttagtggcctggggtggttttacttccgggaaatcggaggttgtcgtcggaaacgagaaatcgggcaaaggtttttcgccctacacttctgccgatgaaaataattatctgaaaggcgttgccctgactttgaaaccctgtcggcaggtaacggcggatgtgtttttttccaggaagaaaaccgatggtaatatcgtgcaggcggatacactggcagaagaggatctgctgtcggtttctttgtatgaatccggttatcaccgtaataataacgagtgccggaaaaaacataccctggaagaactgactacgggaggagccgtacattggaatgcaccggcctttaagctcggtctgaacgctttgtattatgattttaaaccggccttgatgatcggggatcgtatttatcagcaatataacgatacagggcacaaacgttttttgatgagtgtggattataaaacttcgtttcgcggaatatattggttcggagaaacggcttttagcggaaccggttcctgggctacgatcaacgggctgaggtggggaaattcattcttatctgcctgtttgctttatcgtcgttacgataaaaaatatatctcccattatgctgccggatttggcgaatattccaatacatccaatgaggagggggtgtatttcggtaccgatatatctcctctgaaaaacttgaagattaatctgtactatgattggtttcgttttttcagtccccgttatggagctactattcccggatcggggtgggaactgttgggacagatcggttaccggcatgggaactgggaacatcgttttcggttaaaacgggagatccatcccgaagatacgaaagaaaaaatctctgttcagcgggaaaaaagtgaataccgttatcagatcggttatcgggtaactcgtcagttggagttaagaacacgtttcagtctttctcattaccataaagaacagatcaaggaaaaaggtttcctggtctatcaggatttgatttatgcaacccggaatagtcgttttaaaatgcaatatcgtttggcttggtttaagaccgattcctatcagtccaggatttatgcatacgagaataatgtgctgtatggatactcctttccttcttttatgggagaggggtggcgtacttacctgaacttgagttggaaaccgttaaacggcctgacttgttacctgaagggtggatttacggtgtatcccgaccgggaagtaatcggttcgggagtcacgaaagtagaaggaaataaattgtatgatcttgctttgcagttacgttttaccttttgagatcatttattccggtttgtttttggcatgcaacaagtgcatgatttcttcatccgtcaattttttcacgtttgtgatgatcatattctcatgtaagaaattaccgtattgattacattcgtcgataattcctgcgaaaaggggttgaagctctgttttcagaggaaggagcaacagcatcacggcataattccctttaaattccgtagattcgatacagccttgagcattgttaatggctgtttctgcttcatttttcagcgtattttgctgaaaagagggtaagtcgccgggaacgcggtaaaaaaacacacagaaataccgcaataatagcccttggcctcccagccctgtagagataaacacaccgggatcgtccagcagagtcgattgtaataacattctggattgttggagcgctataatcgcccatttttttaagggagtgtcttgtttcgaaaaattttcgatagcacggtataccgaaacatcgtccagagttgccaatacgaccagcattttctttttgatttccgggtcgatcgtatcgtcatagaggtcattgatgttttccaggtattgtttgcttgttttttggtagttttcagttcgtttactgagtaagtttaccatttcgaagtattctttctgcaccttgatatccacttcttcctccaggatgctgaggttggagccggccatggccagtaattgatcgatatcttctattttctttccctgtttactcatgttcgatgtatttctcagacaaatttaagctattccatataaaaaaagctgccctcggagcagctttttttatatctgtaaagaattaggccttgtgtctgcgttcatcagatacggtcagcttctttcttccttttgctcttcttctggctaatactgctctacctccggcagttgccattctttctctgaaaccgtgtttgtttcttcttttggtgtttgagggttgaaatgtccgtttcattgtaaaatatattttagcattattttctcacttcggactgcaaaagtagggatttttttggtgtctccaaaaaaaagttacttttttttacctgattacttgtaactaagccttggctggtctcgtattattactgaaagatgaaaaagaagtctgaaaatttgtttttataaatcaaattattaactttaagagcgattatcctgatatgagacagcttaagattaccaagcaaattacggggcgcgagtcgtactccatcgagaaatatcttcaggagataggtaaaatccatgttttatctcccgaagaagaagccgatttggcaaaaaaaatcagaagtggagaccgggcggcaagggaaaaactggtattgagtaatctgcggtttgtcgtttctgtcgcgaaacagtatcaaaatcatgggctgactttaggtgatctgatcaatgaaggaaatgtcggattgatcaaagcggccgaatgcttcgacgaaaccaaaggattcaaatttatttcttacgctgtatggtggattcgtcagtctatccttcaggcaatagctgaaaatgcccggcttatccggttgccattgaataagatcagtacgatcaataaggtgaatcggtgttatactttgttggaacaagagttccaacgcgaaccgacagaagaagagattgcagagaaaatggatatgacgcctgaagaggtaaaggaaaacatgaagatcgccacgaagccggtatctatggatgctcctttgacgaccgatgaagaatctatttccctctacgatgtatatatcgctcccgatccttctatccaggctcctgaaagttcactgaatcaggactcactgaaaaccgatatcgaacgttcgttcgctgctttgtcggtacgtgaagctactattttaagtatgtattatggcctgaacggatattcctcgatgtcactcgaagaaatcggaacgaaattaggtttgacgagtgaaagagtcagacaggtgaagactaaagcgatccggaaattgaaagaggtgaagaacaacaaacggctgaagacctatttgtaaaataaggatagaatcagggatgaaagataagctttcatccctggttttttttagaagaatgcggtgtagatcactaccaataagatacagatgatataagcacaaatattgaatactttgtctgttttaaacatatcggcagtcagtttgatcgctttcggatcatcatctgcgggattactgctcaggctgaccataaagatcactacaatcgtcaacaaggttgcgtagaacatttggtccatgaacggcatctcgagtggtaagagtttaaagatcagagcgattggaatggaacaaagtacaccccagatcgctcctttgttcgttgctttcttccagaacaatcccattaagaatacagccaaaatacccgggcttaccaaaccggtatactcctgaatgtattggaacatctgatcgatacctcccaatagcggggccagacatacggctatgatcaaggcgataccggctgttaaacggcctacgttgaccagttttgtttgcgaagcttcgcgattgatatatggtttatagatatccatcgtaaaaatggtggaagttgaattcagcatagaagccagcgaagaaacgatcgctgcagctaaggcggctagtaccagtcctttcacaccgacgggaatgaaggtactgatcagccagggataagcattgtcattgttcaatgcggtagaacctgcaatttcgaaagcacttctggcgccgtacaggtcttcggaatacattacccaggcaacgattcccggaataactacgatgaaaggaatcaacattttcaggaaggctgcaaaggcgataccccgttgtgcttctgtcagtgatttggctgccagggtacgttggatgatgtactggttgaagccccagtagtataggttggctacccacagtccaccgatcaatacatagatacccggaagattgttgaactccttgttatcgcgggagagtaccatatcgaatttatcactggcagcatcggcgatgtgagagattccattcaggattcctccgtcgggagtgacgtaatgcaaggcgattaaggttgtaataataccaccgatgactagcagggcaacctgaatgacatctgtccaggctacagccgataatccgccatataatgagtaagctgctgcaaaaatagccagcgcgataatagccggaacgatcatactgccatctccaacacctacaatcgtgtcgatggctttaccacccaggaataatacagaagtcaggttgacaaaaacaaagagagcgatccagaatacagccagaatggttttcagattggtcgaaaaccgtttttccacaaattccggaatcgtgtaaatcccttgtttgataaaaatcggcaggaagaattttccaacgataatcaaggtcagagctgccataaattcataggaagcaatagccagacctccggcaaaacctgaaccggacataccgataaattgctctgctgagatgttggcggcaatcagagaagaaccgatagcccaccaaggcaatgctttactggccaggaagtagtcctcggcagttttggtgtgtccttttttagtccgtgatacccacagacctacacccactagtagaatcgcgtatattccgacgattacgaaatcaattatatgaaaacttggattcataataaaattttatgtgattattaatttaatttacgtgctccttcaccgatgtcggcgatataaaatgtggcttccagatgggttttgtccttgtagattttccctacttcccggatataacgatcgacctgttcttcttgaatcagcgttacggtacagccaccgaagccggcaccggtcatccgtgatcctaaaactccttccagctgctgaccttcttcagccagggtatctaattcgatccctgtcacttcgtagtcgtctttcagcgatcggtgggaggcattcatcaattgcccgaatgttgtcagtttacctgcttttaaggcatcgatggcttgtttgactctggcatgctcgtgcacagcatgttttgctctgcggtaaacgatcgggtcggaaatcgaagtacaatactgcccgaattcggtgggcgtcaattcacagaggaaagtgatcggatgccggcttgaaatagaagcgaccgcctgttcacattcgcttctccgttcgttgtacttagaatctgctaatcctctttttttattggtattggcgatgacgagcttatatccttccatatgtaaagggacatactcgtatttcaggctggcacaatccagagcgatcgcgtgattggctttgcccatgccgacagcaaactgatccataattccacagttgaccccgacgtaatcgttttcagctttttgcgaaattttgaccagctcggtcatatcgaggtgtaccttcgtgacatcgttcagcatcactgctgtgactacctcgatagaagctgaggaagaaagacctgctccattcggaatgtttccatagtacaaaagatcgtacccccatacgtcggagccccgttctgcaaattctttcatcacgccgatcggatacttgatccaggcggtaggtttgtcttcgaaagcgtttgcattagcggtgtaagaacgatccatatttacactcgaaaaacgattttgacggtcttcacgcttcgctatcaaaagataggtcccgaagctcaacgcacagggaaagaccagccctccgttgtaatccgtgtgttccccgataaggttcacccggcccggagcaaagtaggtatgctccgctcgtttcccatagatttcttcaaatctatgttctaattctagtgtgttcatatttattgttagttgtgttctgctctatatgctctgcacgcaaatattcggacaaaaatataacattttttttagtagcacaacttgaactgttaagaatcagggctgtagagtcaacaagccagtgcaattttatgcaaaaagtttgaaaaaacactcctttggtgtataaaaattcaatttttcccttggtcttctattaatcttatattgtacattcctgatgaattcatccgtaagcagtctgaaatcagttccttttgggatatattgtctgataagtttgtttgtcttctcaatggcacctttctgccaggaagcgtatgaatcggcaaagtagacagtggtcgcgagcctttctgcaatctttctatggcagcggaattccccaccgttgtcagtggttatcgtgaggacgtgttctttaaacggcatcagcatccttatcactgcctctgcaaccgcctccggcttctttccttgcggcagcctccccatcatcatgtagtttacgctccgctcgcataaagtaagtatggcgcccttttgccccttgccaacaatcaagtccatctcccagtccccgaacctttttccgtcagcttcttccggacgctcatggatgctgatgcgttgcggtatgttgcgcaccttggttgtgcgggggcgctttacatgatgcctgtatttcatcctgtgacggcagtgggataccagttctccgctcacatccgcccggatgcggcggtaaatcgtttcatgggagacggtcatgcctttgtgcgacagccacccggatatctgtttgggtgaccaatcctcgcttaccagaagccgtaaggcttcctgcatcacatcgggacggacggcatggttgccgggaagacgttcacgacgctcatcagataacttctgcgcgtgttgccattgatactcgccgcgcttcgtgctgttgcgcctcacctcgcgactgacggtggagggatggatgttgttttgccgagcaatggctttctggcttttgccttcttgaattcccagatagattgcgtatctttgctcgcgggacagttgtttatacattgcaatacaaaagtaattgttcctggggacttcggtcccctttttttgtattgcctgttgactctattttccgtcggcatgccgacggagaattgcacttctattgtgaatcttcaaagaatggtaagatatacacgctatatcttttcattattgatggtgatttttctcttttttattaaaggaaattaatatctttgcgaacagttagtaagaaattagttattttttgttttaaagtgtaagggattggtagagtaattggaataaatagaagtatttacgtatgaaaccacagatctatatattgaaaaatacgcacctcgaagtacatatttctactttaggggcaactttaacccgcatgctgacgaaagatttgcagggaaaggttgtagatgtgttgctgggtatggaaaaggccgaagattacgaatcgccggaatatattgctagcggagcttatctgggagcgataatcggacgttatgggaatcggattgcccggggaagatttgagatcgacggtgtaaaatatcagttggcgataaataatggtgaaaaccatctgcatggaggattgtgtggtttcgataaaaagatctggaacgtcggacaagccggtacagattcgctgacgttgacttattgcagtcccgacggcgaagaagcctatccgggaacactacaggtgaaagtcgggttttcgctgcaggagaaagctttacgaatcgattatgaagctgttaccgataaaaaatgttttgtcaatctgactcaccatccttattttaacctgaatccggaggctgccgatattaaacgacataccctgaaattatataccgaccgctatttaaagaccgacgatttgattccggacgggacttttgttacggctaccggagattatgatttcacttcgccggcatctttacaaggtgtgatcggaaaccagggaggactggacgactgttttgtattcaacaattccgggaaactgattcgaatggcagaactttttgatgatcagacaggtataaaactttatgtatgttccgattatccgggagtgcaagtgtacacgggaaaatttctgaatgtaaagcaggctaaggatggtaaacaatacggaccttatgccggagtagctctggaagctcagttctggcccgattctcccaatcatcctgagtttccgtctacacttttagtgccgggagaaatttatcggaaaacgaccatttatggttttgaatgaatttgagtgattcaaataatattttattaaaactgtttataacctacaattatgggaaaatatgaattaaacaaaaaccttgcacagatgttgaaaggtggagtgatcatggatgtgactaatgcagagcaggcaaaaattgctgaggcagcaggagcttgtgccgtaatggcattagagagagtaccggcagatatccgtcgtgacggtggagttgcccggatgtccgatccgcagatgatcaaagccattcagaaagctgtttctattccggtgatggccaaagtgagaatcggtcattttgtggaagctcagatattggaagccatcggtatcgactttatcgatgaaagtgaagtattgacgcctgccgacgaactttatcatgtagataaaacagccttcaaagtgccgttcgtatgtggagcacgtaatttgggtgaagctttacggcgtatcggtgaaggggctgctatgattcgtaccaagggagaagctggaaccggaaatgtcgttgaagcggtgactcatatgcgccagatcaacgatgatatgcggcgggtgaaaaatgccggaatggaagaattgatgagtctggcaaaagaattcggagctccttatgaattagtgaaatatgtacacgaaaatgggaaattacctgtcgtgaattttgctgccggtggtatcgccactcctgccgacgctgccttgatgatgcagttgggctccgaaggggtattcgtaggttccggaatcttcaaatccggtgatccggcaaaacgggcaagagctattgttcaggctgttacctattataacgatccggtgaaattggcagaactgtcggaaaacctcggagaggctatgtcaggactcgagattaaaacattggagaataaatatgctgagagaggttggtaaatccgatatatccatttaaactcagtaactttttacatgaaaataggaattttgggttttcagggtgctgtcatcgaacaccagcgacacatcgaacaattggggcaggaagctgtcgttgtccgctatacggaacaattggccgagatcgatggtattattttacccggaggggagagtactaccatgggaaaattactaaacaggaccggaatgatggaaccgttccgtgaaaaaattcagcaggggatgccggtttggggtacgtgtgcaggcatgatcctgttggcaaaggagttggatcaggatccggttgtgcatttgggaatgatggatatcacggtcagacggaatgcttacggtacgcaaatcgatagtttcgatactcaggtggtgattccggaggtaagcgatgaacagattccgctggtatttatccgggctccttatattgtccgtacaggagaacgagtaaaagtattgtgtgaagtggaaagacatgtcgtcgctgcccgcgaaaagaatatgctggcgacttcttttcatccggagttgaccggaaatgccgcatttcatcagtactttatcggtatgtgtagcggtaagtaaaaaagcctgttccctttctgaaaatattcgtttcggcagggaacaggattttttatttttgttgtactaattcttcgatggtaagcgtagctgtaccgactttcttcacgacgatacctgctgcaatattggctgttctcatcgcttcgctgatttcaaaacctgccgccaggcaaagtccgagtgtcgctacgacagtatctcctgcaccactgacgtcgaaaacttcttcggaatgggtcgggatatgaatggggggaatgggaccgatcaggctcatgcctttatcactgcgggtgactagtaaggcggtcaggtgattgttcgtaatcgcttcccgggctgctttttcaatggcccggtcggtattgggtaccgtataaccgacgatatcactcagctctttaacgttgggagtgacgatatcggcgcctgaatatttctcccagtttttccctttgggatcgataatgacttttttatcgtatttgtgagctaacttaatcagataacggcataaatcttcggatatcaagcccttgccgtaatctgagatcaccaggatatcgtattccggtaaaatccggctgatcgtgtcccggaatagctttttattgtccgcattcaattcgcttttatcttcatagtctacccggacgatttgctgttttccgccgataatccgtgctttggtgattgtcggggaggaagttttcaacagaaaggtgtcgatatttttgtggcggctgatccgttcgatttctttaccgaaaagatcatggccgataacaccacataataaactatgtcctcccagactgacaatgttgttggcgacattcgaagcacctcccaaccgggattcttctttttgaatgttgacgatggggaccggagcttccggagagatacggtctactttgccgaaataatatttatccagcatgacatctccgacaatcagaattttactgtttgaaaaatctaacatcttaggctaatttattcgacacctccgaattccatcaggtaggcttttatgaaaccgtcgattttaccatccatgactccgccgacatcggaggtctgaaaattagtccggtgatcttttacccggcggtcatcgaaaacgtaactcctgatttgtgaaccccactcaatttttttcttattactctcgatcttctgttgttctgccatccgtctttgtaattccatatcatacaacatagaacgcaacagacgcatagcgttttcacgattgtccagctgagaacgggtttcggtattttcaatcaggatttcgcgggtttcaccggtatccggatctttgtaattgtaacgtaggcgtacacccgtttctactttatttacattctgtccgccggctcctcccgaacggaaagtatcccaactgatatccgccgcattgatggctatctctattgaatcatccaccaatggtgtcacgaatacagaagcaaaagaagtcattcgtttaccttgggcattgaaaggagagaccctgactaaacgatggacgccgttttcacctttcaggtaaccgtaggcgaaatcgccttccagctgcaacgtaaccgtcttgattccggcttcatcgccttcctgaatattactgaccgtcaatttgtagttattggcttctgcccagcgcatatacattcgcatcagcatggaagcccagtcctgactttctgttccaccggcaccggaattgattttaaggatgcagctcatctgatcggcttcaccccgtaacatattctttaattccagctcttccaccaattgcagggtttctgcatagtgggtatccacctcttcttcggtagcttcgccttctttggcgaagtcaaagaggacgttcaggtcgtctaccgaacgggatacagcttcacagccttctatccagcctttcaattcgcgtacctgtttcatcaccttttccgcttgcttcgcatcgttccagaaatcaggagcttgggtacgcatttctacttcttcgagctctatttttttacgatcgatgtcaaagatacctcctcagagcgccactgcgttcttcaactgctttcagttgatctgttgttatcataatatcgttttttttgtgtgtatattttatgctgcatatcatccggtatgcagcataaaatgaattattatttcccggctttgtccgccgtatccttcatcaacggtttatcgggagaaatatgtgaaggattatataatctcaatactttgtcctgcaattcctgtgccagttctttttgtcctgcctgggtggcaaaagccaataattgcttgatcacttcgatgctgagtctttcctcttgttgtatactcggagtattggcaaatttcggctcgagtgaattggcatatttcaacatctgatagttgttcgttgccagttcgttgagcaagtggttcgccttttcggtttctcccagttcgtaatacatcggtatatagaacagcatactattgtctgccggtacctgatacagtggaatttcttccaatgacttatccagaacggcgaccgcttcggcttgtttaccttcgtcatacagtttctgggccaaccgaaggaaggtattccggtatttcatgacggcgatggtctgatcgtggaagaagtcgatgtttactttcggatctttgatatttccccattcgaatttattcatgatattatcgtagaggatatcgctgtcgatccgtccgtaatcatagaattcggcttctttcgtttcgataggtacgacgcggtaggccgccccttcgagctggaagtatttttccaatcccatataggcatccgaacccaaaccgattccgaaatataccggacgttcccagttgttcgtcgataaaatatccaggaccatcagttgtgatttggtcaagccttgcatcggcaaatgcagtctcaggtctttgacgatctgatctgcatcctggggtttaaccgtcccattggcgattactttggccgaatctaccggaaggataacgttacgtgtcggtataaaatcgagttccttgatatatccctgtaattttgtctgaggcaggtcgctggcgacaaactccatgacatctttcaggtttccttctttgaactgatccctgatcaatacatagtcccgtttcccatcccggtattgttcatgagtgaacgaaatcggcactccggaagattcataagctttccgtttcatctggtcgatataccaggaaccggataacaaacttaaattgacgacccggacatcccgccgtactccttccacttcttgtacataccacagtgggaaagtatcgttatctccataagtaaataaaattgcattcggagcacacgaattgaggtaattacgggcatgggctgtcgtggcataacgggcatgacggttgtggtcgtcccagttttgggcggccatattgaccggaatggcgaacagacagaccgtagtaacggcaatggccgatacccgtggatctatatttttgatctttttattcagaaattcccagatagaaagcacacccaggccgatccagatggcataggcatagaaagaacctgcataagcatagtcccgttcccggggttccatcggagtctgatttaaaaagacgatgatggctataccggtcatgatgaacaagagcatgactacccaaaaatcctgttttccggttttccccttccggtattggtaaaacatccccaacagaccgagcagaaaaggcaacatataatatttattgtttgctttttcatttttcaaattgtcgggtaattcatcctgatttcccaggcgtaattcatccagaaatttaatgccggtgatccagttgccgtgcatgatgtcgccatatccctggatatcgttttggcgtccggagaaattccacatgaaatacctccagtacatatgccctaactgataattgaagaaataacgcatgttattaccgaaactcgggcgggtgatggtctcgccgttgaccgtataggtcggaccgttgtttcttcctgcccaagcctggtattgattggcaaagttgggccgggtatcgctgtacatacgtgggaagaaaccacaaaaccgtttgtcgtattcatagatggttttgttaccgattttttcatagaccccggtttctttgttctgataatagatcggttcgccctccttcgtccctacttggggagcattgaaatactggccgtagagtaaaggagcgtcaccgtattggtcacggttgatgtatgacaataaagagaatacattgtcagggcttccttcgtcgataggaggatcgcttaatgaacggataacgatcatcgaataagaagaataaccgatcagaatcaccataaaacaagtcaggatggtattccagacaggcatcccttttttcagcgtataacggataccccagactaaagccccgataatcagtaatacatagatgatcactccggtattgaaaggagcccccattccgttgacgaaagtcagctcgaaccaaccggctactttgatcacgcccggaatgattccgaaattaactacacccaggataaataccgaaagaatgcctgttttgataaatccccgtacggtgggtgtatattttttgaaataataaacaaacacgattgccgggattgccagcaagttcaataagtgtactccgatagacagtccgatcaggtaagcgatcaggatcagccagcggttggcataacgttcgaaagcgacattttcccatttcaggatagcccagaaaactaccgcagtaaataaagaagacatcgcatacacttcgccttctacggctgagaaccagaacgtatctgtgaaagtataagtcaaagaaccgatcagcgaagctcctaatatcgcaaacatttgtcccatagtcatttcttcaccttcttttacaataagcttacgggccaggtgagtgatcgaccagaacaggaataaaatggtcagcccggaacaaatggccgacatacagttgatcatataggcttgggtatctgccgatggagcaaatatcgcaaacaaccgcgaaataatcataaataacggtgctccggggggatgtcccacctgtaagcccacagacgtggtgatgaactctccgcaatcccataggctggccgttgactcagctgtgagtatgtaagtcatactcgcgataacgaaagtgacccaaccggtaaccctgttaatcagcttgaagcttaaattaggatgatctttgattttatacatattcattaattaagataaatttgcgattattatgtgcgtaaaaaatcattatttcctccgttttgaagctttcttgcccttggggcgtatttgaataaatagacataaagtgttaagtgtctggttatcaaaagatgacttcgtaacgaaacaactaatgaagcacgaaaataattattttactcgaattttcctcattttttttgttggaaaaaaaaaaggtcatatatttgcaccgtcaaaaatgacactatcaatgattgtcccattgtgtaatggcagcacagcaggttttggttctgtcagtccaggttcgaatcctggtgggacaacacttgattgcccaagtggtgaaattggtatacacgctagtttcaggtactagtggcttcacggccgtgtaggttcgagtcctatcttgggcaccaattcaattaaggtttacgattttagattgtagattatttcctgagtaatcgtaaatcaaaatcagcggtcgtaaactgaaagtgttcttttaaatgcccgaatggtgaaattggtatacacgctagtttcaggtactagtggcttcacggccgtgtaggttcgagtcctatttcgggcaccgactttgaaatttacggtttcagattatttctaaaataatctgaaacgtaaaggattggcccaggtggtgaaattggtatacacgctactttgaggtggtagtggtcgaaaggctgtgcaagttcgagtcttgtcctgggcactgaaatagatgaagacatgaaaaaccgttgtatttacagcggtttttttgttttctgaaattttcggaaactttgggaaattcgtaaaaaatttcaacatttgttttgataaaagtctgcttagaagcagctgttttttagggtaaaaagatttcaataacagataaagtgaatcagttgatagagcaaaagtttctggctttattcgaacagcaatgggggaagaaagccgaccggaccgagatgttaccggcttccgggtctgcacgtaaatattggcgtatatattggaacggggagtcgtgcattgcggcctggaatcgaaatgtggaagaaaatcgcttgtttatcgatttttcccggcattttgcagagaaaggattacatgtaccgcaaatttatgcggtatcggaagatcggaaggtttatctacaggaagatttgggtacgcaaactttattggacgtggtcgggcaggagcgaaaaggaaatagtttgtcggagcattcgatgcaactttaccggaaatctttgtccgaattattgcggtttcagttgatcgggggacagggactggattatgcccgttgtgtcccacgtcctgtattcgaccggcagtgtatcctgtgggacctgaattattttaagtattgttttctgaaattggcaggagcggatttttcagagcaggcgctcgaagatgattttgtcaggctgacagatgctttggttcaggaacctgcggatagttttatgtttcgtgattttcagtcgcggaatattatggtcagagccggagaggtttggtttatcgattatcagggaggacggcaaggggctttaccttatgacgtagcttcgttattgtatgatgctatcgtagtgattcctgatgaacaacgggaagagttactggatggatatatctgcggattacaggcttaccggacggtggagccgggactattccgtcatgttttttatcgttttgtattggtacggctgttgcaggcgatgggggctttcgggcttcggggactttacgaaagaaaaccgcattttatcgattcgatacaacccggtctgcacagcattgaccggcttttccagtccggtaggctggatgccgattatgccgaaatcaggcgggtttgcaggcaattgctcgaatagctcctaggcttcggtttggagtttatggaatacttcccggagtgaaggataggtctggttcgatagctgggagagattgtgtatcggataccagagcacttcttcgatatcctcttcggtctgaggaataaaagattgacctgaaggggcagacatccgataccaatatgtttttttcaggaaccaactttcattccggtaataaatatggagggtggtgtctaaaggagacagaatacttacttgttttaacccgcattcttcttctacttcccggacggcacattgttccatcgtttctccatattccagatggcctttgggtaggtcgatcattcctaatcgtttgatgaccaatatatcggaattttgtatgactgctcctcctccggctttgacataggtgaaacaagacttgaaaatagtaaacaaatcctccggatcttcatcataaagtacggctttgaaagggatgcctttttccagagtttggtaaatgaaatttttcgtggtcataaaatcccggtgcacccaacggatatccccttcttttagtaaattctgattatcggtcaataaaaaacagctctctttaaaaaatactttatacatttgcaaaaattctagtatttaacaatacaaaaatagataaaaatgaatacagttgcagaaaaagtggcatcctatttattggatattaaagcaattaaattggaacctactcatccgtttacctgggcttccggatggaaatccccgatctattgtgataatcggaagacgttgtcttatcctgaagttcgttcatatatcaaagaacaatttgcagcattgatccgggagaaatatccgcaggcagaggtgattgccggggttgctaccggagctattgcacagggggtgttagttgctcaggaattgggattaccctttatttatgtgcgatcttcagctaagagtcatggtttggaaaatctgatcgaaggtgagtataaagcagggcaaaaggtcgtagttatcgaagaccttatttcaaccggtggttctagtttacaggctgtcgaagctttgcggaatgccgaatgtgaagtgctgggcatggttgccatttttacctatggcttccaaaaggctgaggataactttaaaaatgcatcctgtgaactgaccactttaagtaattacaatgctatgatcgatctggctgtgaaagtgggatatgtacaggctgatcaggtggaaaaattgaaagaatggcgattgagtcctgagacttataaatgagttaaaagagttattgagttgctgagttaaaagagttattgagttgctgagttaaaagagttactgagttaaaaagagttgctgagtagctaaagtggaagaggggaatagattaaggggttgtcgattcatcgtgttggggaaggaaattatttttaatgctagacttataatttattaactcaataactcagtaactcagtaactcaataactcaataactcaataactcatcaactcatcaactcatcaactcaataactcatcaactcaataactcatcaactcttttaactcattaaattatgtcgacaacaaaaattacaagtgagatcttaaaaatagagagtcctattcgggatgtttatgcattactttccgatttcagccggatcggtcgtttggtagagatggccaaacaaatggggatgactaacggattggagatggataaaatctcggaaaagatcgaatctacccgttttacagaagatgcttgctacataaccttaaaaggtatgggggagttggctgtaaagatcgtggagaaagaagaacccaaattaataaaattaggaggggatggagctacaccttttgaatttaatttatggattcaattgttggagaatggaccttacgatacccggatgaagattactttccagggagagttgaatatggtgatgaaaatgatgctgaaaggaaaactggaaaaaggaatcaatcaattgggcgaggggctggcaaaaatcccttatagtttgttgagtaattcaggtttttaaaacataatt

SEQ ID NO: 6229 - DNA, 223 bp, Unknown
  gut microbiota DNA sequence
ggtacatggaagagtggcaattcaacaagacttattcagggacaccgcaaggtggtatcataagccctgttttggcaaatatataccttgacaagttcgataagtacatgaatgaatatgccaacaaattcaataaagggacagtaagaagccgtaacaaggatatttgcaaactcaacagcagagtacactacctaaaacgtaggataaatgaagtagagga

SEQ ID NO: 6230 - DNA, 350 bp, Unknown
  gut microbiota DNA sequence
taaagcttctgcacgcagaaacgggaggtctggtgatgtacgagaaactgcttgaggaaggaacttttaaaatccccgcttatgatcctgaaacccactcgtaccccatgacctggagtgatcttgtcatcatggtggaaggcatcaacgaggacaaacgaaagggaaggcaaagaccatagaggagctccgtgccacgatagttgaactgaacgcttcccttgcatggttgaaaaggaaagtgttcgggaagatgagtgagaaatgcaatcctataaacagcggggaccccatgctcccttttgattacggcgacttgggacagatagaggcggaaatcgaagcggcca

SEQ ID NO: 6231 - DNA, 13164 bp, Unknown
  gut microbiota DNA sequence
aattggaatgaaaatttaataaaaaggtataaaatactggagcctgttgatttatattgtatctcaaatgatgcgaaagtattttacggttaaaggcacgcgaagataattttcaaatcctcaaagcttatttagacaattaaatcgcatgataaccgattaaaaacaatagctttcatttggaaacgtaaaaaaacttttttttgtttatatttgaaatgaaaaacataaaggataaaagaatatgccaatcaaaagttggagaacaggctggattttcggatgttgcttatttatatggataagctgtaatcggacaggaaacgataatccccgtctggaaaaagcattgagtctaagcggctctaaccgccaggaactggaaaaggtattacatcatttctctcaaaatccatcggatagtctgtacttaaaagctgcaattttcctgattgaaaacatgcccggtcattggagcccctcaccgaaagactttcaatcttatttaaaacggctggatacgctgaaaaacctgtcacctctcacccggaaaatacttttgacttatccggcagaacatcctggtttgtgtcccgattttacaccggttgaggatatcaaacagataaaagccgactttttaatccggcatattcgagccgtttttgccttaaagacttcctgcccctggctcgctcatatcgatttcgaaactttttgtgaatatcttctgccttaccggatcggccgtgaaatgcccgaagaactgagcacactcctattggattccaccttccggcaaagcatcgaatatgccaaatgttactacgacgattgccggcattccatccaggcccttaatcaatatctggcaaaacagaatttttcttcctttcctccacaaaacgacaaggaactctacaatctgctaatgttggacccgaacaatacaaaagcctctttgatacaatacagggttgccggtattccggctgcaaccgacttttcagctatccagcgacgccaggataaagtcacttattggctttacacccaagacccgcggatcaatcatatcaatacgagttctatagccaatttacgaatcggtaaaatctaccggcaaaccttttcctcaaatcccctgccggagaccaaggaatatgtccctcctttttttaaggatcctttcaataaagatgttaccgatctttatctgcatacggcagacatcagtatcgatattccggcaaccgtccatactgagtatgcttatctggcagtttacgatgatgtaacctggcagcctgtagcctatagccctatccaaaagggaaagggatatttcaacaaactgggacgaaattgtatctatttaccggtatattatcccgataaccggatacaagctttcgccccaccgtttatactgaacaataacggccaaattacaccgttccgaactgataaaactcatttgcaagctctgcatatcaggaggttacaaccctattccgccgaaaccgattatatgggatattacctgaagaatgcccgtatcgaatgcgcagacgacagtgcttttctccacgctgacaccgtatttaccatccaggaatcaccttattattaccaggataccatacgccccgacaagcattataaaaaacgctattggcggatcagtccacagttcggaatttcgaatctcgccgaactccatttctatgactcttcaggcgaagcacttcatggcgttcctatcggtccggacacgaccttctatcgtaatctgaccgaccacgaccccgctagcaataaggccatccggaaatggttcggctatgatttcggccatccggtatccgtttcggagatcgtttatctgaacttcaacgacggcgagaacatttgtgtcggtcacgaatacgagctatgttattttgacgaaggccaatggcaaacagcaggagtaacaaccgctaccgaccatgtcatcgaattcaatcgagtcccctcatcagccctttttcaggtaaaagacagaacccgaaacagaaacggtagcctgtttacttatgaaaatggaaaaatcagattttggtaaaaccgaacgatatgaaaaaaaagacaattatacttctctggttagtgaccgcctatagctgcagcaactattcttcccgtctgaaagctgtactggattacagcggtacgaacagggcagaactggaaaaagtactcgaccattattctcaagatcctgccgacagcctgaaactgaaagcaagtatctttctgatcgagaatatgcccggtcattataccttcggcggtccatacatgaaatcctataacgagcaactcggtttactcaaaaattgtccctattatgaaaaaaaaatcatccaaatggtccccttcgatcatatcggctataggcaacaactggatatacaagaagatgtcaaatacataaaagccgattttctgatccatcaaatcgaactcgcttttaaccaatggcaaacccggccctggaatgaaggtgtcgatttcgaaaatttcaaggaatatctcctgccttaccgggttgaaaacgaaccgctcgattattggcgcgattcaatctctcctctgcaaaagaacctggaaacctactcgacttattacgataattttcgtcattcgatctctcaaatcgaaaacagatttcgcacttttctattcatgttagacaaaaaaatcccggaacccgatttaaagaattttaaatcagactgcatcccgaccagtaaagccaatttgtttgtattacggatactgggcgtaccgtctgcaatcgattttattccccatttcgcaaatcgaaacggtcgtcactattgggctaccgctatcgatccccgaatcaactccacccaggtatatcaggtgggaatctataaagcacccaaaatttaccgacggacctattcacataatccgacagctaaaccggggaaaagagaatatgttccctatttttttctcgatcccttcaataaagacgtcacagacctttatatccccacttccgaaatcagattgtcagccccggggatcaggaatattcgacacggttatctcgctattttcaacgatttaagctggcagcccattgcctgcagcaaacccgccggacaggagattgtctttcccaaaatgggaaaagatattgtctacctgccggttcattatacaaacaaaaaagaaatggtcccctttgctcctcctctcatattatactctgacggaactgtgcatccgattattgccaacaaagactctttacagtatatgaagctcgtcaggaaatatcctaacagaggagaaagcgactattggtactccgcttttatcgattcacatttcgaagccgccgacaatccggatttcaaatcccctcattccatctgcacgatccgccacaagcccgattatcgctatcaatttattccgatcgataccactttgtcttacaggtactggcgattcgtagccaatgaggcctggagggcccatctgtcggaccttcgcttttacgataagcacaagcaagaaataaaaggaaaaatcatcggaatggattcgactaaaacaaacgaactcttcgatccggacccgctcagtatgtgtatgattccggaatgggtgggcatggatttcggtaaacctgtggccttatcacaaatccggtatctcccgcggaatgatgccaatgggattttccctgataatcaatatgaattattttattatgatttcccccaaggatggatttctatgggcataaaaacagctaccggcacttacatcgaatacgacgacgtccccagcaacggattatattggttgcgcaaccataccctgggacaggaagaacggatttttacgtgggaaaacggaaaagcacacttttggtgatttaaggtggaggatactggatttattgcattaaaatatttttaatcccggaggaaggacctcttctttacggactaaaaacacagaaggaaaactttaaaatcctaaacgctcatttaatttcacaaaaataaaattcgcgtcaattcccgctttagcaaaatccacaggaaatctgcggttaaagattgttaaaccctcaccgattagtcgcttcctgattatatttgttacacgataatacttcgtgtcgaacaaaaggttactaaaaaggtgcaatatggatgttgtggttgaaaatctgacaaagtctttcggctatcagaaagcagtagactctgtgagcttcgaagtcaaaaaaggagagattctgggatttctgggaccgaacggtgccggtaaaaccaccaccctgaagatcatgtcgtgctttctatttccggattatggaaacatccgtatcggtaaatattccatccataaaaacccctataaaatcaaacaaatcatcggttatctacccgagcacaatccactctacgaagagatgaatgtgatcgattttctggatttcatcgcccgggtacacaatattcccaaatataagatcatccccaaagtcatggacatgatccggatgtgtggcctggacaatgaaaaacacaaaaccatccgggagttatccaaaggctatcgccagcgggtaggattggcccaggcgttgatccatgatccggaggtattgctgctcgacgaaccgaccaccggactcgatccgaatcagatcgtcgaaatcagggaactgatcaaaaatatcggcagggaaaaaacggtgatcatgagttcacatatcctggcagagatcgaagcgacctgtgaccgggtgctgatcatcaataaaggaaaaatcgtcgctgacggaacttctgccgaactgcgcaacaaatccgataaaggcaagctactgaagatttgtattcagggcggagaagacgaagatatctacaacgaactggcattgattccggaactggaaaacatcatttcctccactccgcatcattttgaaatccaatgtgagcgggctactgaaattgagaaaaagattttcgatatttgttgccaaaataactggtatatcagcgaaatgactcccgtggaaactcgtctggaagatatcttccgccaggtaactaaaaattaaaatggttatgaatacggttaaaatactcgttcataaagaattagccacaacattcaattcatggagtatctatatcgggtataccctgtttttctgtgtttgcggatttttttcatggctttccagtaataatcttttatacatcggacaggccaatatgatgcaggtattcggtattatcaactggacacagttttttctgattccagccctcaccatgaaaagtattgccgacgaaaaaagaaacggaacgatcgaattaatgctgaccaagcctataaaaacagccgacctgctttgtagtaaattcttttccaatttaattatcacgacactggcattggccctgacactaccctattatattacgctctctttcttaggagaggtggatcatggagcagtccttttaggctatctgggcctgatcgagatgagtgcatgttatatctgtatcggcatcttctcctcttccttgtcccgtactgccgtatcggcttttttcatcagcctcggtatcggtttgtgtttccaatttttattcggcatgtttgctgaacagatcgggaccggcatttttgcagatctattcagttatctctctatggaagaacattttgattcgttgtcaagaggcatactggattcccgggatattatttatttcggatcggtcatcacggtttttctggctttatcgaagtttttcatatgtaagagccgattttaatatttcaatctttacaatgtcacgatctgtatgaagaaaattataaaagatattatatccattctcacagtaatattactcgtgaatattttctcttttttcatttttttccgttgggattttaccaaaaccaaacgttattccctgagtaaagtcagcaagaccagtatccgtaataacgtcgaacccattgttgtcgatttttatgtcaccgaagatctgccccaggatacgaaaaaactggtaaaagaattccgttcattgctgaaggaatataaatctctcagtaatgtcagttttacgataaacaccatttacccggataacacagaaaaggaatttaaagcgacccaggaaggaattatcccgtcattcaacgagatccgggaaagggatctggagaaaatccagaaaatttattgcggagctgtatttcatatcggcaacaacaagaccgtactccccaacatttcattcaatacacccattgaatatgaaattacccggatgttgaaacaagcctccgataccatcaaaccccggatcggttttgttcgcggacacggcgaaacgacccttaacttaatgtcggaactggtcgacgaactatctcatctgacggacattacggttgtagatctgaatctgaacacttatgaagattgtaatgtactctgcctgatcaatcccaaagacaacttttccccctatgaaatcgcccaactggaaaaatttctttccaaaggcggacggcttttcatcgctttgaatcatgcaatcggactgttggatcatccgaacaatggatacatcaattccacaggcgtggaagatatgctcgagaaaaaaggactgaaaatcaggaacgactttatcatcgacaataattgcggggtatgtaatttcgaacaacaatacggttatctgaaattccagcgtagtgtcagtttcccgtattgcccggtgatcaccaatttcagcaagcatacgattacttacggcctacggtccatgctactcatgtttgccagcagtatagaacagatcaaaaccccgacgccttatattttcactcctctggcacaaagttcctccatttcgggagtgcagcaagctccggtatgtttcgatctggaaaagcaatggacccagcgcgatttcaaccgtccgcacaatatcgtcgcagccttactgacgaacgacgataacaacagtgccatcgtcaccatcaccgatgccgatttcctgatcaaccagtcggctatcgacggccatacggacaacatcacttttgctttaaattctatcgaatggctggcagacaattccgggctgattcagttgcgaaataaattcaccaccttcccggtactggaacctgtcggagacaccagccgggaagtgttgaagtacatcaatttccttttaccgatcctgattattctgggaatcgccttttaccgatacaaacgtaacctgagaaaacgggaggaccgttctcatccaggttatatcgattaatgaagtttcaacagtccgatgattttattataaagagcgtcactcaccggagttaaaggtaaacgcagggtattttgacgaataatgccggcagcatgtaaagcagcctttatgcctgccggatttccttcttcaaataaagctttacaaagttcggccctgtccaaatggatgcgacgggcagtcggataatctccctgcaacgcacttttcaccagacaggcataatcgttcggaagtacattggcaatcaccgagatcacgccttcgaatcccagtgacatcagaggcaacaacagtgcatcttcaccggacaaagcagcgaaatcggcccgtttggattttagaatagccgtagcctgatcgaaacggccggaagcttccttcacagcgataatgttgggacaatcgtgtgacaaagccgctacagtcgcagcttccatattcaccccactcctccccggaacattgtataaacacaaaggcagcggcgaagcagcggcaatcgctttaaaatgttcgtaaagccccctttgagtcggtttgttataacaaggagttatgctcagtataccctgacaagctttcaaccaggtggccgtttgaagttcacggatcacctccgccgtattattccctccgataccggcaatcacgggaagacgcccctgattggcttcgagaatcgtatgtaccaccaccgctctttcgtcggccgataaagtcgcagtctctgccgtagttcccaatgccaccaaaaaatccaccccaccgtcgatgacataattcaccagacggtacagagattcccggtctattcgttgctgttcgtcgaatggagtaaccaaggccactcctgtaccgataagtctgtccatgttagtatttgtttatccccgataatattacgttcaatttatttacaaggccgaaaggttcggtcacttcgtcgatcacaatatcggccactcctccctcctttttcatccctacaatacaagaagcctgagtatgttgtaatacaaatttgattaatgcagttgtttccttattcagatcgataaacaaatcatatttacagcccagcatagcgatcaaacgcccgttccgtatcttgccaccgaatcctaaatcagcattccgtaccgccacccaatcatccgtttccagcatctcgatcccatccggaataaaacacagtttatccattttcaccccggcaaaatcggattccaatttccggaaccatttgttctgatcggtatcggcactccaaaacaccagacaagtttttatctccctcttctccttatactctacctccctggtactgttcccgacacgcttattcagtgaatcttccttcagacgatgaaggagattgttcaaaatctttttcatacttctaatattctcagacaaaaatagtaataaaataatgattccccctgctttgttatatcttctacaaaaaatcactttgtcataaaaaaaacaacaaaaagcttgcacagtattatttttgtacatatctttgcaccgctttagagataagacacggactcgtagcttaatggatagagcacttggttacggcccaagaggttgtgggttcgactcccgccgagttcaccagttcaaaaagcaaaaaattaaactcctgaaaattaaaattttcgggagttttttatagactcccagggacggggcagtgggttactttttcccttatcagaattaattaaaggtgtctatatacatgtttaccccaaatgtaggtttataagtgtaaatatgtatataactgtctatgttttttcacgatatattacagggcttgtttattgtgttatggtttccttttttcgaatgtcacctatttttatcttataccattcccacacctgcttatttgttactggatttccgattcctatgacatgattcatcgaatctaataagaaggttttataccgtggattgaaggacaagttattttgcttgtccatgattcccaaagaatcgtagatgatgggggtaccaaaccgattcaattgctgactgacttcaacaggatgataatgcttggcgaataccacatagacaatggcaatatctgtttgcaaactgtcgatttgtttttgcaatctttgccattcatagaatttcaattggcactcatggcaaccatttgtatccacataatggagtattttatacttatggtttagtaatgaataatctaaagtatcttttccatatattttcatggtcaaattggatggaaaaacaatctcttttcccatccaatgttcgacaacctgtttgatttcttttttagaggaagtacatcccatggttattgacaaacaagctaacagaaaatttattatgacatatttcatgctatttgggagaaattgcttaagtttattttagatggtggaaaatgaggacaggattatccgtttcttttaaagagattgaagtgaattggtttaatccatattgtttgtcgacattcaatgctaatagggctggaatatatgaaattatttgatcttgatatacacaaaatgcgctatataagaaagggtattctggaaaaaaatcatcacccagttttatcgttttcacttcttttgttgctgtatcaatttttgaaataaagtcttttatcccggaatttttataaaaaatagaatatacaatattcaatgtcccttgcgaaatatataatccttttattcttctcagagtctctttcccttgtaggaaatgatatgttttttctctatcagtatatatgaacgggggaatttgatcactggtattgaatataaaagagtataaaggtttcttttcttgggaagttaatgaaaagattgtatgttcgtattgttcactaaccaataaattactatcgagacaatgaaagggggaatattcaaaactgaacccttgattttttttaaacttgtctaatcgattgataatttcttttgttataggattgtacacgacataattgtataattgattatttgaataatcagaaaataaatagatggtactatcgttctgaatatgaaaacaatcataccaatcattcacttgtatagtattttgaaaaacaccgttggtatcatatttgaatattttctgatttgttcgtgaaaggcaataaacatgagagtcatagacctcaaaatcggaaatggaaaggtactctcccggagctcttccttgattggctattttattttggtatttcccgttatgggtaaaaataaaaatggtggcttgttttttatcaagaatatatatatgttcgttttgaagaactatcttatcaattcctcctattaaattgtttggagtggtttccaaagcaatagtgtgataagcattaaaaaaatttgtgattttatcctgccgattaatatctattacaaatttttcattagcttcttttattaattcttttgatatacaagagcctaaaagaattaatattatgaaattgaagagataggttactttcatacatttacttttaattcgtaagtagtatctaacaaattgtttcatatttgttagatactctgtgtattatgattagaaaataatttcgtaaagttctttgcattctatgggcgtacaggcaaaatcacctccacggctgcaagctacttgcccgtcaaatcttacatacccatctactcctgcactgattatagaaccacccaataatttgactttacctttggcgccaacataaatttcacattgcgatggatgacgattgtagttgcaatccaatccgccttcttcttctgccaatgcttcaatattacctgttataagtcgaacattttcattttcttgattaatactgagattatatcccattgttccaacaattgcaattactccaattacaatattttgtctgaatttatttttcatttctttttaaattgttggttttgaaatatttttattttactcgtaaatcgtacattcaccaccttgtagtaaattatactaaaaaaatcaatacatttgcggtctcctttcctgtattggaggaacagtgggagggtggctattttgctttggtagagtttttcagccatccatcctgtttctccttagtttaacattgcttatcgttacaaaaatatacaacttttttagggaaatcaaaagaaaggtattcccaattattccctaatgttaaaatgttatgagaaggcgggttaaatagtaacggtaaagattaaaagagacaaatttgtcgggattataaacctttctttttactaatgtgcttacggttacctgatgaacggattgttgctactgaaaactttttctgtggttcggagtcagagaacgaaatttttatctatggaggacaatattgtatacaaattagtagtaaggaagagtttgccagtatggcaaagagggcatttacaaccggttgtatgaaaatggtttaacatagtaggttggcatttagtcataacggacatatttttcgtagaattttgtatatttttgtagtagttatggaatatagtgaaagtggatttgaaaatagctgaagtacggacgttgggtgttgcccattgggaacatgaattaaaaaaagcttataatgtcattagttgcggcaatgaaaaaatgtgtaatgctttacaaggggggataaataaatgatgagacagaccggatttggtttgtgactggtatttgtaaaaaatgaccgatgtttacaaaagaagtgtttgtgcagaaaacaagaagatgggaaaacaatatttattataaaatggccaaaagttatagtatgtcgggtaaaattttatatgcggaagatgattttctgacacgcgaaatagtcggtgagaaactggaagaagaagggtatgcggttgtattggcaaaagacggtaaggaggcgtggaacgaatttcagcaaaatgttttcgatgcggttattctggatgtagatataccggtatataacggctatgaggttgcaagtctgatacagtccgaaaatttacaaatacccctgattttttatagttcacttaccgatgttgagtatataaaaaaaagatttgataatggggcgaaggtgtatattgtgaaatcgggaaatatggaagagttggtggtaaaacttaaaagtgtcttgcgagacaacagttcccgtttatgctatctgacagaacagctaagttttgataccttaacaaataaactgtttatgaagggcagagaaaaagttttgtcaactttagaaggaaaaatattagcagtactatgcaaaaatcctaaccaattggtaaaaaaagacttgcttttagaaatcggttggaacagtacagacgtaaattgggaaagtcaattgataaaaacaatctccaaactgagaaaacttttagaagaatgtgagggtatcaatttacgcaacgacacccgaaaaggatattggttgttgatagattcgacaataaagagtaagaactgttgatagcaaatttattggcctatcgggtaatttgattcgacagtgatatacatatttacacttatatatgtagaattattctgtcgttacttattcgtcttcggtgatcggaattggcgacctggtcgcttctgtcggtcgtctggctttttctatcactgaccggcggaactcctcactccgcaaaaaacttta

SEQ ID NO: 6232 - DNA, 137 bp, Unknown
  gut microbiota DNA sequence
caaggtcttacaatccggtgtctgaatggaacctaaagtcatgcattcatggttgtcgatgtcaatgacaccgatgcccatgatttccagtccacgcttgtactctcctgcacaaccggaccagaagtaacctatcc

SEQ ID NO: 6233 - DNA, 256 bp, Unknown
  gut microbiota DNA sequence
aaagggtcgattctttttgcgggttttcgcaaaaagaataatgaacaattcttggaagcttcgcttccattaaaaaataaaagaggggaaaaaaatgagaaaagaaaaagagaatagagtcattgataatcaattcgataggatccatcccttgggtatactgtttcattgtcaatcaaccaggtgcccgcagggtccaatgactttataaacattatgaactttataaactttcaactaaattaaacgacccttt

SEQ ID NO: 6234 - DNA, 48696 bp, Unknown
  gut microbiota DNA sequence
atagaattactttatagaaaactggaaaaccgtttgacagaagaggaagtcaaacattttgagatgtggatgcaggatatcgatcatcagaggtattatcggaatctacaatctttttatgaattacgagaggatggaaggccggatagtgcagaagtgaaccgtgcgtggattgatttacagagccggataaataaacaggggttaaagcccggacgtaaccgtctgttatggcgtggtgtggtagcagcttcaataattattttgttgggagtaatacctttaactgtgccgcaagatgtaaaaaacgtttcttcggaagcggagatacagatccgtcccggccaacggaatgctattctggaactggctgatggtaaggtttataacctgacaaacttggaatatggggggaataacaggatttctgagaatattattgtggatagttgttgtttggattatctccggccggatacgctgattccggtagcgctggcctggcataaagtaattgttccccggggaggagaatttcagatttctctggaagatggaacgagagtttggctgaattcagaatctaccctgaaatatccggaggtatttaccggaactacccgggaggtatttctggaaggggaagcctattttgaagtagcacgaaatacaaattgtccttttatcgtgcatacgggaatacaaaatgtcagggtattggggaccagtttcggaataacgaattatgcagatgaccagaatctgactaccactttggttaacgggaaggtacaagtagaatttccgggcttttcggatgaggtatttcttttggaaccgggttttcagctggcttgtgaccggcaaaaccggaaaattgaaaagcggactgtcgatgtctatgaatatgttgcctggaaagatggaaaatatgtttttacccggaaacgtcttgaggatatattgactacgctttcacggtggtatgattttcatgtgtttttccaaaatccggaagtaaaagaggtcgtcttttccggtgaactgagacgtttcgatagtttcagtgatattcttcgtttgattgagaaaacaagcgatgtcaaatttactacgacaggcaataccgttttggtgagggaatgatgataacgactaaaataatgttgaactaaagaatgctaacttatgagaaaacaaggatgtaaaaaatgggcattatatgtcccacagttggtggccttgcttttagtattcaatttgaatctgaatgcaaccgcattttcccagcatcagcgattaaatttgaagttgaaggatgctacactggaagagtttatttcagccattaaaagacagtgcgatgtgggttttatttatgattataataaaacaaaagatttgaaaggcattactgtcactgctgtgaatgaagagatttctgcagttttggagcaggctttaagggggacggggtttacggcggaaatagataacaatacgattattctgcggaaatcggctgtcccgcagacagtacaagtggctaagcggattagcggtcaggtgatggacaaaagtgggaatgcattaccgggtgtaaccgttatgattaaaggaacggccttaggaacgacaacgggggtaaacggagattttgaaatcagcttaccgaatcctgtaggccagactttggtattttcttttatcggaatgacttcggttgaaatgactttgaagaatacagaacctttgaccgttgtgttaaaagaagaagcgacggagatggaagaggtggtgatcaccggtatttattccaggaaaaaagagagttttaccggttcttcccagacctatacccataaggagttgaagatgatcgggaataccaatgtcttgcaaagtctgaaaaccatcgatccttcttttgcgatcattgagaataatcagttcggctctgaccccaatactttgccggatattaatgtgcgtggtaaaacgagtgttgtcggattaacccaggaatatgatactgacccgaaccagcccctgtttattctggatggattcgaatcgaccttgaaagcaatcagtaatctgagtatggaccgggtggccagtatcactgtattgaaagatgctgctgcaaccgctatttatggttccaaggcagcgaacggtgttattgtcgttgaaacaaaagctcctgaagccggaaaactgcaagtgaattacaatgggaacctgaatttttcatttgccgatctttcggattataatttgatgaatgcccgtgaaaaattggcatttgaaaaattagccggccgttatggtcctttagatgcaaatggggaaattatagacgaaggttatcagtctacttactaccaacgtttggctgaagtggagaaaggggtggattcgtattggctgaacgaacctttacgttttgccacttcccacagtcatgatctttttattgaagggggagattcccgtatgcgttatggtttaggggtaaattataaccggacagccggtgtcatgaaagggtctgacaataatgtcctgaacggaaacgtccgtttgatttaccgttacaaaaatctggcatttaccgattacgtcaattttgattattcggtatccgatcgcgaaaaagtagctttttccaaattctcacaggccaatccctattaccggaaagtgaacgattatggagagccggaggcagtgctcgagaaatataaacttatgtcaggtgatgaatatgtcttcaatccgttgtacgatatgtctttgaattcttccaaccgaacccggaatttcggcttccggaacaattttgaggtggattggcgggttattgaacctctccggttgagagccagaatcagcgtatcgaagtcggtgtctaaacaagaagtttttcaatctcctaaagcttcggtattttacgggaagagtgaaaaagaaaaaggatcttattctgaaaccaatggggatgtgttgagctatgacggggatttgaatgcgactttcggtaagttgtttgacaataaacacatggtgaatgccgttgtgggtatgcaggtgtccgataataaaaacaagacttccggttttagagcgataggttatgtcgacgaccggaatatcaatcctactttttccaatggttatccgtccggagagaagccttcttattcaaacagccagaaacgttcggccagttattatatgaacgggggatatgcctatgataaccgttatctgttggatgctaatttcagggcggacggttcatctgttttcggagtttcgaataagtttacgacaacctgggcggtaggtgtcggctggaatatacacaatgaatcttttgtaaaaaactgtgcgtttattgattttctgaaattgcgttattcgatcggtaatccgggtaaccagaattttagcctgtacatgtcgtccaatatgtatagctatacgacaagttttaataatcctttcggtttaggagccagaatatcttcttacgggaatccgaatctggaatggcagaaaacaatcgatcagaatttcggattcgatgtagaaatatttcatcgtcgtttacgtctgaatttcgactattttatgaagaataccgatcctttattggtatcagtgaccttaccgacttcgacaggcacagcttccgtaccgaccaatctgggaaaacagacgaccaaagggtatacactttcggctaatgtcgtcgtgttacagaaggaggagctgaactggagtatcaatggaaatttacggcatttaaaatatgaatataagaatatcgggaatgcactggaaaaatacaatgcacaaaaccggaaagatgaaactgatcaaaagatcggaagttcaaatttgaaacgttattatgacggaggaagcccttctgatatctgggctgtacgttcggccggaatcgatccggtgaccggacgggaaattttcatcaagaaagatggaactcagacttttgaattcgattataatgatgaggtcatcgtcggtaactcagatcctaagctggaaggtgtgatcggcagttcattctattggaaaggattgtcggcttcgataaatttccgttaccgggtaggtggacagatttttctgagtgctctgtacaataaagtagagaatatttctgatcaggacgtgtattataatcaggacaaacgagccctgtacgaccgttggcagaaacccggggatgtcgctaaatttaaagccatatctctgaatgaaaccactccgatgtcttcccgttttgttgccgatgagaatacattatcctgtgaatcggtttccatcgggtatgaaacccaggctcgctggctgaggcatttcggtgcttcttccatgactatacgcggatatatgaacgatattttccggatatctactgtaaaaaatgaacggggattggattatccttttgcccgtagtgtggctttttctttaggtataaggttttaatgctaaaaagattagattatgaatagaataaaaagaatatggatactggggcttttactgataggcgcttcatgtaattcctggttggatgtggctccggaggatcagattatggaaaaagacctgtttgaagaaagagaggggttcctgatagctttaaacggggtgtacctgaatatgaatagttcgtcgaattatggaggtaatttgtcggccggtataatcgatgtgatggctcagtattataattgtaccaccagtgagcacaattatagtggttaccagtcctatgcttatgatagtaagacgtcaaaagaccggttcgaaacggtatggaagaccacttattcccagatttcgaatttgaatgctatactggaacattgcggagacgggaatccggtgctgccggaactgtattataaattgatcaaaggcgaggcgttgggattacgtgctatgttacatttcgatatgctccggctgttcgggccactttggacggaaaaggagcaggcaagtataccttaccagacttcttcggaacggattgtcgaacctttgttaagcgcagacagcgtattaaactgtgtgcttaccgatttgacaagagctgctgatttattgaaggatgtcgatcctgttattaccgatggagccagaaattacagtggaggagaaaatggtaatgatcttttttaccggcaataccggatgaattactatgcagtgaaagctttgatggcaagggcgtatatgtggaaggaagattacagcaaggcaaaagaatgtgccattgaggtgattgaggaagtcgctgacgaaaagaatcctttgttccctttgtgtacagcaacttatgcagatacagcctccaatgataatatgtttgcgacagaggtattgttctctttgtacaatagtattcgtacagataatatttataagacctattttacctctgatctgaatgtggtgaatttactgactttggccggaggctatcagaatggccgtatccgtaccattttcgaatctcccgatgatttgcgttttaaaatgtgggaatctgtaacaaaggaaggaaaagagttttgttgtttcaagaagtatgcagaggtacagacgactaccgatgaagcaaaggccaaggcagagcgttttgcttatatggttcccctgatccgggtcagcgaactttatttgattgcggccgaatgtgtcggagtccgggaaaggcaggtcggtattgctttggaaaaatacctgaatcctttacgtaaagccagaaagtgtatcagcctgaatacagagtcgccgaccgatctgaatacggctatccggaatgagtatatccgggaatttatcggagaggggcaaaccttctattatttcaaacgcaatcggttggaaagtatacccgatggttcccagccggcagagacgttgacgatgcaactccggaattatgtggttccattacctgacagtgaaaccagtcaacgggaaaatcaaagtagttcaactgaaaaagagtaaattatgaaaaatattgtttatatagcgaccttattcctcatcattgccggtctgtccggatgtgaaaaagaaatcaaggatttcgacggagaggaaggagtttatttctatgtacaatggggaccggattggtttgataccacttattgggccgcccagccttatactaaagttgaatttattaaaaagggtgtagacgaactgcttctgaaaataagggtacaaatgaccggaagggtaaaagattatgaccggaaattccgtattgtagtcgatcaggatagtacgacagccgtaaaaggtgaaaattatctggaatttgatgaatggcaaaccataaagggaggctggagttatgcagatgtgccggtgactgtgaaaaatagtgaagcattggatgaagtggaacgtaatcttgtacttcgtttattgccatccgaagatttcaccctggctattccgcaatggttcgatttgagcggtatgttggggaatgatagcggcaaggaggaatttgacgggacacggcataagattatcctgaacaactttattacttgtccgaaagtttggatgggaagggagtccggtaaaatcggagatttggagggaggattgtggggattcttttcaaaggaaaaatttgaagaaatcctaaagcgttttccggagttgacttatgaagattttatgtccaatgaaacgatgccgtccggtttgaaatatgctatccaaaacaagatggctatggatttgcaggcattatatgacaagagccccgatcatcgtgatgcaatcagggagaaagatggacgactgatgtggtttcagggggtgagttggaaatcttattatggggttccgtttcaaccgggagaatgatagaattgaaatatactaaaatctgactacgatgagaaaattaatattgatattatgggcgggaattctatctgtttttagtatttcctgttatgatgacgagggatcgaatgattatcatccgatcaatgaagtaaaaatttccgattggaaaaaaggaggttatacggctatttttaagaacgatactttaaaaatcactccgctttcctatctggacaccgtacggaaagaacctgtgatacagtttacagaagacagtgatccttcgcgttatgaatacgaatggaaagtggtggccagcagtttgaccgatgaccgggataaaggaatcgttttgggtacggaacggaatctgaggtattttgtcaatttgaaacctgattcttatactttatatctgaaagtcaaagatacgaagaccgatttgatctggaaatcctatacctcactgactgttttgagtgtgacggataaaggtttttttgttcttggggaaaaagaggatggtacggtaggtttggatatgatctctacggcaaaagatacgattgtgttgaagaatctgttggaggggaatggactacctgaattacggggaccgatgcgggtcatgtataccggttcttattattgggaaactccggctatgaaactgtggatatccacagaatcaggatcctactatctggatttgacttcgtttgcttcaggaccgatgaataccttgcgttctatgacttattcaagtttcccgatgcctgatatgctgaatgtagtggatatggctgccaaacagcgttttaccggtatgtcaaataaccggattatgatgacggaagattatgtattcggagcgagtttgtactcggatgaaaattatggaaatccttccaaccgtatggatgtgatgagtgaaaaatgcttccggccttttccatatatttttaccagtataagcagtccgagtggttggattatttataatgccgacgatcattgttttacctttttgagtactgttaccgggttaagtgtaactcagttacaagataatgcaggagaagcatttccttggatacagccggcgggccgtacttgtatttatggtgagaatacatttaatacagtgggaggtagttcaaatggaaattcatttgcactgatggaagatcagcaaaatttctatgtctatcagttttattgcagtatccggagttgggtgccgagcgatatgcctcagaaaagagccggctatacgatagacaaatcgaaagcgaccggtttaagaagcggattgctttacgcttttgcttctaagcgttctttgttattgtatgctaacggacaaatattacatgcatatgattatgtgaatcatatgcattatgagaaagacctgggcgatcagattacctttatcaaatttgatccctatggaaataataacgatgagttgatggtaggtacctacaacgcggcagagaagggaattgtaacgcgttatcttttgggcactgaccaggattcgtttgaattggaacctttgaaagattgtcgttggaacggtttggtgaaagtgaaagatattgattaccggcaatagtttgagatcatatctatgaataaaaaagtgatcatatggatggccggaatcctgctgttgcctttgtgggtgtgtgcccagggggtaaatttccggccgctttcttatacggaagcgatagaacttgctgcgaaagagaacaagatggttttcattgacttttatacaacatggtgcggaccttgtaaacgaatgtcaaaagaggtttttccccagcaggaagtaggagaatatttcaaccgtacttttatttccctcaaattagatgcagagaaagaaaatgggttggaactggcaaagaaatatgccgtaaaggcttttcctacgtttgtggtattgagtccggatggtacggaggtattcaggacctccggctatcgcccggccgatgagtttgtggagaaaatccgcaaagggatcgatccccgatggtcacctgccggattgattaaacgctacgaaaaaggcgaacgtactcctcagttggttgatgattatgccacgttattattggaacaagggaagacaaatgagggattcggggtgatcaatgattattttaatcgcttatctgcccggaaaaaggtaaaaccggagaacttctttctatatgaacgctacaccctgaattttgatgaccccaaagcacagtatgtgtttgataacagggaacaatttgtcagggcaaacggaaaggagattgtagataaactgttgtattcatggttgcgcatccggttgattccctatttctcattgagaagcccggaacctgttactgctgaggggttgcagaaattgaaaacggatatcgaacaggtaaagcttacccatacccgtgcgatgccggatttattggccatagctgatgtccggatgggagggaatgtccgggaatatctggaaatatgtaaggaaaaattccctgttctggaagatcaggaccgttttctgattctattggatctggaggtggtaatgaccgaatctcaggaggttaaacaactggcagtcgatttattacgcagcaatatgcaggttgccgacgaattccatcagcgtattctgcggatgaagatgctggaattggaagggaagaaagattttactttgcaggcagaaatcgatgctgtagagaagggaaaagtgatcgtcatgggatggacaccccagggtatgctacaggatactttcgattttactgatcaccggatcaggttgaatatggctgcccgggatacttcccggttgacgctgaagcttttgtgtgaagaactggcttgtccggcaccccgcttgggtacctattatccgaatgtcagtctgatggtggtccctggtgaatatgctgttatgaaaatcagagctgaaaaagggaaagtaccggaaattgactggattagaggaggtactgtggcgcacgattactggcgtctttattacgagcaggttgatcctgctgaagcggcttaccgacagttgacaatgacaaatatgcttgaaggaggagatatccgcgattataaagaggagtttgacgcttatatgcaggccaacaaacaaaccataatggcgtttgtacgggcaaatccccgaagttatatctccctgatgaatttgctggaacattataattggtttgacgaaaacgaggccgaacggatatatgatcagcttcctcaggaattgcaaggtacagcttatgggaaaatactcaaacggaaattggatgccggccgcccttatcgtccgggcacaatagcacctgattttgtgaagaaggatatgaatggtaaagacgtttctttgaaaaagctgaaagggaaatatgtattgctcgatttctggggaagttggtgcggaccttgccgggcctcccatccccatttgaaagagttacataaaaaatatagcgggaaggtagtctttgtcaatgtggccgatgaaaatgtgaaggatctggagcaggctaaaaaattatggaaacaggcggtaaaagaagatggtatgacctggactcaaatcctcaacaatgaaggtaaggaggaacaggatctattgaaactttataatatcacttcttttcctactaagatactgatagatcccgaagggaaggtggttgcccggcttgtcggagcaacagctgatcctgaagaatttctgaaagcactttaaagtaagaaaacgggattctgaaatgataaaagctaattgagtaggagaaacgggattatttcccgtttcgacctctcaatcaagtaggtaaaaggagtttcaccaaatccctaagtaatgcgtctgccctgccctctcccgatgtccgacagaaacaaaccgctttcgcgctgttctgtctaaaatcttgtatgtattcttattttaaggaattacatatcttttggttcatttcccggatttttttctcgtttaccttgatttcttttctgtcataggtcatcagtccattgacttctccttcgacgtcagtaatctgggtatatacgccggcagagaatccccgggggatcaactgaagtaaatgttcggcatatttgatatactccgtcgtcacttcttccggattgttgaatttcacatatccccagtttctgtcgggcatccagaggtggtctttcatcaccagtccgatgccgccgtattctcctaatacggttgcccgcatcggatcgtagagatataaatcgggatccggataattgtgcaggtcgagaatatctccgcaggtgtagtgatttccaccgctggcaggattgaccagacgactcggatcataagcttttgtccaggctgcgatatcgggagttttgaattgtccccagcattcgttgaagggcacccatacccctacacaaggattggaatacagcaggtcgatgatttctttccattcccggcggtaattggcttccgattcggcggaatggaccatttctactcctttgaaatattgtctgctttgccattccggtcctctgtcgccattcggcatatcctgccatacgattacgcctaatttgtcgcaatgggtgtaccagcgtgccggttctacctttacatgcttacggatcatattatatccgaaatcttttactttcttgatgtcgtataccagggcttcgtcggtcggagcggtatataatccgtcgggccaccatccctgatccagcggaccgaagtggaaaacattccgattgttcagctgtaaacgggtaataccgtctgcgccttggcggatagaatatttccgcatggcagcgtagctgttcacttcgtcgatcacttttccattgtcggtcagagtcactttcatatcataaaggaaaggattttcaggactccataatctggcattctcgatcgccagctgaacgggctggccctgcatggcttttcccgtagctacgacctttcctccctccgatactactaccgaaacaacggcggaaggattgccggttgccgtatgggcttctacggtcaggatctttttatcgatatccggtgtcgttttcagccgggtgatgtggttggcggatacaggttccatccataccgtttgccagattccgctgaccggagtgtaccagataccgtccgggtgtttcacctgttttcctctcggttgataaccttcgtcgctcggatcccatacttttaccgtgatctggtttttccctttagctaaaaccggagtaatatcgaaagagaagggggtgtatcctccccggtgttgtcccattttaacgccgtttacccaaacatcggcttgccagtcgacagccccgaagtgcagcagtatgtttttgcctttccaggaggagggaacggtgaattcccggctataccacaattcgttttctttgcctaaagtcttcatcacacccgagaggctcgattctacggcaaatggtaccaatatctgaccgtccatgtctgccggttgctgagtacccgtcggacggatggcatattcccacaagccgttcaggtttttccattccttccgttccatgatcggtcggggatattccggaagtacattattcggatcgatttgctctgcccacgtggtttttattttatcgcccgcaggtttccattgtgcataccctgccaaactaacagccagagcaattgcagaaaataagatttttttcatagatatctgattgattaatttatttcgacggatcaaaaatacgtgctaacgtttgaaatcaaaggtgattattattcaaataaaggtaaattttaaccaaaattcctcctttgaccagaaattactcttttttgaatagtttgttttcagacaccttcttttgcacttcgctcttcttgctgatcctctcccattccgatactgagccggtagatgtcctctcctattttttagttacaacggtgaaagcttcacttctctaacctctgtaactgttaaaacgtagaattattccggtccttgttcgtcttcggtattcgtgttcggggacgcggtcgcttctgtcggtcatctagctttttctttcactgaccggcggaactcgcttcgctcagacaccaccggccgggcgttcagaaaaagcaagacgacactcgccggagctccaatggtccccgaacacgaatacctccgacttacgttatcactacctggcaagctaaaccggacctgaaaaccataaatttcagcgaaaaaagattttccggtaaagtaacccaattatccataatccgatagaggtgagccggtattttattctataaaatttttctaattcttcctttgccaggtcgtgttaacgtgagatgaaggtttttatgccggaagaccattggagcgggaacgagtgtccggttagggtttccgaacgcccgaccggtggtgtctgagcgaagcgagttccgccggtcagtgaaggaaagccttaacggaccggtccaggcgaaccggtctgacggtataaaaaccggaatcggaatagaaagaaaaaattatacctacgttttatgatgaactttataagctccgattctcttttttttcaaccctttttcttttctttgtatacttttttcccggtaaatatgaaaactgctttagctataacacgaactctgtccagacgttattatcctctgcatccggaggaacaggaagcacttgcttctataatggagtgtcgccgggtcgataaaggagaacttctcctcgaagaaggccggatagcccgccatttccattatgtcgaatcgggaatgttacgtcagtattactacaaaaacgggcatgatatcaccgaacatttttcgtgtgaagatgatttggtattttgcatcatcagcctgttcagacaagaacccacacgcttgatgatcgaagccatcgaaccgaccgtggtgtacgacatcccctataccggtctgcaagaattgtttgtttcttattcctctattgcccaattatacaagaaaattttagaatggggccttatggtatcccagaacaaagccgactcctggcgattcgaaactgccaaggaacgctataaacgttttctaaaagattttcccgaagcagccaaaagagcccctatcagccatatcgcttcttatctgttgatgactcccgaaaccctcagccgcgtgagggctgaaatcttccaggaataaattgtaagataggtgatcagtaaactttttctaagatagtaccagtcctcaagaaaccccatgccccggtcccatgggttacaaaaaaaaagagttagattttcatctaactccttgattttcaatttgtacccagggcgggaatcgaacccgcacgtctgttgaggacactggattttgagtccagcgcgtctaccaattccgccacctgggcaaagaactcgggtgcaaaggtagatattttcatataacctccaaagaaaagtagaattttttttgaatctttttgctaagttgctcgtataaaggatatattcttaatgttcaatactcatattttcttgaaaaattcctcattgaccggtaatcgatgggggattttttgtcagatgacgattcgtttgtgtacatttgccgacccgtcgggagaagagtttataaatagtaagatattttagagatgagatattggatcgtattatttttattttgtctgggtatcggaccagccgtccaggcacaaaataaaggtgtcgttaaaggacgagtcttcgatttggcgagcaatgaggcgatcccatttgcaaatgtcgtagtttatgggacgactctggggggagcgacggatgaggagggaagattccggttggaaaatgttcctccgggacttgtccgcttggaggtgagtagtatcggttatcagactttggtgacagtagggtttctgttgggtactgccggagagagaacggaaaatatcggtttggaacctgcatcgactactttggaacaggtcgtagtcaaagccagtccttaccgtaaaacagtagaaactccggtttccattcagcggataggaattgcggagattgaaaaaaatcccggaggcaaccgggatatttccaaagtagtacaatccatgccgggggtattgtcttcgcctgcattccggaatgattttgtagtccggggtggtgggcctgctgaaaaccggttttatctggacggagttgaattgcccatcttaaatcatttcgctactcagggggcttccggtggggtagtcagtattgtgaatatcgattttgtcaaagaggtaaatttcttttccggtgccttcccggcttcttatggtaatatgatgagttctatgctcgaatttcgacagatcgagggaaatcccgaccgggtgaagacgcgggttactttcggtgctaccgattacggcctgtctttggacggtccgttggctccaaagactacttttattgtttcggcccggcgaagttatctgaagatgttgttcggtatcatcggtttgccttttcttccggtgtataatgatatgcaattcaagacggtcacccgtttgaatgcccggaatgaatggactttgctcggtattggcggatacgatatcaaccgtctgaataccgacctgaagaatcccgacgatcatcagaaatatttgctcgattggttgccggaaagccggcaatggagttatactttgggaacgacctttaagcattacggcaataactggtatcactttttcgtcctaagccggagtggattgtacaataaggtcgagaaatacaccggcaatgaccgtcataatcccaaaacaatcgactatcgctctggagaatcggaaaataaattccgtttcgagcatcatcgttatgcagcgaatgggtttaaacttcaggttggggcaggtatcgaatatgcccactatgacaatactacggcccggcggctgttcgctgcgggagaagctatcgatcagtattattcccgggctttgaatatgtggaaatgggcggtcttcggccaggtgtcccggtcttttttctccgaacggctggctttatccctgggactccgggcggacggatgtaattataccggtaaaacagctgctctttaccggcaaatatcgccccgtttctcattttcttacgcattcgacgaacgctggtcgctaaatggcaatatcggccggtattatcagttgcctgcctatacgacgctgggttttgcagacgccgggggagttctggtgaataaacggaataagaccggatatatcggagccgatcattatgtactgggagttgagtatcgtccgggaacgactacccggattacactggaaggtttttacaagacttacgatcattatcccgtatccctgaccgattcggttgctttggccaataaaggtaccgactatgtggcggtgggtgacgaagcggttcgacccgtcggagaagggagagcttatgggctggaattgatgctcagaacccaggaattttatggtgtcgttgcttcgttggcttatacctggtattattccgaatttaaacagttggatgaaaatttgcagaatacccgtcgttatatacccagtagttgggataaccgccatatattctctctgacagcaacccgtaggataggtaaaagttgggatttggggtttaaatggagatatgtggcgggtgggccttatacgccttatgatcgggagacttcggcacggatagaagcttgggaggccaaacatcagccttattatgattattcgcgcttcaatacacagcgattaccggctttccatcaactggatgtcagggtggataagagttttttctttcgaaagtggtcgttgatattttatgcggacattcagaatatctataactataaagctttaggtcccgatgagctggtgcctgtcgaaaatcccgacggaagctatcgcaaagatcctgaccgggaaggttattatcagatgcgcagcataaaaaatgaattgggcggaacggttttaccctctgtcggggtaattgtagatttttaatccacttgccggatagatttttcagtgagcggataagttggtataagttttgtaactttagatatcgaaaataggtatgattgaaaaatgacaagtatatgaaaaatgtggtttttgatttgggtggagttgtggtcgattggagtcccgaacgtttgatggaagaatataccggtgatcgtgcaatgccggtgagtctgtttgaaagggggtttttccggaaattttggcccgattacgaccgggggacgatcgatcaggtgaatatcgttcgggaaatgagtgttttttcgggacgtccttatgccgaatgttgggattttgtcgaatttatcaaacattcgttgcgggatattccccaaacacaatgtctgattaaagagttggccggtaaaggttaccgtttattctgcctttccaatatgtccctggaattttatgactacctgaaagaacgggaggtctttcggtatttcgagggccagatcatctcggctcacgaaaaactgattaaacccgaaaaagagatttaccggatcctgatcgaccgttttcaggcataccccgaagatacgctctttatcgacgacctgaaggaaaatgtcgatgcggctcgtcaactgggtttccataccgtgcattttgccgataaggaaaaaggataccgggaaatcaataaaattctttgctctgagttttagtttttagtttccagtagtacctcccgcaaagcatgactccggtcagggtaagccctatcggatagccgatccagattcctgtgatgccccactcgagtacaaagccgcagatgtagcatacgggcatggcgatcaggaagtaaccgataaaggagatgacaaccatggagatcacatcgccgataccgcggagggaattggcataggtaatctgaagggcatccccgaattggtaggccagcaggatatagaccagggtggatacgacccggatgacttcttcggaggtggtgaatagatatccgatcagttcccgggaaaataagaacacagtacaggcacagacagcgagacaaagaatgaggtggaagcctgccatcgtcgtgcggcgcacatggagcagctcctgacggccgaaataattactcacccgtacagataccgctgctccgactccgtaatagatcataaaacctaaagtcgagatagccaccatcacctgatgggcggccagggcaatgcttcccagccaaccgatcataattcccgtaatactgaacagggcagtttccaggcccatctgtaaaccgaccatccagcccattttattgagtgagaggatatcggtgaaattgtatttaccccgtttgtaaccgaccagatagcggcggtaacggaggctgcggtaaaataagacggcgaaagctgcaaacatgaggatacgggccgttaaggtggaaatgcctgctcctacgacacccagggccggtagtccgaattttccgtagatcagtatataatttccggcaatattcaccagattggcggagatcatgatgtacatgggcgttttggtatccgtaataccgtcggcgaattgcttgaaagaattgaataacatgacgaataccagggaagccagctggagaagaaaataaggccggatcaacgggagtaattcttcaggctgtcctagccggtcgatattgaaccataccactgtcatcgccagggtcaggagcaagccgatgaagagatttaccaacagactgttgcgtagcagttgaccgacatgatatttgtcatgacggccgaaaaattgtccgaccaggggagtaagaccataagaaaaacccagaccgaaaagaatggggatattgaaggcactgttgacaaatgaagctgcagccaggtcgagagtggcatattgtcctaccatcatattatcggccaggcctaccaccacaataccgatttgtccgatgacaatggggatacccagacggatgagggctttgtaatgttctttatagggtgtgaaatagctcatgtcgcttagcatttataaagttcataaagtccgatggcctcagggacccgatagactgaattaaaatggtaacggataacgatatacctcttccatttgcaatgatactgtccagcagcagccgttccccggtcagcgtgtcgcttaccggaatatctttcacggttatgatctccccgttaaagtagtttacttttttatgacatccgcctaaaagaaacagtagggataactctcctgccaaagcttttgttttcaaagccatagctgttcttatggatatcttcatagactgttccggatttggattataaactgttttgataattgtcgcaaagctaatcaatttcttgcctgccggcaaatggatttcttgcttttacggatcgctttttagcatttgtcttttactttttgcatgctacttttttactttctgcctttttttcgtaccttgtccccgttgagataagtcccgactaagggtggagattggatgatgttttaaattatttgaattatgagaaaactcttaactacttttgtttgtgtatggtttaccctggcggtatgggccggagatgggatttatgaaaagttgcaacagataccacagattagtgagattcagaaactggatgtaaagccttttcaggagtattatcaattctggttcgagcagccggtcgatcattccgatcccgcgaaagggactttccggcaacgggtgttgctggggcataaacaatcggatgctccggtaatcgtcgagttggaaggctataatatctggtcgtcggaagaaggtgaattggctaatatcctgaaagggaatcagctgacgatagagcaccgttttttcgatcaaagtgtgccggaaggagggattccctgggaaaacctgaccatcaagcaggctgccgatgaccagcacgagattatacaggctatcaggcagaaaatttatccggcatcgaaatggatcagtaccggaatcagcaaaggagggcagacgacgatatttcaccgttatttttacccggccgatgtggatatcagtgtaccttatgtagctcccctgaatctggagtatgtagatccccgtttggataaattcctgaaccggttaggaacggcgaagagtggggtgaaagcgctttttaactgggaggatctgaatacctgtcattatacgatccgtgattttcagaccatgtgtttcgaacatctcgatacgctgcttcctatgctcgaggagttggctgccgaaaagaaatatacgtaccggatggtgggagggaccaaacgggccctgcagctgatgattctggaatatccttttgcgttttggcagtgggggaataattgtgccgatattcccgatcaggaaagtgccgattgggaggagatcttcgaatacctggtgaaagtgtcttcccctgatttttttgaagataagtacatcgtccgcatgcaaccgtttttttatgctgctttgaccgagatcgggatgtatgattataaaataaaaccgttcaagaaattcttacccgaagacgataaagatatcgacttttcgttcactatgcctgaaggtgttgaaaaaaagccttttaatgacaaacagatgaaggcgatcaacgaatggttgcagacggatgccgagcggattttgtttgtatacggcggaagtgatccctggtatgctaccggcgtcgatttgaagaaaaacggaaaatgccgtaaatacgtaagaggggatatgagccatgcttgccggattaaagatttcgatccggtgtcgaaagaagatttgctcgatacgctgaacgaatggatgcaagaaaaatgaaaagtgaaggtttggccggcctgacgacggtaagtgtcgattgggaagagccggctgtaattattctcgaccagacgcaattgcccagccgggaagcatatctccgcttatatactccggaggagatttgggaagccatttatcacctgaaggtgaggggtgccccggcgatcggagttgctgctgcctatggcatggcggtttgtgcacaacaattcggagaacagtctttttccggtttttttcaaaaatttacggaggtaaaaaaatacctggcttcttcacgtcctactgctgtaaatttatttatggctttggaccggatggaaaaatgtgttttgtcgttgcaggatcagcaggttgatacaataaaaataaaattgcagcaggaggcggaagctatccgggcagaggatgcggctgcttgccggagtatcggggaatggggattaagtgttttgcaaccgggcatgggactgctgactcattgtaatgccggacatctcgctgtttcagcatatggcacggctttggcccctgtttatttggggcaggagcgtggttatcattttaaagtgtatgcagatgaaacccgtccattgttacagggggcacgtttgactgcctttgaacttcagaaagcaggagtcgatgtcactttgatctgtgataatatggcttcctgtgtgatgggacagggaaaggtgcaggctgttttggtaggatgcgatcggatagcggctaatggagatgttgctaataaaataggtacttccggagttgctgttttagctaaatattatggaattcctttttacgtacttggaccgacttctacagttgatctaaaatgtccggatggggcacatattcccattgaagaacggcaagccggtgaaatcacagaaaaatggtatacccgacggatggcacctccggaaataaaggtgtataatcctgctttcgatgtgacccgtcatgaattgattacggcaatcattaccgaaaaagggattttatatcctccttttgatcgtgttctctctaaattgtagtgcttagtgcttcactgattactgctgtcgcacccagttggctgttcacatattccaatgccttttgtccggcggtttctgcaattgccggatgctgaatcaggctgtccaggatctccgggagttctgccccgttggaaatgctgaaagctccgccttcccggatcaggctgaccgcttcgttgaatttttgatatttgggtccgaaaattaccggtattccatacacggcagcttcaagggtattgtggataccgaccccgaaacctccgccgatataagcgatcttcccataccggtagatcgatgaaagcagaccgatacaatcgataatcaatacctccttatcggccaaatcggtattttccgaggtgtagcgggctaccttcttccggcatttgtccaaaatcgctttgatgtgattttccccgatttcgtgagggacgataatccatttataaccgtccggatggcagttgatatattccaggagaatttcttcatcgggtggccaggtgctgccgcagacgatggcggggcggccgtcacagaattgctctactttgacgatttgttttgcattttccgcgatctgttttacccggtcgaaacgggtatctcctgtcagtctgacattttttatgccgatggatttcagtaattccaccgattgcccgtcctgcacgaacaattctttgaagcatcccagcatccgccggtggagttttccccaacttttaaaaaaaggctggttgggacggaaaatggctgagatgagatataccgggatgtttcgtttgttcagttcgttcaggtagtggaaccagaattcatatttgataaagaccgctgcatccggacggaatttttcaatcaggcggaccgcattgcgtcgcgtatctcccggcagataaaggatgtaatctgcaccggtataatttttgcggatttcataacctgagggcgaaaaaaaggtaagcaggatttgagttgccggttctgcggccttcaaggcttcgatcaccgggcggccttgttcgaattcgcccaaagaagcggcatgaaaccacaccaaacgaccttctccccgttgtataccggctgcttttttccagacttcttttctgcctttacataaaagggctgctttttcattgaaaggagctgccaattgtatagccagatgatatgcctgaattccaatattatataagaatgccataacgatactttgaatataggccgcaaaattaataataaaacccgaatgatgcgcttttcttctttctgcttttttttaacctttaactttttacttttacctttttccttcctatctttgtcccgtcattgtggaaagatttggctgattgcaaccacagaaaaaaattgctaaaatgcatatacttctgaattcaaccatccattgcctttcccgtaatataattaaccgattggatattgattgcgtatagtacattttcaattttcaattttcaattttcaattaaattatgggatatttatttacttcagagtctgtatcggaagggcatcctgataaggttgccgatcagatttcggatgcagtgctcgaccggattctggcgttcgacccggaagcaaaagtagcctgtgaaactttggtgacaaccggacaaactgtcattgcaggcgagattaaaacaaagacttatgtagacgtgcagcaagtggcccgtgaagtgatcaatgagatcggctacaccaagagtgagtatatgttcgacggaaatagttgcggggtattttctgcgatccacgaacaatcgccggatatcaaccggggagtggtgcgtgaagatccgatggaacagggagccggtgatcaggggatgatgttcggttatgcctgtaacgagaccgataattatatgccgttgtccctggaattagcccatcttttactgaaagaattggctcaaatccggaaagagggtcagttgatgcaatatctgcgtcccgattcgaaatcacaggtgaccatcgaatacggtgatgaagggaaaccggtccgtatacatacgattgtcatttctacccagcatgacgatttcatcaagccggccaacgaaacgcccgaagcccagctgaaagccgacgaggctatggtggaatggatcagaaaagatatcgtcgatattctgctgccccgggtaaaggccctgttgccaaaacgggtacaggctttattcgataaaaatgtcattctttttgtcaacccgaccggtaaatttgtgatcggaggtcctcatggagatacagggctgacagggcgtaagattatcgtcgatacctacggggggaaaggagcccacggtgggggagctttctccggaaaagacccttcgaaagtcgatcggtctgctgcctatgctgcccgtcatatcgctaaaaatatggtagcagcggggatagccgacgagatcctgatccagatttcctatgcgatcggcgttgcccgtcctgtaggagtgtatgtgaatacttacggtacttcgaaagtcagtttaacggatgcagagattgccgggaaagtcagcgagattttcgaccttcgtccgagggctatcgaagaacgcttgaaattatgtaatccgatttatcaggagactgccagttatgggcacatgggacgcaaacccgaaatagtgaaaaaagtgttcacttcgaattattggcctacggttgagaaagaagtggaactttttacctgggaaaaactggactatgtcgatgagataaagcgggtattcaaggagtttaagaaaccacagccataagagaaggtgtccctggacattgaagttgtaatttgaactgtgtcagcgaagaaaaagaataaagtatggactttgctgacacagtttttcaaaagaatttggaatataaattggaaaatctattattaatcctttattttgttcggtaaaacgacggaagacactgtgagcgaacagaaagattttttgcagcgctttaacttgaaagacgaacaagcttatcataaactctttcagcaattttatagttaccttgtcctttttgcagaacgcagagtggaaaatcacaaggtggctgaagatatcgtgcaggaaatctttatcaatatctgggaaagtaacaaacaatacaattctatcaacggatttaaagcttatttgtacgaagccgtctcgaaccgttgtgcagattactggaaacaccgggcagtcgaagaaaaatacatggcacatgtgctttatgaacaaaaactacccgatttttcagtgcaagaggaagaaatattgcgggagttgtacgcagccatcggtgaattgccgcaacgtagccaggaggtcattcttttatctttagagggtaagaaaaatcaggaaatagcccaactgctgaatctgtctgtgcttactgtcaaaacccataagaaaaatgctttccgttatttaaaaaatcgactgcgaaatctggtgctgttagttatgattatgcagatttctaaaaaagatatcctgccataatgttccggctaaacggtaagttatgacaggatctgatgttttattcggcttaaagctctattattttacctgagccggcatcggaaggggtggtctgtccgatacggtatagtcggccggtagttcatattggtcatgttcgaaaaagtaattaaccaatccggtcatgccttgaggggagtattcatatacgttgagacggaacaaaagccattgtacgatagcatatcgcgaagcaacattgaaataaggtacgttgtttatcatacaactctcttcttcacaatgagaaacaaatgccttgttagcaatatcactgacacatccatagcctccgtcagcaggcttcaacacttcgctgtaacgagctgtgcttccactgacatatcggaaaaactgccaactcatctccggataagaagttatcagcctttcacttgttggtagtcctacattataacaatataacctgtaatttttataataagttattaaagttttatcttcagtagtaaacaactgttcggtagaccattcgtctcccagttttccgatagcgtgtccaccgacttcatgcagaaaaatgttggtgaatcctcccggtaattgaatatctctgttcaaagggacataactgattgtcctgtaatcagtatcatttctatcagtcgggtcgccgaaccaataagtcgagcctccataacgttcgtcattgaccaatacaatgacgacggaattcgtttgcagtatggcgtcattcattcccaatattttgcttgcataactgaaagccgttgtattatttccgatgatgcggttatcttcgttaaagtaactgaataatgctgtatttcctgactcggaagttccggccccgcgctcttgtgattcgcaagccactgaccaaacattgaaatattccttgtaagttttatagggttcgacagtaaataaggcctcacaagcttcttctaccgccaggtcgaatactcccgtttctgcaatcagatcatcggacgtaaagccatctcccagaaaaatcaggttaaagccgtttgtgagttcacgttctccctggtgtttttggacatttccgtctgcccggatccctccattctgggaagcggttaatttcattgtacgtacgccgtatttcaaacgaacggttgtcgatctttcttttttctggctattatccgtagttataaaaaccagttcggaatctcccgaacccatggtatctgcaacttgtaaccaacctgtcgtatcggcaatttctactttccaatccatattggtatgaattttcagggtatcgtagctaactcttttattgaaagccaacgatttcttgccgtccgtcacttcaaataccatcggttcctgacgcacagccaaacgcattacattgtctccgcaagttacttttacagccgttcctctttcgtatatgtcatccgacggactaacccggatgatcaacttttcttcggcttctccctgcttctcttccactgtacaccaatcggccatactctcggctttccatccggaaccggcagtcacgtcaatgacaacagtatcaccggccgctcttagtaaaagattatcatcagagaattgtaaaaagctatctaacgtatcgttatcgcatccggacaaagtccatagcattgtacagccgattgtaacaattcccatatataatcgatgtaagattttgtgtatcatatgctcgttattttccggtttttatattatttttccattgttccagtccttcattcatccgcctgatcagttcttcggcgggtatgtatccctgtgaagtatacacgatttctccctgaggatccagaatcagataagtcgggaatacacgaatgttccatttttgagccagttctttgccttcatctttttccatatcgattttaaggctgataaaacggggattgaaaaagtctccggcttgcttatccggaaagactttagagctcatcattttgcagggaccacaccaactggtgtaacaatcgacaaaaaccgctttgttttctttccgggcttttgccagggcttcctgcagaccacctgtttcaaaccgtattccttgatagtctgacaattcagttacaatttgacggtagcgttccagggttgaacctgtcattcctgccattctttctttcagataagcgattgcctgttttttttcagtctcgttcatatcttgcaaacgtcccaatgtagcgtcatatctgactttcaaggcttcattcggcaggttcgggaccatttttccccagaggtccagcatttccgaatactttttctgttgtctgaaatgcagaatcttacacatatccaacaattggtcccggttaagtgaagtaaattccaggtgaccggctttttgttctatttctgaaatgaaatccatatcatatactttttcaaacatcatgtaaggataaacttgatgaaaaagtacctgtactataaaattcagtactttctctccgtttttctccaccaactcatttctgtggtcatagataaaacggaaccattcgctgtcatatcttttccccttattccaaaggatttcccacgactgtggcaaatagagaccggcagaatcgatatgctccaaataatagtcagctacttcctgaaatttctcattttcgtctgccgttttcaatgtgccggcataggctgctaaaaatttaaatgaccggtcacctttttcataatgccgggtcattcccgccaatgaggtttttggattcaggcctgctttcaatttttctttaaattcaggagctttggctcctccggaaatccggtgtatgatttctcctttttcatccaaaatcagataatgggcataaaactttaccctgtaacgttctgccagtttgcgtccctcttgggttttgggcatatccacacgtaaactgacgaaatgtttctgaataaacgaaaccaaatcgggatctgtcagtacgacagagtccatcagtaccgaaggaccggcccatccggcataacaattgaaaaaaatcggtttatgtttccgggcggcctgttgcatggcctcttccaaagtagtacaatactggatacgtttgttcttttcttctttagcccacactgtcgaaacaagcagacaaaaaacaatcaggaatatatttttcatatgagtttggttttttctattttactaatcgaacactataagaggggcgtacattttcagttgtactgattaaacggcttgtcatgcgccggattccggaatgatacagggatatgttacggacgattccgttagataaactgtccgatattacaatctgatcactgctccagaagtaagcaccttcatttttatacacataacgggaattgtaggctgttgacaaggcatatacggcagctccgccatacaaggcatcaaatccgattccttgttctcctgttttcaatagctcacctgcgtggcctctccaattttccaggccctccaattctccggcatccattcccaaatgacgttccagcatcatccattccgcgtcagtgggcaaatgaaatccttccggagctccttcttttacggcttttaaagctccttcatacgaatacaggtaaccgaaacgtgtcaggtaatcctggtcgaccttaaaataataatttacagcatcattccatatggccatcaattcatctttaatatcatcgtgcatattataagacaggaggttaggaatggtgtagttgcctacttgtgtcacaatccagtctactccgtagggactgctcgtattcaaacggcctgcctcatcggcagccaaaagctgttcgcgcagatagagcagaaatttccgaccggaataattccggcaaaaagtttggtaactattcatatttgtaccttccaatatggcacgctcagtgcctccgtatgattctccgtaagtcaccagatcggcagctgtagcttcgtccggacggtaacggaaattttctgccagccaggtctggtttcctatggtcagggttttataaacatttcctcctttatccgttaccgtaccgtaggtaatcccttccggcttcgggatcacagtcgtctcatcgtcatcctgacaagccagtcctgtcaataccagccctagcagacaacaaaaatattcgatctttttcatatacaattcagtattataattcaacacctaactcgtcccggatgatggcatacaggatttcatatttcttaatcacaagcggggaactttcccagcgttccagaaattgtttccggggatatttcatcatctcctccaggtaaagttccagatcaacatctgtatttctaggcgtaaaacggtttccataccccggatcatagctgacaaaccccaatgttccgactaatccccggcaatagagggcataattatcaaattcttcatccgtccagactccttccggccaattcggattggtaacatttccataggtcatcatctctttccggtaactgctgtcctgttcccattcttccactagcggccaaggaaaccaaatctgtaaactggccgaacttctccaataaggaatacgttcgtccgggtaaaactccccccaatttttatcatatagactttcatccaacatattattgaaagcattcagttcgtcactataattctgaacctttagtttcacgatttcattccggtaaccggcggctttttccagcatatcctcttcgtttatctgatttatccaggaaaacatcaggttccggtaacggctgattatttctttttgttccactcctgcagaagatagttgataacatttttctgtcagccacaatgcatatggataaagtgcctgttggctgtttttcagaaaaatttccgcaaaacgtaaagatttcatcatcagtccgggatcggtcagccgggtcacctgataggtgaccgatccgctgtttgtcccgctgaatgcccagttcagatccagggtttcataacggaaaaccgaatctccgttaacatctgttttcacaaacacttttccgatggtatcgttaaaaaagaccggaaccccataagtggtatacagttcataccgtttgtgctgaatggaatcgttcggatcatcctggatcgtatacagattttcaaatccggttccgggggttatcccgtcctctttctggcaagccagcagcaggcaggccagcagcatatataatcctatttttttcatacttttgttttattgattgtcaactattcgtcatcgcccagcggagaacgtttgtttctcggattttccggcatttgttcttcgtcgtattccaatacagatttcggaatctgcatcacataagccggatcatttttctccaatacataaatatcggtatggtcccattcgtatttattaccgtcgtatacattaaatgcatgccggatttgtttgctataaggatatttttcacataccgcataacgtctcaggtcgaaccagcgatgtccttcgaaacagagttccctgcggcgttccagccgaatttcttccaccagtttttctccggtataagttgtatgtacataattccggattctgctttcgcggagtaaccgcagatactggttggccccctggaaattatcttccatggcgtatgcttcagccaggttcagatatccttcggcaatccgtaacgtgtaaatatcggatacgtgtggaactgcgatcgtatcgtatttccattgtaatgaattggcagaagtactctggttctttccgaaaaaataccggcggtaatcattctcttggtcatacaattgtaccaagctgtcagatactgcaaaatcacctctgtttccggtcattccattgtaaaaattcatagaaccctgagagaaaagaacttccgtattgtcttccgacaggaatattctggcagaatcccgggcggacatgtggtaaagccgcgtatcttctttcaacagctcttcagctgtcagagctgcattatgccagtcctgcatataaagatatacccggctgagcaataattgtgcagcttctttggaagccctgtgtaaggggcgtttttgcagactttccgtcaaataatttaccgctgtcttcaaatcctctacgatttgttcatatatttttgcgacgggagtacgttcaaactgggttttcttatctttgtcgtgttctacatattccgttaatttcaaaggaactccgtagtccgtagccgaagtagccttattataggctttcccgtacagattgaccagagtgaaataaagggaggcccgtataaaatgacactctcctttcacccggatccgatccagttcttcagatggagaactgacagagatgtcgtcgatttccttcagaataacattcatcacattgatgcgccggtaaaaatcgagccaggtctgactgtcatcccgtaatacatctcccgtgggattacgtcctacttctaattgccaggcataatagccgaacagatttacactacaatccggccaaaagaaaacggctagtccgcttcctcccaccgtagtgacatcgtcatccatgatattcaggaaaccggcatgatccgttgaaatataagctctgttttgggcaggtaagtatccgtcccccaacaatacttcatcgaaatgagagacttttttggcaaccgtctgcgattgcgaatactcttccaggaaattatcgcatccggaacaaaacaaggcgactacaattccgtatattatttttttcatatccatcatttttatcagaatgaaacatttagtcctatcgtataattcggacgtaccgaaagattcggtttagcaaatccggcttgtgaagggtcctggcctttcagggccttggcggagatggtaaacagattctgtgtactgaaagaaactgaagcggaagaaaacggagtctttttcagcaatttgggttgtaaggaataacgtaaagtcagtgtctgcattttcagataattaccgctgactacccggatgtcggaattgtcatacatatcccagaggttataggcaaaagttttggttttattactttgctcctgcgaccaatggcggttatagtaatcgtacatctcgtccgaacgattgataatggccggaatacgggtacgtttttcatctccgggcacttgccaacggttgacaaactctttccgtacattattttccgcactgactcccgaaatgatcggttcgtacagagcgaacagacgcactttggaacccagactataggccaggttgaaggataaagtgattcctctccaggtaaatgtattgaaaagattaccactaaagaccggttcccgggtcccgctcttcgtcatcaccatacggactacatcttccagacttttgtcttccagtaaatgccggcggtcggtatagtcatcgaataccggtgttccgttttgtgcgttcaatcccaaaaattcataggagtaaaacgtaccgacggattctccgctaatgatagccgtacctgccagataatcttccagttcgtatttttcgacggcatccgtttgtgtcttgttcttattcgctgaataactggtagaaattctccaggcaaaatcattgattttaactggagttgccgacaaagtgaccgaataaccgacatttttcaaactcccgttattcatcagataagaagtcaatccattggtaggagctacatttacccaagagaagacattttcagtctttttgtagtaaaaatctccaccgatattcaggcgtccgttaaaaaagctcatatccaatccgatattggtttgcttcgtttcttcccatttcaggttggggttcgggaactgatatacattggagacgttctcgttgtaataagaatttatcggttgttgagtgatcagcatattcggagtctggccgtccagcatatttccctgcataccgtaagacatgcgtaagcgcatttcagacaaccaggaagcctctttcaggaaagtttcctgtatattccacatgccggataccgaccataccggcaataaacgttcgttactccggcttccgaatttattggaagcatccgtacgtccgtttacattcaatgtaaaatattcccgataaccataagtcagggataagtataaactcaactgattggtcaatccccgggttagggtcaggtgattttgctggagccattccttatataaagggtagtcgtcgaggttcagcgaactcatatcggcaaactgcatccctctttctttcaaatagcctctcacttcattattcatcgatttggaacgtagcatattaacctcatatcctaacagggctgtaatcaaatgctggtcatcttctccgaacagtttacggtaattggattgtaaacggaatgtcagattttccgtatctgaattcttggttttcaaaatacctccatagggaagaatacattttccgtcatctcccggtatcggtttatcttcgtattccccgtttttcaaagcagcgacataggctgttttatcgccccaccaatcttcttgtaaggtgctgctgacagaatatgaaccggtagctgtgacatcccaggtgggcagaatgttgtatttcaggtttaaatcgacctgaatacccttaccgtcatatccgctggagctgttgtcaatttcgttgacaatattataatgcaggtatttatttccctgtcctccgtatcctcctctataacgttcgtaataaaacagggaaccatcttcgttgaaacaaggtaatgcccgggtcgtattgtaagcataatccatcgcatcaagggtggagaccaggtggtttttcttttgtacattaccgttcagtttgattgccatcagcattttggaagtcatctgtacatccattttggcagttacggtgtatctttccgtataagttgtattggaaaccccgttatcccggtcgtatcccagggaagcataatagcgaacgatatccgaacctccgcttacattcaacgtatgggaatgggaatacgcatcccgggtcagaatatcgaaccaatcggtattgacctgttcgtaccaggttacctcgttgaggaaggtatcgtagtctgtcagaccgctctgtaaacgataaagagcaccttcgtatcctaccatcggcatttgggtaggaaatatataatgctggtctgccagttctttcccgaatcgtacccgttcctgagaattcatcagattgatattccggtcggtatagcgtgggcggcgggtgattttagaagagtgtgtataagaaagaaccggttttccgatccgtccttttttggtagttactacaatcactccgttcgctgcacgtgttccgtataaagccgtggcagaagcgtctttcaacacatcgatccgttcgatgtcctgaggattgataccggcaatggcattaccgataatattcagataatcgggattattcaaatcgtcgggatcgacatcgacagggtctgtcatcacgataccgtccaatacccacagaggctcccggtttcccagcaaagtagaagttccccggacacgtaaacggggagtagctcccacttctccggaattcagcataaaggtcatttcaggaatacgtccttccagcatctggtcaatgctcgttacccccggaatcataatatcctctgctttaaccgttgtaatggcactggtctgggtccgtttatccagtacctggtaaccggtcactaccacctcgtccaattccttctgatcttcgtaaaggatcacatcgatctctttctgaccggcatattttacagaagttgtctgcatgccgacaaaagaaaattccaatacaatctgtgccttgtttttgggataactgaaccggaatttgccattagcatcggtggaagttccgaaacttgttccggagatcttcaccgttactcccggtagtggcattttttgaatatcggtaactgttccggtaagcagaacggtttcctgctcctgggcttgtggtatagctgtggtttccggaccagcctgggatatcagaatcagatcctcctgaatcttccaggtcagaccggtcccggtcaaaatacgatccaataaactcgtcacgctctcattatgggcttctacagaaatctgtcccaattgttcggtttgttcggtgttgtaaataaaactcaaacgggtttgccgctgaatttcattcaacacctgtctgaccgtagcctgcctgaaatttaaagttacccgctcgtgttgtgcaaaagcagcggcagatacagaaaaagtcagggcacacatcaatactgaaaacatttttgttatcttccagcttttcctccaatatccccggggaacctggaaacaccatcgactttttttcataaatttgtaattaagttgatatctagcgtattagaattatttgtccgttcatccggaattccactcctgtcacgtcggtaatggccgacaaaatcgtttctatccgctcataacgtttgatatgaccggaaaagtgaagagtccggcttcgttttcctacaaaaagaaactctttatcgtaccatagcgacagggtgtgcatgatctcttccaggggttcgtcttcaaaaacgaaatatccctctttccaggaaatataggaagtgacatccacttcctttaaagtaacctctgtcgtggtgcggtcaaagtcagctaattctccgggtttcatccggatttctttttgatcaccccattcaagcgctacagcaccttcgaccagtacggtccttaccccacgggtgtagtgggtattcacattgaacaccgttcccagtacccggactttaacctcttctgtttctacatagaaagggcggtttttatcgggagccacttcgaaataagcttcccctttcagatatacccgtctttcttttgcatggaatgcaaccggatattttaattcggtcgctgcattcagccacacccgtgtaccatctggcaatactatccaatactcgctcccccggggtacttcgatacgattatacttattttcttcttgccgggctgtcgtatcataaatcaatccccctcctgcctggtatgcttttacttcctcattcacatatatttctgtttgttcttccggatccaactgatatttttctccgttatctaatgtcaaaaccggatttaaacgggccactgtagcctgtttatttttcatttcctctttccaggtataccacaaggttatggataataaaacgggtagtaccactgcggcatatttcaaccacttcggtcttatacgcggacggacaggaggagctccgaacgtcttttccctcacttttttccaggcatcttctacatcggtctgtaaataatttcttatttcatttatactcaattgcttttttattttacaaaaaagtaaccggtgttcttccgattcattgatccaatcttccaatttccctttttcttccggagaaagtccgccaaccaaatcaagttgtatcagacggcgtatgtaattattgtcgtattccaacattctataagatttgctaattttactctatatatacgatgagggggacgaaaggaggtagcagatttttttattttttaatgtaaatatacggttacccatatatagcaaaagcattcttgctgatattcaacaaaaaaaacgagatccgttttattggatcccgtttttgctattgggaattaatcttgataaaattgtcgcatgaagcaattggtcaatctcttctgtttaaatagatcatgatgtaataaagcaaggtggccagtgaagagagagctgcaatcacataagtataggctgcccatttcaaagcatcgaaagcatatccctgggtttgataatccgtgattccggaattgcgcagccaggctaatgcgcggtgactggcatcgatctctaccggtaaggtaacgaaactgaataaggtcataatggcaaaaagcccgatcccgaccagcaatagtcccggaaaactgttcaccatcaggataccggccagcaaaatccattgcacccaatgggaagcgaactctactgccggcaccaacgttgaccgtagcttaagcatactgtatcctttggcgtgctgcagggcgtggcccgtttcgtgggcagctacggctgcagcggcgatactgtttccgtaatagacatcccggctgaggttgatggttttattcaccggattgtagtgatcggtcagcatcccttccacagaaccgattttaacgcctgtcactccattatcccgcaacattttttccactacatctcttccggtcataccgtttgctgtgggtattttcgaatatttctgaaaccggcttttcagttgatgactgatcagccagctaataactgtgaagccgatgaatataacccatatccaaagactacctccaaacattgttgtattttccattttttatttatcgattgatatttatctttttcttctgtgcaaaaaatgcgccaaagtttttattgtatacgcctgatatcgcttttcctgcatttgttttttaataattaacaaatactgacaaaatcgtatacagacacggtacatttcttatctcgttttttagccggaaaaaaggaagaaataacaatggttattttaactaaggaaaagttgattttgttaaatttgaaccaaggtttctttgattttagaaaaattctgtttaatttgtgaaccgatttaaaacgattgagtcgacatttttgacgaataacctaaaattaattaccatgaaaacctacaatccgaatgaaatcaagaatatcgctcttgtaggcagtgctggttccggtaagaccacacttgctgaagcgatgatgtatgagggcggggtcatcccgcgcagaggtagcgtaagtgctaaaaacacttcctctgactataggcctgtggagcaggagtatggttcttctgtttttccggcagtattatataccgaatggaaagatcagaaactgaactttatcgatactccgggggctgatgattttgtcggtggagttatctctgcgctgaatgtagccgacacggcggtgatggttgtcaatgctgtcaagggtgttgaagtagggaccgaaattattagccggcatgtccggaatttaaataaaccgatgatttttgtcatcaaccagctggatcatgaaaaagctaatttcgaacaaacgcttgaacatgcacaggcttctttcggaaagaaagtggtactggtacaatatccggtcaatcaggggctcggtttcaatcaggtggtggatgtcctgaaaatggagatgtatcagtggaaaccggaggggggtaaacccgatgtattgccgatcccggagtcggagaaagagaaagccgacgaattgcataatgccctgatcgaggcggctgccgaaaacgatgaagggttgatggagctttattttgagaaagggagcttgtcggaagacgaaatgcgcgccggtatccggaaagggttgatcgcccgtgatatgttccctgtgttctgtgtgtcggccgaaaaagatatgtgtgtacggcgttttatggaattcctggtgaacgtggctccgagtgcggctgccatgccgggaatgcttacgaaagacggtcgtctggtgccttatgaagtgaacggcccggcttcggcttttgtattcagtacgactatcgagcagcatctgggagatatcaactattttaaagttgtttccggtacggtgaaagaaggggatgatttgatcaatatgactaccggtactaaagaacgtattgcacagttgtatgctgtagccggtaaaaaccggacgaaagtgacggaactccgggccggtgacctcggagcgaccgtgaaactgaaaggaacgagaaacggggataccctgaatgagaaagattgtgattatgtatttcccggaatcaaatatccgaattcccgtttccgtacagctgtccgggcagtgaataagggcgacgaggagaaaatggccgaagtgctttatcggatgcacgaagaggatccttctttgttggtggaatactccaaagaattgaagcaaatgatcctttcgggccagggagaatttcatttgaatacgatgaaatggcggatcgaacacaacgataagattcaaattgaattttatgctccgaagattccttatcgggaaaccattacgaaatatgcccaggccgattaccggcataagaagcaatccggaggagccggacaattcggggaagtacatatggtcatcgaaccctatgaagaaggaatgcccgagccgacgacttataagatcggtggtgtggacagcaagatgtcgatcaaaggaaaagaagaatatgatttgccgtggggaggtaaattggtgttttacaactgtattgtaggtggagtgatcgaagcccgttttatgccggctattctgaaaggtattatggaaaaaatggaagaagggccgttgacgggttcgtatgcccgggatattcgcgtatgtatttacgatggtaagatgcacccggtagattccaatgaaatttctttccgtttggcaggacgtcatgcctttagcgaggctttccggaaagccaatccgaagattctggaaccgatttatgatgtcgaagtgctggtgcccgatgaagatatgggagatgtgatgggtgatttgcaaacccgccgggctatgattatggggatggatgccgatagcggttttcagaagatcaaagccaaagtgccgttgaaggaaatgcagcgttattctactgctctgagttccattaccggtggacgggccactttcacaatgaattttgcaggctatgaaaaagtaccgtctgaagtacaggaggaattgttgaaagcttatcaggaaacagatgacgatgaataatttttggtgaattatacggaaaggaaaggttgttgctaaatgattttgcatatttgtttaaacatcttatacatcgtttgttcgattggctattttagttcaactttaatgtaattcagcttaatgtcagcctattcgccgtaggctgacattttttaatgcaatttgcaaatcaactttggtacattaaagtatatagatgcgaaattaatttatggacgtcatgttacatatctaaaacgttttaagagcttttactatggataatatttgcagattattgtattttatttgccaagtagtttaaaattgtctgttcttattatttggatagtgaagtgggttagggaggaattgtttaaaaaatgaataaaaaacaggtaaatggctaatggaataatgtattttttaattttgtttgtggtgaattgtaaggatagggatagttgaattaattcgtggatgatggaacagcaatttcaatattacgcttttatcagctataaacgggaagatgagaaatgggctaaatggttacaggatcggttaagatggtataagttaccttcgaaattatgtagacaaatcacccggttgcctaaaaaagtatggcctgttttcagggataatacggatctcgacagtgggagactggaagaaaatataagacatgaactcgagcgttcacattatcttattgtgatatgttcacctgaagcagcgcgttcgccctgggtcggaaaggaagtgaaatatttcgctacacttcacggagcagataagatcatcccttttgtcgtttcagggattccctacagtaatgacatcgagacagaatgtatccatgaacagataaaggcgataagccaggaagaattattggctataaatgtcagggaagaagggatcggttcatttgcgatgaagaaaaaaagggcttttatccgcgttgtcgcccgtttgttggatataaagttcaataccttatggcagccttatgaacgtattctgaggattcgtaaatggagtacaggaatcggagttgtttttattcttattcgttttattcatcttgtgggactattaccggactaaaaatgaatattttgctgattatgtggatagatggggaataccggaaggggtggttgagttaagtgcggaacaggtaaaaaaaagaagtacacattatcgtttcgaatatacccaccgtagtatattggggaaaggaaagggcacgctgaaaagagttgtttttgccaattctgccggttttcctatagagcacaattttagtgaatatgtcgatcgttcttctattcaacagatagaaagccgaaaagatagacggggacaatctgtcattgagattgaatatcaaaattccaaacaaaagcctttgattgttgcctatattgccggggacagtttgcaatatgtagatctgaaatcattggataagggaatgggtatcggacttacaagttcttttacttctatcacttcgaatgcatttgaaagtatgtttagtaattcgaaatctgaaatccggcggtatcgtttaatcagggaccggcaaggtttcattatacgtaagttatttaaaaaatataacggtaacgacgatatcgctgcttgtgatgcaaagggaatttatggctttgattatctcctggattctatcggaaggccccggttggtcagatttatcgggtttgaaggttttaactttcccaataatatggggatagcttctaagaaatataattatgacgaatatggtaatatttcggtaatcgcttatctcgatccggcaggtaatcctgttttgaatgaacagcggtgggcgacttataccagaaaatgtgatgagaacggtaatattgtaaaaggtgtatatctgggaatagaccaaaaggtttgtccgttaagtaatgatgggggaataatcgggaaagaatacgatgaacatgggaatagtattaccgaatcgatttttgataaagacggtcagcttgcctggggacgggaaggggtggcaagatgtgttgcaaagtacaataagcaaggaagaatcatcgaaacggcaaattatgggacagacggtaatttgtgttttaataagaagaaaaaccctgtttgaataataaaggatatgcgaaagtttcttatggatacgatgagtggggaaatgtaacggagattcagtttttgggggtggatggaaaaccatgtaccgattcgagtggagtggcccggtgtgtgatgaggtatgacgaacggggaaataagatagaggaagctacttccgatacggaaggaaccccctgtttaaatgcccagggggcagctaaaatgactgctgtatgtgatagttggggaaatgtaacggagatgacttattgggggacggatggtaggttaggtctgaataaggaaggtttcgccaagttgaattttaagtatgatgagcgtggttttcgggaagaaacggcttactttgatgtgaataataagttgtgtatgcgtacaggtggctatgcaaaagtgcttgaaaaatacgatccccgcggaaattgtaccgaagtggcttatcgggatgaaaatgatagaccctgtctgctgaaagatggttatgcaaagttgtcttttcagtacgacgaccgggggaatgtggtaaaacaggtgtatttcggtacggacgataaaccctgtataaataccggcggttttactgctatttcccaaaaatataatgaaaaagggatgattaccgaggtcgctttttgggatatagccgaaaagccctgtttggtgaacggttattttatggagaagactgagtttgacgattggggtagaataatagaaaagaaatatttagatactgaaaataagttatgtaaaggtggatatggatttgcaagaatgacggtagagtatgatcgtacaggtaattcgacagtcagagtatttgacgaaaataatcatgaaacgatgaaaaaatcgcttcatgtgaatgaaataatacaatgaaattaattcaatattcaggttggtaagaatttgtttgatggttgaaaacatgtagttttgtcggataaatttaatcgttgttatgcatttattttatacgccggatatcgaaggggatatttatacgttgaatgcggatgaatccagacattgtgtacgggtattgaggttgggggccggagaagcggtttcgttggtggatgggaaaggaacttggtatgagggagttatcgaacgggcggaagtgcggggatgtgaaatcaggattacggatcggcgggaactatacggccggcgcaattttcacctgcatttggctgtggctccgacgaagaatatagaccgcatcgaatggatgctggaaaaatgtaccgagatggggatcgatgagattaccttattgcatgcagctcattccgaacggaaggttgtgaaagaagaacggctggaaaaagtgattgtggcggcgatgaaacagtctttgaaagcctatttgccccggctgaatccgatgaccgatttccggcagttggttacttcttgccgggagccccataaatttatcgcccactgtaatgaaggggataaaaaacgcttggatgaagtgtatcggccgggggaagatgtggttatactgatcggacctgaaggagatttttcggaagaagaagtggtattggcccggcaccacggttttgtgcctgtgactttagggacgagccggttgcgaaccgagacggcggggattgtggcttgccatagtatcgattttatgaatcgcgtttaaatctgaacatatggaacatctttggaaagtggtgtttttgatcgttttgtttgtgtttgtgcctcgctggttgtggagccaggaaactaaaacgaaactggctctgttgaaatataaaggaggaggcgattggtatgccaatccgacttctctgcctaatctgatccgtttctgtaacgataaattaggaacggatctggctaaagagccggccactgtcgaaccgggaagccgggatattttcaattatccctatgtgcatatgacggggcatggaaatgttgtttttacagaggtggaagcccataatctccgggagtatttgttggggggtggttttttacatgcagacgataattatgggttggctcaggccttccggcgggaaatgaaaaaagtgtttcctgaggatgaattggttgagattccctgggaacatccgatttttaatcagaaatataaattttcgcagggattgcccaaaattcatgagcacgatgcgaaacggccgcaagctttgggcatcgtaaaagagggaagattggtggttttatttactctcgaaaccgacctgggagatggctgggaagaccctgaagtgcataacgatcctgaaaacaggcggcaggaagccttgcggatgggggcgaatattatttcttatgtgttttccaactgaaaaaaggttaaaataagagataattattcttcgggttctttcagtaaatttttccggtattcggcgggcaggatgtaagtgtatgtcggagacggacagtcgcgttattttactactggttttgagattgcggtaacgattataggagatgcgtgtatattggaggaataatgtaaaggacttgtctttactttatcgggattattttgttttgggagacttgcaaggaatggtcttccggcataaaacccttcatttcacggcagagctaatcggccaagaaaatataagcggaaatttgcagcaatagaaagttggactctccggattatttccagtgagaataatctttcttaaatcaagactaatctacgattcagtaataacgttaggcggaggtgttcgtgttcggggacccggtctgacagtataaaacccggataaattgtcgggccggatcaaggaagacagtaggccggtcattttgttctattggtttaaaggctgtcgttttgtcttgaatatttgcattgattgtgtcaatttgacaaaataatgataaaaaatttgctgaaacctttcattcggagaatcggtataagatttgtaatcctctataagtgaaaggagagatagacaatgaatacaaataattatacgatcaagtcgcaggaggctttgcaaaatgcagtgcagcttgcgcagagtaaagggcaacaggccatcgagaccgggcatttattgaaagccgtgatcaatggcggtgagaatgttactcattttattttcaataaactgggcgtcaatagccataatctgttatcggcactcgaccggattatcgatagctatcccagggtttcgggcggagaagtatacttatcgccggatagtaacaaagcgctggagaaggcgacccgtttggcgaaagacatgggtgaccagtatatttcgctggaacacatcttattgggattactggataaccgggatcaggtggctcaattgttgaaagatagcggtttgacagagaaagagaccaaagaagcgattgcggagcttcggaaaggatcgaaagtcaactctcaatcggcagaagagagttatgatgccttggggcggtatgctataaatttgaacgaacgtgcacggaacggtaaattagatccggtgatcgggcgggacgatgagatacggcgggtgttgcagattttatcacgccgtacgaagaataatccgatactgatcggtgaaccgggtgtaggtaaaacagcgattgccgaaggattggcacagcgtattgtgaatggggatgtcccttccaatctggcttcgaaacagattttttcgctggatatgggtgcattgatcgccggagctaaatataaaggtgaattcgaagagcgtttgaaggcagtggtcaacgaagtgctggcttccgaaggcgagattatcttatttatcgatgagattcatactttggtcggagccggaaagtcggaaggtgctatggatgctgccaatattttgaaaccggctttggcacgtggtgatctgagagctatcggagcgacgaccctgaatgaatatcagaagtatttcgaacaggacaaagcgttggagcgtcgtttccagaaggtgatgatcgacgaaccggatgtgatgagtgctatcagtattatgagggggctgaaagagaaatatgaaaatcaccataaggtgagaattaccgacgatgcgattatcgcttcagtggaattgtcccaccggtatatttccgatcgtttcctcccggataaggctatcgacctggtcgatgaggctgcagccaaattgcggctagagatgaattcggtgccggaagaaatcgatgaactcgaccggaagatccagcaattggaaatcgagaaggaagctctgaaacgggaaggaaccagcaaaaaattgtcggatatccagaaagaattggccgatttgaacgatgaacgtacaaaactcagggcacaatgggagtctgagcgttctctgattgatgagatacagaaaaataaggatgctatcgaacagtataaattcgaagcaagtcgtgcagagcgggagggtgactatggtaaggtggccgaattgcgttacggtaaaatcaaggaagccgaacaacggatcgaggtggttaagaaaaaattagccgatatgaaacatggtgaatccctgatccgtgaagaggtgacctccgacgatatcgctgctgtagtttcgaaatggacaggtattccagtcaaccggatgatgcaaagtgagcggacgaagttattacatttggaagaggaattgcataagcgggtagtggggcaagaagtggctatcgctgctttggccgatgctgtccggcgaaatagggcagggttacaggatgcccgtcggccgatcgggtcatttatcttcctgggaactaccggagtgggtaaaaccgagttagcgaaggcattggcagagtttttattcgacgatgagacgcagatgacccgtatcgatatgtcggaataccaggagaaacactctgtatcccgattgatcggagctcctccgggatatatcggatatgacgaaggtggacagttgaccgaagcagtacggcggaaaccttattcggtggtgttgttggatgagatcgagaaagcacatcccgatgtgttcaatatcctgctgcaagtgctcgacgatggtcgtttgaccgataataaaggacgtactgtagattttaaaaataccattgttatcatgacttcgaatatcggcgctcatattattcaggaaagattgaaagacctgaatgagaagaaccgtgatcaggtattggagactaccaataatgaggtatatgaattgctgaaacaaaccatacgtccggagttcctcaaccgtatcgatgaggtgattatgtttacccccttacagaagaacgagattgtggatattgtccgcttgcaagtgaaatcattgcagaagatgttggctaacaacagtattaccatcgaggttaccgataaagctgtggaatggatagctcaggaagggtatgaccctcaattcggtgcccggcctgtgaaacgggtgatccagcggaatttgctgaacgacctgtctaaacagattctggcagaaaagattaccaaagacaaccagattgtaatcgatgtgaaagacgatcatattgtctttactaataaataacggtaacgctaaaggagacggtaacaacggttctggatacagactgttgttaccgttttttttatgtgccaggactgtttcggaggtccggggtgaaagtaaccttgggctttctttatcgtaaaattcggataggccgttgagggaaaaatgagttttaacaatatttttttaatttctaaggggcgatatttgcaaatttcctttatatttataaaaatcttatttatatcgtatataaacttataaatattatctatat

SEQ ID NO: 6235 - DNA, 790 bp, Unknown
  gut microbiota DNA sequence
ttggcattgaacggacaaaacaagagtgctttcgaaaaaaatcaggtgggtgcgtggcggtatgatatcatcgatcagggactgaaagtgaatatgccggatttgtgcgctactgtcgggttggcccagatgcgccggtataaatccacgtttctgcccgaaaggaaagccatttttgaattttatgtccgggagttttcaaaacgggattgggctgttattcccccctatcatcaccgggatacggagagttcttatcatctgtttctgctccggatcaaggatttcgatgaagcgaaacgggatgccatgattcaatatatcagtgaaaagggtgtcggggtgaatgtacattacataccgatggctatgctgactttgttcaagaaccggggatataaaatggaagattatccgaatacataccggttgtatgccaatgaaatcagtcttccggtttataatcatttaacccgggaacagctgcgtatcatcgtagataccgttgccgaagcctatgaagctgtaaaataacatttctttccttctttttataatccgaatttatgtacaaatttttgaaggttgtctttgacgtactgctggcacttattgccttggtgtgcgtgtcgtggctgttattgccctgtatgctgattttgtggtgtacgggagaacataaggtatggtatctgcaaaaaagggttgggtacaggaaccggatgttttctatttttaagttcgccaccatgctgaagaactcccccaatatggggacaggcagcctgac

SEQ ID NO: 6236 - DNA, 477 bp, Unknown
  gut microbiota DNA sequence
cactttattctacctctttgggagaaatgcctattgggggaaagaacccgttggaggcggacaaatggccacgtctgtgtgatttgagtgtctatgaaaagtatgagtttcgatggtacggacattatctctgtctgggggatgtcaaaagtgctatcattcatacaatgacggaacggggaataaaatatgtaagccgtatcatattgccggatggcttgatgtatcctcctggtttcgggatagacgggaaaggaacactgtatataacaatgggggattattgcagatcaggcatcatccgatatgacgataacgggaaatataccaccctaccattctccatgttcgggtatgaaacgttccgtgaaggttgcatccccgtaccagacaccgcacgcattattttgctgcacgaatacaatgcaagaaacaatagcggaatatggttggaacctggattgcttgatctcgata

SEQ ID NO: 6237 - DNA, 19994 bp, Unknown
  gut microbiota DNA sequence
ctaatgtattaaaatagggtaaagttaaagaaaaaggatacttttgcaggattaaagggtattaaaccagttattaataaataaaacaaattatgagcaattttttgacctcttcgatcggaaaaaaagtcatcatgagtttatcgggactttttctgatttcgtttctttgcgtccacctggcgctaaatttattgttgatttttgataatagcggggccttattcaatcagggagctcattttatggctacgaacccgattatcaaaattattgaacccatcctggctatcgggtttatcattcacatcatttgggcttctgtactgactcttcagaatcagaaagcgcgtccggtgaaatatgccctgagaaaccagagtcaaaatgccacctgggcttcccgcaacatgtacattctgggagcaatggtgttgatctttctggtgatccacctgtataatttctggtggaacattaaattcccgtctttgggaactccgttgtcagccattacagtcggaggtgttgaaatggaagatacttacacattggtttccagcttattcgaatcaagcattgtatactgtttgatttatattctgggagccgttttagtaggattacatatcactcacggtttctggtctgctttccaaactatcggtttctcaaatgatatctggagaaagcgtctggaatgtttagcttatttctttgcaattgtatttgcagtaggcttcagcattattccactgtatttcatcgcaggactgggaaactaattatttatgatcgatgattgataaattcggttttatcaatctaaagtctggaatcaaaatttaaaatttaaatcaatttattatgtcagtaatagatgctaaaatacctgccggaccgttgaaagacaaatggtcagctcacaaagctcatattggtgttgtcagcccggcaaacaaaaagaaactggatgtcatcattgtaggtaccggactagccggaggttctgcagctgccagcttagccgaattaggatacaatgtaaccgctttctgttatcaggattctccccgtcgtgcacactctatcgccgcacagggaggtatcaacgcagccaaaaactatcccaacgataacgactctgtattccgtttgttctacgaaaccatcaaaggcggtgactatcgtgcccgggaagccaatgtatatcgtttggcagaagtaagcaactccattatcgaccaatgcgtagctcaaggtgttccttttgcccgtgaatacggcggattactggccaaccgttctttcggtggagctttggtaagccgtacgttctatgcccgtggccaaaccggacagcaattgttgctgggatgttacggagccatgaaccgtcagattcaggccggtaaagtaaaaatgtacaaccgccacgaagtgctggatatcgtgatcgtcgacggtaaagcacgcggagtaatcgcccgggatctcgttaccggaaaaatcgagcgtttcggagcccatgccgtagtgttggctaccggaggttatggcaatgtattcttcctgtctaccaatgcgatgggatgtaacggtagtgcagcctggcaagcttacaaacgtggtgctatgttcgggaacccctgcttcgtgcaaattcacccgacttgtattcctgtacacggagaccagcagagtaagctgaccctgatgtccgaatcgttacgtaacgacggccgggtatgggtaccgaaaaaaatcgaagatgctaaaaaattacaggcaggcactttaaatccgaacgatatacccgatgaagaccgggatttctatctggaacgccgttatccggcattcgggaatctggtaccccgtgacgtcgcttcacgtgctgctaaagaaagatgcgatgccggattcggagtcaacaatacaggtaaagccgtattcctggactttaaatatgctatcgcacaattaggccgggatactattgaaaaacgatatggtaacctgttccagatgtacgaaaaaatcaccgctgtggatccttacaacaatccgatgatgatctatccggctatccactattctatgggcggactttgggtagattacaacttgatgactacgattcccggattgtacgctatcggcgaatgtaacttctctgatcacggggcaaaccgtttaggagcttctgccttgatgcagggactggctgacggttatttcattctgccgtataccatcggcgactatctggccaaagaaatccagactccgaaagtcaataccaataccaaggaattcgacgaagctgaaaaacatgtcaccgaccgtctgcgtcgtttgtatgacatcaaaggaacgaaatctccggatcatttccataaagaactgggacacatcatgtgggaatacatcggtatggcccgtgaagctgccggtttgaagaaagccatcgaactgatcgccgaattgaaaaaagatttctataaaaatctgcgcgtaaccggtgaatttacagcgatgaacaacgaattggaaaaagcagcccgtgtcgccgactttatagaactcgccgacctgatggctcacgatgctctcgatcggaatgaatcttgcggcggacacttacgggtagaatcgatgaccgcagaaggtgaagccaaacgggatgacgaacattttaaatatgtttctgtatgggaatacaaaggtgaagataaagcaccggaactccataaagaagaattagtgttcgaaaacatccaacttactcaacgttcttataaataaataatttacgatttgtgatttacggttcaggcttataccccgatcgtaaatccgaaatcaaaaataatattggttatggcagataaaatattaaaagaactgactctgaagatctggcggcaaaaagacgctaaatcaaaaggcgagtttaaaacatataaagttcacaatatttctaccggcacttcatttctggaaatgctcgatattctcaacgaacagctggtagaacaaaacgaagaaccggtagcattcgatcatgactgtcgtgaaggtatttgcggtacttgtagtctgttcgtcgacggccgtgctcacggaccggacgatgacgtaactacctgtcaattgcacatgcgccgtttcgaagacggagccacgataacgatcgaaccctggcgttgcggtgctttcccggtaatcaaagacctgatcgtcgaccggaaagcttatgacaagatcttgcaggccggaggttatgtttctgtcagcaccggtggagttcctgatgccaatgcaattccaattgcaaacgacaaagcggaagaagcgatggacgcagcagcctgtatcggatgcggtgcctgtgcggctacctgtaaaaactcttcagctatgctgttcgtggcagcaaaagtttctcagttagctttattgccacagggaaaaattgaagctgcccgccgggctaaagccatggtggctaaaatggacgaactcggattcggaaactgtaccaacaccggcgcttgtgaaatggaatgtccgaaaagtatttccatcgctcatatagcacgcctgaaccgcgaattcctgaaagcaaaactgaaagactaatatacattgtctttatttggaaaaaatgctatctttcggggtagcatttttttatcggtaaacccaaagcctgatatgcaactcttctatcgtgaaaaaggtatcgatacgcatccccccctcatcatccttcacggcctatggggagcttcggacaattggctgcccgtagccgatctattgagccaccggttccatgtcatcctgcccgacctgagaaatcacggctgttctccgcattcttcattattcgattacaccattttgagccaggatacggaggaattgatcgggcgactgaatttaccccaaaggccttttctggcgggacattccctaggaggcaagacattgatgcatttagtattgaaacgtccggaaatcgtcgaaaaagcggcaatcatagatatctgcccgcaagcctatactttagacaggcagactatgcaccgaagcctgtcggaatatatcctgactaccccgcttcaaaatttccaccgacgtcaggaaatacatcgagcggtccgggaatatttttctacagaagaggaagttcagattttgctaaaaaatatccgaaaaactcctcagggatacgaatggaaggttaatgcgaaagcgatccgggaaaatctatcttctctgttggattggaatatacccgatatccggtctccttatcaggctgaaattctatttataaaagccggacattcggactatttaccggaaaaaataaccgaagccacccgatattatttcccgaaggcccggcaaaagacaattccggaagcaactcaccggatacacgtagaccagcctcttcggctggcccacactctatccgattatttcctcgctccctgatgtttcacctgcgcttttattcccaaaggaatcctctggaaaaataggtgacagcttgcaaattagcagagctatattcatcattgatcacatccacgccgggttcgaacatcaaggcagtcaaccgcacccgataactctcgcctttgatcagttcgccgatccggtttacctcgccggaagtagtcgtattgatcgtcattccggtactcgtagccggttgaatccggctgacaaaataaggttgtgtcaaatccattttctttgagaagatttccacccgataataaatatcggggttctggtatgaattccaggaaaccttcaaagccccggttcccagttcggtaatcgcctccaatccactttcactcaaagtacgctgaggcagattctgactatagatggtatcctgtaacttcagttgtgtattttttcctatccgcaaatagaaacgcacttcccgtttctctccgccgaaatcgacataatcaccgctctggggttgtctctcactccaaaaatacccgtgattttccaccggaatagatttcccgtcggcaggaatcaaagccacctctttcacatttttatttccccgcacatcgactccgatatacgttttaaactgattcccgtccgtatattcgtttactaaaaaagcgtcggcagtcagttcgccgagatacccgggatcggtcgtatatttccgttctccttgcgcattcacaatagtctgaatataatccggtccactccgctgcacattccaaactatagagtccccatcgtccagatccatcgtaatctgattatccccacctgtccaggtaccgatagcatgtaccctccgtccgccgaattccatcatctttaaaacacctcctttttcaaagcggatcacttccaataaatcggactgtcccatcccgtatttatcccccaaccaggcattgtaataccaatactttcctgtcaattcggacatattcatgatcgtatcgtcttttccatcatcatcgctacaagcatacaatacacaagcccatccgactcctaacagtaattttccccatttcatcatcttctttgtttttaaactaaaataatcttcaaatttcaatttcccgttttaataaattatacctttgcaaggtacaatttttatgccgggaataatatatcaatcaataaaattagtcttatgttatatcctttaaaatttaaaccgatcctcaaacaaacgatctggggcggagacaaactagcttacaaaagtaacgacccgaaagtaaaagaatctatcggcgaaagctgggaaatttcaggagtacaagataatatctcggtcgtatccgaaggggcactcgaagggaattccctgcaagaactgactgaaatctatatgggagatctggtaggagataaaatctatgaaaaattcggtattgaatttcctttgttaatcaaatacatcgatgcccgggacaatctttccatccaggtacacccggacgacgcaaccgcaaaagcccgtcataacgcctatgggaaaacagaaatgtggtacctggtaggtgctgaccgggatgccgaactgattatgggtttcaataaagataccgacaaatcggaataccttactgccctgcacaatcatacactgcctgttctgctgaacaccgagaaagtcgaaaaaggagactgttttttcattccggcaggtacggtacacgctatctgcaaaggctgttatatcgcagagatacaacaaacatcggatatcacctaccggatttacgattatgaccggcgggataagaacggtaatccacgagaactgcataccgaattagctaccgatgtgatcaatttctgtgaacaaaaacagcacagcatccattatcatcagcacgaaaatcataccgaagaactggtcagctgtaattattttacgacaaattatctgaaattcgacaaagaagtagaaaaagattatatcgagctggactctttcgttatttatatgtgtctggaaggtaattttaccctggtctacgatgtcgataaaaccgtgaaagtaaataaaggagaaaccatattagtccctgcaatcctaaaaaacctgtttttaataccggaaacagaagctgaaatactggaaatttatatcaggtaaaatataggttagaaggcaaaaagctataggcaaaaaaaagaatttctcttaagtgcctatagctttttgcttttagctttttaattcatttccatatgttcctgatcggtcaatttttcgcaataatgacatttcaggacgatcggtgaatccttgactacggtaaacttcgttcttaccttttcgtgattggtaatacatttgggattcatacatttgacgattccttcaaccttttccggtacattaactgtctttttctccacgacatcataatcccggatgatattgatttttgcagaaggagcgaccaaagctaatttgtttacttcatcatcttccagaaatttatcccagattttgatgattgctttctttcccaatttactactcttcaaattagcgccgaaggtcattgcattatccataccagtgattcccaatacgttgatcacatcgaataatttatctgccggaatatggtcgatcactgttccgttttctatagcgcttacttgtaattctttctttgccataataaatcctatttataatttcaacattttggtttccgatttacgattttatcctaaaccgtaaattgcaaatcctccattatttcaatcccaaagccttggaaataatagcctgccgtgcaaacacaccgttacgggcttgttcgaagtaataagctttcggattttcatccacatcgacatcgatctcatttacacgaggcagcggatgcaggatacgcatattctcttttgcattagccaacatagcatttctcaggatatacacattttttactttttcgtactccaatggatcggcgaatcgttcccgttgtacacgggtcatatacagaatatcggctttaccgatcacttcgtccagttcggtatgttcataataagggatattcaatgcttttaaatgcagtttataagcttccggcatctgcaaggattcaggagcgacaaaatggaacgtcggatggaaatgactcatagcttgtaataaagaatgtaccgtccgtccgtatttcaaatccccgaccatacaaatatccaaattttccaaagtcccctgagttttgtaaatagaataaagatcgagcattgtttgcgaaggatgttggtttgctccgtctccggcatttaccacaggatgaaccgcaacttcactggcatatctcgcagccccttctaccggatgccgcatcacgatcaagtcagcataattatctaccatcttgatcgtatccttcagagtctctcccttggtgacactcgaagaagaagcatctgtaaaaccgataatacgcccccccaaacggttgatcgcagtctcgaaactcaaccgggtacgggtagaaggttcaaaaaataaggaagccactactttaccttccaataaacgctgattcggattggcttcgaattcagaagccagtttcagtacttccagaatctcttctttgctgtaatcttcgatggatactaagctgtgtgtgttcatatcgctatatttaatgtttgttgactaacagacaaaaaaaaaccaacaagtctaacgacaatgttggtttaataaatctttatcaataaatcggcgattctgtctgaaatgctcgacagtatgtttaaaaattccgatatacagatgttctgatttcatatcagagctcaaaagtatataaaaattttatatccgtaaaatttttatcgctcaaaaatgaaaaattccgaaaaatagccgtaaccctcaccccaactgtacgatccgatcgacaatatcgtgagcgacttcctttttacttttcagttcatattgccattgcacctcattccggtcgatgatagtcaccttgttggtatcataaccgaagcaggcattgctatctttcaaactattcaaaacgatcaggtcgagattctttttgtgcagtttccgcagggcatttcctgtttcatcgtccgtttcgagggcaaaccccaccaatacctgtcccttttgtttccggcgccccaattcggccgcaatatcacaggtcggcttcaatttcaacaccagctcttcttcccctctttttaacttcaggtctgccttccggtcgggagtaaaatcggccacagccgcacaggaaacgataatatgactgtcttccgcatagttcatcacctgttcgaacatctccgcagccgattctacatttatccgccgaatcgccggatgttcggtttgccgggaaacaggtccggcgaccaaaaccacttcagctccccgggcagcgaactcctcagccaaggcaaaccccatcttacccgaagagtaattcccgataaaacggaccggatcgatcttttcataagtaggccctgccgtcaacaatacctttttacccagcagatcaccctgtcgttcaaaataacgatggatagaagcgacgatctcttccggttcagccattcttcccttgcccaccaaaccgcttgccagttcaccggcagcaggctcgatcactcgaaccccgtaactttgaagaatgtgcaggttctgtcgggtagcaggatgacgatacatatccaggtccatcgccggagcaaccattaccggacatttggccgacaaataggtcgtcagcaacaaattatcggctataccgtgggccatctttcccaaggtattcgctgtcgccggagcaatcaggtataaatcggcccaaagccccatatccacatgagaatgccaatctccgttttccggattataaaactctaccatcaccggatgtttggacaatgtagccaaagtcaatggagtaataaattgtttggccaattccgtcatcaccacctttacttctgccccttctttcactaacagacgcaccagagaagccgctttatatgctgctatactaccggttatcccaacgataatatgctttcctttcaacatcgtgaaaaaacaattatttctagatttatgaattacgagttttcttattaactaaaaatgtaccaatgtatcctccttattatcggtacattggtacatttacaaaactgtacattaaaatcactgtttagagcgattttttctcttctgtttttttctccgttgccggatttctgaaatagatctgcccatcttcgaattcctgggtagcaataagcaccggttttgggatccgctcataaaatttggagatttcaatctgttcccgattttcaaaaatctcttccagattatcggtataagaagcaaactcctgcaacttacgactcagttcctccttcatctcgacggcaatctgattagatcttttggcaataatggccacagcctcataaatattattatcggcttttgcagccaatacggcagggttccgtgtaatggtgttattaggtgcttttacctttttaaaatctaccataattgatttatgtattaatatttatctaattaatcttcgaacttataattttccaaataggcctcgatatcctcatacatcttctttacgtcggcagcatatctgctgttcggatattcatcggcaaagtaataatactcttcccgggcattgttatatcgttccactttcttatcttcgacactattcaccgccatctgatatttcgatacgaacaacatatacataatctcttcccggtatttggagcccggataatccttcagacaattctgcaaactgataacagccgctttgtaatgttcacgcaggtaatagtttttcgcactcaaataagctttgtaagaaagcttatcccgcatttcatccatataggtatttaccttatcttttcgcatactatacggataacgactcagataaagctggaattcccggatagctttttcggtaacctgctgatccaaacgtggtttcggggaagctttataatcgcaaaatcccatcatataaagacattcttcagcaaatgaactttccggataagtctggataaactgcttgaataaatcggaggcaatctgataatctttcatattataactacaaaaagcccggtaataagcaatattctgagcttttgcctgcccgacaaatacagaacggacaccatccaacaaattcattgctctctgataatcgcccttgttataatactcgatcgcttttttatagaccaggttgtaatcattgcttttcagcaggctttgatactccccgcaagacgtcataagcacaattaccagtaaaaatccccaaaatttcttcataaacggaacgctttttttgcatcatgcaaagatagaggaaaaaacaaaaagtaaaaagtaaaaggtaaaaacttttctgagcttcactactttcaagtatttttaatatttactctccacttttcactaacccttcatacgcattcttcttcctactctaagtaattatacgtattatggtacatcttttaccttttaccttttaccttttacctttatttattacttttgccaagttaaaatacagtattctacaaattttcaaaatattatcgacgtggacatttttgaaagagtaaaaaaacaaagaggtaatatcggccagtatgccaaagaagcacacggctatttcgcatttccgaaattggaaggagaaatcggtccccggatgatgttccgcgggaaagaagtgttaaattggagtttgaacaactacatcggtctggcaaacgatccggaagtccggaaagtcgatgcagaggcagccgctcaatgggggctggcttacccgatgggagcccgtatgatgagcggtcagacttcccgtcatgaatacctggaatcacagttagccgatttcgtcggtaaaccggacgcattcctgttaaatttcggctatcagggcatgatttctatcatcgactcactgacttcacgtttcgactgtatcgtttatgacgcggagtcccatgcttgtatcatggacggtttgcgtctgtcgccggccaaacgttatgtatacgtacacaacgatatgagcagcctgcgcaaacagctcgaacatgccacgaaatatgtagcgactaccggtggaggtattctggtagttacagaaggcgtattcggaatggcaggagatttaggtaaattggatgaaatcactgctttaaaatctgaattcaatttccgcttgctggtcgacgatgcccatggattcggaacaatgggaccgacaggtgccggtacaggtgaacatttcggtgttcaggataaagtggacctttatttcggtacttttgccaaagctatggcaggtttcggcgctttcgtcgccacagatgaagatgtatgtatgtctttgcgttataccatgcgttcacaaatgttcgcaaaatccctgactatgccgatggtcgaaggagcgatcaaacgtctcgagatgctgaaaagccaaccggaaagacgcgaaaagttgtggaccatcgctcatgctttacaaaacggtcttaaagcagacggtatgaatatcggtatcaccaactcgatggttactccggtatatctttccggtagtgttgccgaaggaatgcaagtcgtattcgacctgcgtgaaaattacaatattttctgttcgatcgtcgtatatccggttattccgaaaggacaattgttgctccgcctgattccgacttctatgcatacactcgaagatgtaaaatataccatcaaggcattcaagaatgtggcagaaaaactggctaagggagaatacaacaaagaacttctgatcgacgctagtaagctctaaaaaaatcagggattaaagattcggatctatttcctctgttctttaatccctgttttttacaccttgatcatttcacccccaggtaaagccgggtttatcctcattttttatatttcaaaacctcaggcatcaatgcttttatctgctctatacgatgggcatccgaagggtgtgtagacataaactccggtggtttttgtcccgatcccgcagaagccatccgggtccagaaaggaatcgcctcttccggattatatccggcaatcgtcataaaaatcaatcccaaacgatcggcttccaactcatgcttccgcgaaaaaggcaagatcacaccgtaattagcccctaaaccgatagcagtccccaagagtgcctgagtcgactccgatttttcttttaaagcatatgcagcagcagtacttccagcttgtatcaatatctgctgactcatccgttcgtttccatgccgggcaatcgcatgagcaatctcatgtcccatcacaacagccaaaccatcatcattttcacaaaccggcaaaattccttcatacacgaccaccttccctccgggcatacaccaggcattcatttcaggactctgtaccagattgaattcccactggtacccttcgatctgcttttccaatccctgagatttcaagtaagcttctacagcggcagcaatccgcgtccccacttccttcacgcgacgggtatcgtctgtacgggtagataacttattttcttttaaaaaatctccatacgaagtaagactcatctgcatcatttcactttcgggcaggagtatcacttgcttccgcccggtcaaaggcactgaagcacactgtacgaacaaggtcaaaatcccgacaataacagttaatctaaagactctcatcgtttcatcttttttttaattctccagggtatattgagtttaacgttacataaaaaaacaggttacaggtttaaaaacacatcctcaaacccataacctgtcctatgccatccctttcggggaaatatatctaaataatcaacatcgcatctccgtaagtaccgaaccgatatttctcttttacggccagatcataagctttcatcaccagatcataaccaccgaaagcagccaccatcatcaaaagagtcgaataaggtaaatggaaattagaaataaaagcatccggcacactaaaatcatagggagggaaaataaatttatttgtccatccatcatattcggtcaaacggcctttggtcgttacacaactttccaacgtccgtacaacggtcgtgcctactgcacaaatcttatggcgttcgtctttcgcatcattgacaattttcacggtatccccccccacaataatctgttccgaatccattttatgttttgtcagatcttctacatccacttcccgaaaattccctaagccaacgtgcaaggtgatataagcaaaatcgattcctttgatttccatgcgcttcatcagctcacgactaaaatgcaaaccggctgtcggggcagcaacagctccttcatagcgggcaaagatcgtctgataacgttcttcgtcttccggctccactttacgtgtaatcgtacgcggcagcggagtctcgcccaggccatacagcaacttcttaaactcatcgtattctccgtcgaacaagaaacgcaacgtccgtccacgagaggtggtattgtcgatgacttcggcaaccaaactatcgtcttccccgaaatacaatttattaccgattctgatctttcgtgccggatccaccaaaacgtcccaaatccgcagatcccgattcaattccctcaacaaaaagacttcgatttcagcaccggttttttccttattcccatataaacgggccggaaaaaccttggtgtcgttgaaaacgaatacatccttctcatcaaaataatcgataacatccttaaataccttatgttcgatcgttcctgtcttccggtcgactaccatcaaacgacattcgtcccgattagcagaaggatgttgagcgattaattccggcggtaacttatatctgaattttgataatttcatctctgcactatttaaattaaactcttatcaagtcattttaacatcctggtttataccaacaaaacattggaatatctccttctgtctttatggaaatacccctggcctaataaacggcgcaagttacaactttgtttgtaaaaacgcaaccaaatcctccattttatttgcatcttccacctgaaaacttccgatctttgtgcggcgtaaacctgccaagtaagccccactctcacaggcctgaccgatatcgttggccaaagaccggatataagtccctttactacaattgattcttaacgttaaatcaggaagattaaaatcgatgacctccaattcattcaccaccacttgacgtgcaggcatctcgatctcattccctttgcgcgcctttttataagcccggtcaccatctacccggatagcagaatacgccggagggacctgagtaatgactccccgaaaccgctccagtacccgatctaaataagggcgatcgatatgccgataagggaaatccccttccggcaaagtctctaaatcgaaagacggagtcacagccccgtaacatagcgtcgccacatattctttttcctgagccatataatcttcaatccgtttcgtccactttccggtacaaacaatcaccaaacccgtcgctaaaggatccagagttccggcatgtcccactttgatcttcccacaagcagacttcaaacaccaacgaattttattcacgacatcgaaagaagtccatttcagaggtttatctaccagaatcagagcacccgaatgaaaatcaccttcttcattaaacaatatcttacacacaatttttatattttcgaaccaaaccgaacaagcgtaaaaatcattctatcacaagcccgttttcactgctctcaatgaacaaacaaaatgataatgcctactacaaaacaatatacggcaaaccagatcaactttcctttcttcaccagattcagcatccagctacaagctatatatccggaaataaaagcagccaggaaaccgacaaccagcgccaacatcgaaataccgctctctgcaggtgcaaaaccacctttcatcatgtccagaaaagcctctcccaagataggtaccaacaccatcaaaaaagaaaatctcgctacattttctttattattccccagtagaatccccgtagcgatggtggaaccggaacgggacaaaccaggcaatacggcacaagcctgagccactccgatgataaaagcatcccgaaaagatatatccgtctttaaacggggacgagcgtagtaagcaaaggccaacaaacaggcagtaattaaaagagcaactcccacgaccaataatccggaaccgaagagagcttccacataatctttaaagaaaacacccacaatagccacaggaatcatagataatgcgattttggcaatataaatggtttccggattccaggaaaaccgaaaaagacctttcaaaagatcccaaatctcattccgcaacaccacaatcgtactacaaacggtcgccgcatgaacggccactgcaaaagtcagattttcttctccctgtatgccgaaaagcgtactgaaaatctgaagatgcccggagctactaacgggcaaaaattctgtcaatccctgaatcaatccgaggaccaatgcttctaaccaagtcatcatttcttatccaacaattttatacctaatctttcgtcccttcttccatttcctttttaggcttccgcataatcgcccaaaaaacaaatccaaaaccgatcaacaccacaatcggagccagcgtgatccgacggaaactaaaaatatcataattaaactcagccggattatcggaacctccccccatcatcaaaataaatcccagaatgatgatcccgaaaccgatcaaaatcatcttataactactcacaggaatcgggaaatcgatcttttttccggaagtagtatttttcaaattattcttcaccatatttttagttttgttttaattgtacaaatcgttcatgtctttattcagatatctggcaaccgacatccaggaagaaaccaaagaaagcaatataccgcaaaccataacaaaagcaaccatgataatgatcaattctttattcatcagattgactacactccccacttctttttgcaaaaagaatatggcagccaaaagaatcagattagcgatcatactcccaaagaaaccgaaccaaacactattttgaataaaaggcttacaaataaagaaaggttttgccccgacaagctgcatcgttttaatcagaaaacgctgcgaatatacggacaaatggatggtattccggatcaaggtaaaagaaatcagcatcagtgcagcccctgctatcaacaggatcagactgatacgccgaacattttcattgatcatatgcaccaaagacttctgataagacacctcctgcaccaattcgttttttaataagctcttctcgataacagtcaaggaatcgttattggcgtaaacgggattcagcttgatttctaccgaaggcaaaagcgggttataccccaatacgccctcgaaatcttcccccaactcctctttaaattcacgggcagcctccactttactaataaataccgaagacgagacaaaaggctttgtgtccagaatcttttgcatctttttgatctcggcttcatttacattatccttgacaataatagaaaaaccgatattttgttttacatgatcagaaaccaattttgcattcagcaaaatgaacactaaaataccaacgacaaccaaaaccagtgatatactgagtgttgacacaaaataggagcctgcaattctcttttttctctgaccagtcatctatcatttgcatttaaaaacacgacaaatatagcaattatatccaattattttttacaaaatgtttgtacaaactaaaaaacaccttatatttgcactcgcaaaacaaaaaaagttctttaaacagatgcgaaaatagctcagttggtagagcacgaccttgccaaggtcggggtcgcgggttcgagtcccgtttttcgctctctcgcaagaggatgctcgagtggtggaatcggtagacacgcaggacttaaaatcctgtggccattgcggccgtgcgggttcaattcccgcctcgagtacaattaacaatcaaagagttagatcagatctaactcttttttattactattttatttgtttcaaaaagtgatccaaaacacattatcccttctattcttatttcacaataacaattccccctcccgacagaatcgtcaagggaagttctttatttttactcaaagtcacttcccgggtataaacattacgtttcaggtcgtcattataaagggtcacccgattgcctttggcaaacatcggaagttgtattttcagcttcaacggttctttttgggcattcaccccggcgacataccatttatccccatgtctgcgagccagaatacaatatttccccggatagccgtcgataaatacagtctcatcccaggtaacaggtacttgtttcagaaaatccaggcaaatttgggaagcatcggtcagattattaggggccaaagcaaaattctgtatcggattctgaaacaagacggtagtagccaactggaaagcatctgttgtccggcggatactacctccatcgttggtacgattcaagcgtttattgaggaaacagcctccgaattccatacaaccgacactattccggataaacggatgcagacaggcattgaaagcctcctcatcacaaaaatgctgctggaaaatcaggttctcggaagccagtaccgcctcacttcccacataatttggatacattcgctcccaccccctgggcaaagtgcaaccgtgaaaaataaccatcaatccacaatcatccgcatcgctcagaatagcttcgtacaacctcatagtctcctgcttatctcctccgaaaaagtctactttaattcccttcactcccagactttcgagccacctcatttcccgcttacggacaatcggattatccatacaattcacaggactttgaacaatatcgttccaatatccgctggaactataccataaaaatatatctacccccttcctatgggcataatccgccaaagacttcatcttttcccggccgatcgtccgatcccaccagttatctatcaatacatattcatatcccattgcagctgccaaatcgatgtacctcacctgatcctcataattgatacttccatcctgccacaaaatccagctccaggttccacgcccgaaacgataatcgtgaaccgtttcgtaaagtggctccacgacgtcccaaatgactgtcgtttccacaataggcttcagattatcccctacagtaatggtacgccagggagttgtaccgggcaaagccaatcccggggctaccgttccattcccattattctcttcgggcatcggaaaatcaaggatatataatccaccttctccggcatcactcaaacgagaaccacaatagcggctgtccacacccgtctcactgatcaaagcccaaccatcacaaccaatacgaaaaaggcaaggaaaagtataaccatgtccatatcgagaaggttcgttcatcggaacatccaccctatactcctcctcataactgggttttgtacgcatccatccgatcatggcatcactttgcggacacagaaaagtagtcgtatatgccggaaaatcaaaacccgtcgcttctctttccaccacacaacttcctgcctcctttcggggaattacatatcggaaagcgatatcgttattactcacccggaaaacgacatctatctcctgcttatcagcattcgcaaaagtacaaatcaactcattcgcctgatagtgtatctctgatttcttgatcttgttctgagtatatgttttatcgatccgacttgtcttttgcccaatccaattcatattccggctaaaatccccgatatcggtcaccacccccaaaggggaatcttccagcattatcttttctttgtaagtgacagaatataccggttttccctgcttcaaggccacattcactttcagatgagagtcaggtccaattacctcagtctgctgagcccataccggaacggcaatccataccagcaagcagtatttcagatattttttcatgtctttaaaataatttacatgcaggacaaagataatatctccgctatacaaaacaaggattaatccttataaattaacgtaacagtattctatacactttaattttccggtatattgatcattttgtcattacttagaactgtcaaaatggcaaatatcggatatggcataaattttgtaattaacaaataaaaag

SEQ ID NO: 6238 - DNA, 4279 bp, Unknown
  gut microbiota DNA sequence
gcagattactgctgaaatgtggtcttctaacctgtatttgtccatgtctttctatttcgcttgcgaaggttttgacggctttgcccattggatgaaaaaacaatctcaggaagaactggagcatgcctataccatggctgattacgttacaaagcggggaggaaaagccaaaatagataaaatagacgttgttcctcaagggtggggtagtcctttggaagtattccaacatgtctatgaacatgaatgcaaggtttcaaaaatgatcgacaatctggtttctatcgcttctgcagaaaaagacaatgcaacccaagactttctgtggggattcgtacgcgaacaagttgaagaagaagcaacagcacaaggaattgtcgacaaattgaaaaaagccggtgatacaggtcttttgttcatcgatgcccaactggctaagcgataaagacctcagcataaaaaactgcctgaatgatgaagtgtgccctaaaagtcgaacaagaatttttaaggcgcactttaaagtatcagacagcttcgtcttccttatacacatcggttacttcatcttttcagatattcgtatcaactatatgggaataaaaacagaaggttattcgtaaactttactttttacaatcacatttacagatgatgaccggagcctcggggaaatcgacgggaatccaggtggcattattgaggtaattggttatagtcgtcataccgaccagcatgaccaaatcaaccagacaagcatccgtatatccggcttgatagaaacggccgatcatctcagggcctaccttgccccgattcgtaaccagctcacaagtaaaatccactaaggtatccaacttttcatcccaagtgacatttcctttacggatcgcttcgatttgcttatcgctcaaaccggcctctttagccaaagccgtatgcgctgccaaacaataaggattctgatttacctgactagtcaccaaatgaatcgcttccgtctgaattcggtcaaataccgtagaaacatccataaaatccataaatcgtttcaaggcagtttcggaacgggtcatgaaggcatacacattcggaacaaaacccatcgactgctttaatgcaaatagcaatttacgatcatgttccaatacttcttccatccggggtactttaaattctcttctcatcagttttatttttggggattatacgaaaattgaaaaataaagttgaatttttaccgcaatatggaaacttttaaaattgctttacgtttatttcacagataaaacataccataaattgggagaaaaggaaaaaagaacggtacccgcaggtatccacaaacttaatgtacgttaaacgacaaaggaatatgctaaactaacccaaccaatagtatcgtacagatacatacgacagaaaccggaaattattccggtttctttttttcctgcttcagaaatattttctttaaattacttacctttgtattcaatacattatactgcaaccatgaaaaataaaaacatactgattctgattatttccttcatcattttgctcgttgcctgctcggctctgtctatgagtgcggtagccagtaattaccgttacacctgggtagccatgaacccttggaatggagtcgaaggtattgcctttaccgtgggttattttttgcataccggcaaaaccgtcagtatgctgattacaatcggcttactcctcgtaatctggtggcggctctacgctcttattcaccggaccttcatcagataatcttcatcaggaagtcaatacatcactcatgcacattgataaattcatttgttttgtgtaagtttgcaacttctaaaaacgacagagatcgggtcatttgatcatccggtaatttcgtgattcagtaatttagcaactcatctattatgagaaaagacgaaagatataacaaacgtggtgtgtcagcttccaaggaagacgtccacaatgcgataaaaaacatcgacaaaggagtattcccccgggctttttgcaaaatcgtaccggattatctgggaggagatgaagcttattgcaacatcatgcatgcagacggagcaggaacaaagtcttcgttagcctatatgtattggaaagagaccggagatctctccgtttggaaaggaattgcccaggatgcactgattatgaacatagacgaccttttatgtgtcggtgcagtagacaatattctgttatcttccacgatcggccggaataaaaacctgatcccgggagaagtcattgctgccattatcaatggaacagaagaattactggaagaataccggaaactaggtgtaagcatctattctacaggtggggagacagccgatgtcggtgatctggtacgcacgatcattgtagattcaacagttacttgccggatgaaacggaaagatgtcatcgacaacgccaacattcgcccgggagatgtcattataggcctttcttcgtacggacaggctacttatgaaaccgaatataatggcggaatgggttctaatggcttgacttcggcccgtcatgatgtatttgcaaaatatctggctcaaaaataccccgaaagttatgacaataatgtaccggaagaattagtatatgcagggaaatgcctattgacggactgtgtcgagggagtaggtatgaatgcaggaaaattggttttatctccgacccgtacttacgctccggtaataaaacaaattctggacaaataccgttaccagattcatgggatgattcactgttcaggaggagcccagactaaagtgatgaattttgtcgagaatatgcatattgtaaaagacaatcttttccccgtacctcctttattccggttaatccaggaacaatcgggtacgccttgggaggaaatgtacaaagtgttcaacatgggtcatcgtatggaagtttatgtcgacgaggaattggcagaagaaattatcgctatctcaaagagtttcaatatcgatgcccaaatcgtcggtcgttgctacgacaatgacgaaggcgaaggaaataagcttaccatactcagcgaattcgggaaattcatatactgaacggtaggtttgattcgtaaattttatatataaaacgaaaggatgcccttctggagcatccttttatcattccttcaaatcttcccgcatttgcagcaaagtatccattaataacggaatattctcctttactgtattaaaaataacatctgcatccacttcaaaatagtgatgtacaattatatcacgcattcccatcacttcacgccatggtatttgtgggtaataaatgagcaaattgcctgctgttaatttatccagattctttatactttcaccagtagcaatcaatttcatacaaactccatccagtaataaagttcctgtagcagaatccagaaaatcattagtacaatgaatattttcagttcgttgctgaatgacttccagagattctatcactttgtcaagcaaatgcaaaacttttacatcatacataaatagcttcctcttgaatggtttgctttaatacctcatccattttttcacgcacacgaaccaaatctaccggacgtcccaataaagcttctaattcatatttgatacgaactaatgtaaacaacgtaggcgcctctccttcatagcaaatatcaatgtcactattttcagtctgttcacccctggcaacactcccaaatatccccatgcgtttaatgtgataaacagaagcatgggtttgcatgtagactgccagtagttgtatatattcattgatagatttcataaaatatcatctggttcatattcacaaatataagaattatctgacagttagacaatatgtttattcagcctgtttttcttttttataaaactacaaaatcgtctactctgtcaattcgggaaatttatatactgaacggtaggtttgattcgtaaattttatatataaaacgaagagggtaactaaaaagtcagatgacagataagtcaccctctttcttattattgtggtaagatatggaaggatttataaaaatttataaactttatggactttataaattttcgactgatttaatcgaacattttttctatccttttccttcttttaatatcgtgcgcattcgttgccggaggttcaattgtgtactatcgactttagcttttcgcgaagggataaaaagatccttgtatttcgctttcgtaatacggaacttcatcttatcgag

SEQ ID NO: 6239 - DNA, 282 bp, Unknown
  gut microbiota DNA sequence
tacactggattttccagatgagaacaataatgtgattttggtcggtgatccgttgtacaataaaaaaatcagagaaatgttttatcagattgtggaggatagattgggaaaaccggaatgagtctgtaaatgataaaaaggattgatgatgagaagttttatttcccggatatggacggatattttcttgggagtcttgtttgtcgtgtcgggttttgtcaaggcggtggatccggtgggattgtcttataagattgaggaatattggggactgtttcagct

SEQ ID NO: 6240 - DNA, 191 bp, Unknown
  gut microbiota DNA sequence
gcaaacctgtggctcgacctgaagggccccatcctcgccgataccgtctatgtggacggcgttctcgctgccaaggacgtgaccatcgccctgcctcccgtcaaccttgtgacggctgactttaaggcgatgggaacctacacggcgccgctgcccggccagatcgaggcgatggaggcatccatcactaa

SEQ ID NO: 6241 - DNA, 2446 bp, Unknown
  gut microbiota DNA sequence
actggtggagatggccgatgtatcttttcagttccccgatatttttttccattccccacaaaccgaaacttaattccttgggcgatacccattcattgaagtgcaggcacagcaattgcagcaatcgcatatctttccctttcagtttatgacttttgtttcctatggtcaatactccgtttctctggttgtaagtggtgatggccgatagtttatatcgcgggttttcacctgtctgggagtaattgcgtttggctatgtttctgagtttggccaggaagacttcgcggtcggtatctttaccgatatggtccatgactcccagttcaatggtggtgatcacggttgccggatcggtatgcgaactatagacgataaccggatactgttttacttcggtgataatctgccggatgaggtcgattccgttcttgctgccttcaaggtccaggtcgaccaataacagatccggccttcgggtatggaataacttccaggcctcttcaacatttgtcgtcaattcgaccagaaagccggcctgatccaggaaaaccttggtcatacgcccgaaatcgaggtcgtcttctacatataaaatccgtatcacactcatattctttcattattatatcgttagcccctcttctccaatttatcctcttttcgcctcttgcctctagcctttagcttttcgcttctagcttctagcctttagcttctagcctttcgccttttcgcttttctctgcggtatttcgatgataaattctgttccctgctttccgtcactgttcacctgaatatgtccgtggtgggcttttacgactgctgccacataacagagtcccagtccgaatcctttccgttgtttatctcctttataacgttgtccccgtttgtattcctgaaaaatgaatttttgttcttcgggtggtatgccgtaaccatcgtcttgtactgtcaatatccatttttttgcctcccggcggcaacctatccgaatacggacttttgttcctgaatatttaatcgcatttcctaataagtttcccaaggcactatataaaagtaaaggatcgacctgtgcaagggggacggtaggagaaatttctgtttgtatatcgatttgtttgccgatgctattgttttgcctgtattccgttgtgatttgtgttaacaattcccggatatcggtcggttgtatacaggctttcagaccgtaggcatcgacagaaaaggtcagtagattttcgatatcttccaaagttttatcggtccattgtttacatcgtttataggtttcgttcagggagatggcggttttgtcctgctggtcggacaaaagattttccaactggcattttatattcagtatcggccggcgtaggttatggaccagagtatgcgtaaatgctttttgattatcccgtagttttttttcatttttcaatagccgataaagaagataagtcagacaaataatcaggataaagagcaggatagaagtaagaatacgttccagggctagtttgaaaaataaaatcagggggaaattgaattctgctttttgctactgtttcgattaggttgtttgagaaaatatgctgaaatttgttttggaaagttaagtaaaatatgtgatatgtgcaaaatattttttaccggtttattttttatcctttggggtgtggatcagaattctgatccggtaatggtattaaatcgcttcgggatgatggatattggggttgccgatgagtgtggctccaccctgtattttggccgatcggatgaagtaccgggaaatgtttttcagtattgcagtaatttgattgtattcgaccggcaaggaggaatccttgaatcctatagactggacaccgatttaatagccctttgttatgctccggacgaacaaaggtggtatggcaaacggttaccggccggagatcaccccgatgtttctgtgtttatcccaatcgataaataaagactgacatgagaggtggtgctatgcgatcgattttaataatcggaacacttactttggttggtattgcaggactttggttcttgttcggagactctacggaagtgtttgaattattatattcatcaccgactactattcgaatagaaggggatactatcgacctggatattgtgaggtatggcgaaaagaaacagatttctttccggatctgtaatacgggcgaggttcccttattgatccgtgatgtgcggccttcttgcggctgtactgaagttcgatgggaaaagcgtccggtacaacccggagaagaaacgttgattttcgtcacttttgaaccgaattctttgggtcggtttatgaaatcgattgaggtattgtgcaatatcgaacggtgtttttgtatattacacattatgggaacggtatcggttaattgagtttgaaaattaatttt

SEQ ID NO: 6242 - DNA, 691 bp, Unknown
  gut microbiota DNA sequence
tgctactgcaaatttctggttgtattttctttgccggttagctctgccgtgagatgcagggttttatggcggaagaccattggagcgggaacgaggatccggttaggttttccgaacgcccgaccggtggtgtctgacgaacgtagtgaggagttccgccggtcagtgaaggaaagccttagcggaccggtccaggcgaaccggtctgacggtataaaacccgaaatcggaatagatagaaaaaaataaacctaggtttatttcgttatttatttgtcttcggttattgtgatcgtcgagtgtgctatggtgggaaagtgtttgagcttcgtgacacacccgccgatcacgatagccgttgctcacgtcctgatgggagcagttatgaagactgcgctctgagagcattaaactttcaaaaccttgtttgcccaagccctgtaaaccttgttcaccatttgtgatttcggagattatttccgaaatttgttcatgtgtaaattccataataattcatttttgaagttcccaatacaaaaataataaaactgggatttacacactttttgaaacactatctccaagttttccgattgatccctcatccacactatcggctcgaacccgataaaataaaaagaccggaaaaaaatccgatctttttagggatattcagtaaatagtataaaat

SEQ ID NO: 6243 - DNA, 167 bp, Unknown
  gut microbiota DNA sequence
tctattccgatttcgggttttataccgtcagaccggttcgcctggaccggtccgctaaggctttccttcactgaccggcggaactcctcactacgttcgtcagacaccaccggtcgggcgttcggaaaacctaaccggatcctcgttcccgctccaatggtcttccg

SEQ ID NO: 6244 - DNA, 216 bp, Unknown
  gut microbiota DNA sequence
ttcctgctccaatggtcttccgccataaaaccctgcatcttccgtcagcactacagggcaaagaaggagagtttcattgaatgaaagggtaggctactctgaccgcagtacggatacctgggttacctgaccggattattcctataaaataccgattactgaattaattccgaaggtaagggttcagaaaaacagctgtttgatagaagtttatac

SEQ ID NO: 6245 - DNA, 337 bp, Unknown
  gut microbiota DNA sequence
ctgaccggcggaactcctcactccgcaaaaaactttacgttacgtttccgtcagacaccaccggtcggtcgttcagaaaaggcaagacgacactcgccagagctccaatggtccccgaacacgaacacctccgactcacgttatcacggcatggaaaacgaactgtgacctgaaaggtataaacttctatcaaacaactgtttttctgaacccttaccttcgggattaattcagtaatcggtattttataggaataatccggtcaggtgacccaggtatccgtactccggtcagggtggcctgccctttcattcaataaaactttccttctttgccc

SEQ ID NO: 6246 - DNA, 418 bp, Unknown
  gut microbiota DNA sequence
gctacactttttcttttcgttggcaaatcttaatccgtatcttcgttgcatgaaagaagatatacggatgcgccaaaaatggcttgagctatacgtcgaaacgggttctgtgacaaaaactgcccttcggtgcgggattacccgttccacgttataccgttggataaattgcgagaaagaacaaggcaagtcggaattgtccgataagtctaaacgttcatcaagacttgccaatatgaagataacacctgaaattgaaaccattatccttaatctgtgcgtgagacaagaagatggggagcgcaacggattgccaactatctgcttaggaagagaataaagctctcaggcatgacggtgtggcgtgtgttgaaaagcatcaggtcaaagctgttgtgaaacgttgcgagaaatttat

SEQ ID NO: 6247 - DNA, 296 bp, Unknown
  gut microbiota DNA sequence
actgccgagaaaatccgctaaacataacttcagaggtacccgtaccgcaaacggacacacgtagtcgggttgaatatactaaggcgcttgggtgaatcacggttaaggaactaggcaaactgaccctgtaacttcgggataaagggtccctcctcgcaagagagggcgcagagaataggtccaggcaactgtttaacaaaaacacagggctgtgcgaatatgaaagtagaagtatacagcctgacacctgcccggtgctggaaggttaagaggagatgtcatcgcaagagaagcat

SEQ ID NO: 6248 - DNA, 189 bp, Unknown
  gut microbiota DNA sequence
ccgtcagaccggttcgcctggaacggtccggtaaggctttccttcactgaccggcggaactcctcactacgttcgtcagacaccaccggtcggacgttcggaaaacctaaccggaccctcgttcctgctccaatggtcttccgccataaaaccctgcatcttccgtcagcactacagggcaaagaagga

SEQ ID NO: 6249 - DNA, 137 bp, Unknown
  gut microbiota DNA sequence
tctacaacaagaagaaagagcttgtccacgctgagatcatgctgccatcctatgcgccgcccggatatgcagaccgggcgaccctctggaacgccgtagaagccgtggagaaccagtggaactcccagcttgcccgg

SEQ ID NO: 6250 - DNA, 950 bp, Unknown
  gut microbiota DNA sequence
taccatcgtcaagcgcagccaagggcagtccgctgttgccggggccgcttaccaaagcggcgaacggctgttcagcgagtacgaccagagaacaaaattctacaacaagaagaaagagcttgtccacgctgagatcatgctgccatcctatgcgccgcccggatatacagaccgggcgaccctctggaacgccgtagaagctgtggagaaccagtggaactcccagcttgcccggcgcatcgtgctggcgttcccggtggaggtgccgaaggagcagtatttgtccatgataaaagagttttgtcaggagcagtttgtttccaaagggatgattgccgactttgccatccacgacaagggagatggaaacccacacgctcacattctgctgacgctccgggcaatagatgaacacggcaagtggctcccgaaagccagaaaggtgtacgaccttgacgagaacggcgagcgcatccggctcgcttccggcaactggaagtgccacaaggaaaacacggtggactggaacgaccagaagtatgccgaggtctggcggcatggctgggagaccattaccaaccgctatttggaagcggctggccgcccggaacgtgttgacctgcgctcctttgagcgacagggcatccagcagataccgaccgtgcatctcggtcccgccgcacaccagatggaaaagcgtggagtggaaacttttctcggcaacctgaaccgggatattcgcgccgccaatagcctgatgcagtccatccgcagtgcgattcgtgggctgcaacgctggatcgcagacctgaatgaaaagaagcagattcttttggatgcactggaacaagccaaggagccaatgctgtccgacctgctggtggattacttcaacctccgcaacgagcagcgcagcgattggtctggcaaggcaaaactgaaatgcactg

SEQ ID NO: 6251 - DNA, 544 bp, Unknown
  gut microbiota DNA sequence
acaaatatacctgttaggaatgagttatcctataattaccgactgtcgttttagacgatttgagccaccaaaatattctactgaatactttatccgtttttaagattgccttggctgtaccgttccaatagacgactgtttttattaattcgatttgataataattgaaagggtaagggacgacgtggcagcgttcggctttctaccctttcaattattgtcaggtcgaattctcaaataaactctataaggaatcatatctttaaatacgtctatttatattacaccacatttaatcttccctactcgttcaaaatagaatcccaatgtacttcggtacattctgtaatcttatcattaaattcccgaatcatattttcttctattcctttatcctcattaagcattttagttaccaccctcttcaatcttgcagctttcctatctcctttctcactaaatgaatcaattatttttaatatatcttgcttcctgcttctatcttttaattcccaacgtaacaaacccattaatgtcatttcaa

SEQ ID NO: 6252 - DNA, 15646 bp, Unknown
  gut microbiota DNA sequence
tcattatagataatgttttccataatgtgcgtttcttcctgctgtcgatagttgagaatggctgcacgtatgccgacatcagcgaagtagtatttcgtctcggtaccaatatattttctgcctttcacatcatagcgcaaggcttcctctatcaagaaagagtctttcagatagtcaatgtattgttttatagtgtctctttttatggttaccccctgtacagattgaaaggtattggctattctcgttggattggttgacgaaccaatgcccgaggcaagcacacgcaccaattccttcattccttcaggattacgcagatggttgcgctcaattacgtcacgcagataggtcgtctcatacaaaccacgcaaatagtctgttttcttttcttccgtttcaagcaaagccacttgtggcagtcctccaaaagtatagtaatccaaccaagctttgcgtatatcgccaccaataccattaaagtactcgtcaaaggtgagaggccagatgcgtatctcgtcacctctacctcggaactctgtcacaacatcacttgacaggaaacgagagtttgagcctgacacaaaactgcgtttatcaagtaaaaaaacagcaaaatgttgcatcgtaaactacacaaaaaatgttttttagaacaaaagggtatgacatgtaatcacaccctacgttcaagggagtcgtttcaaccgtacccctttatggatttcgtcctataacttccattcaccacattatggggtcggttaaaagcgcccctcccaacccttatttcgtgattcctgatgtgatcgaaagttaaatacgttaaatcttcaccttttcgtatctaatcagaatccatacggtcacttttctaccgtttagagcgtataatactgataatcaactaataatacattcatacttttataacttcttttagtgtcatttgtggtttgttttgttatttatacgaacaactccacaaacacacgtagcctacggtgaaaaattattaatttaaaagaaaagtaaaaaagagtaatacctcacttcaccgagatcttgtcttaactttttgtaagctttattgaggtgagcttctaccgtacgtttcgatatccccaacaattcggcgatttcgtcattattgaaacctttacatttcagcatcattacttcccgttgttgttccgaaagtttatttatactatcgaacattacttcctgaagattctttctgaaaagttcgttttcaaccgccaattgttcctgaatcaacgattgaaatttttgataataacgctgttccaccaattttttacgaaacatatcgtaaatcagatttttagctatagtcgtgatataagtattaaaattcaactctaccttgattttatcccgggtttcccacaattttatgaatgtctcctgtacaatctcttctgcatcctcctgacgaaccaatctaagacaaaaatatcccaattgcggagcatacattttaaacaatcggtcaaatgcctctcgttcacctgatttaaattgctttaataatgtacactcatcactaaccataaaaatctgcttttggaggaacaaatatcgtttttttttaatttttctcctatattcaataccaataaatgaaatgcagcctttgttttttgggaataatatattacatttgcttccgtatttgaaatgtttcttcagggcagggtgtaaatccctaccggcggtgatagtccgcgactccctttggggactgaaccggtgtaattccggtaccgacggtgatagtccggatgaaagaagaggcaggacagtcgtgtgtcgttactgttatgattcgtatatatgccctgaagtcattcagggctttttttatatggaaacaaaggatcgggaatatatgaatcgtgccaggatattggcagacagaggccggggatgggtgaatcccaatccgctggtgggagcggtgatcgtcaaagacggccggataatcggtgaaggttggcacgaacgttatggcggcctgcatgctgaacggaatgcttttaagcagtgtaccgaagatccggcaggggctacgctctatgtgaccctggaaccctgttgtcactacggcaaaacacctccttgtaccgaggctgttattgaaaacaggattgcccgtgttgtcgtcgggctattggatccgaatcccttggtagccggtaaaggaatcgaaatgttgaggaaagccggaatcgtcgtcgagactggagtggaagaagaaaagctccgggaacaaaaccgggtgtttctgaaatatattactacccgtcgtccttggatcgtgatgaaaacagccatgaccctggatgggaaaattgcagcttataccggtgattcacactgggtgaccggggaggaatcccggaagaaagtgcaagaaatgcgttcggtgctgatgggaattatggttggtagcggtacggtgaaagccgacgatccactgttgaattgccgtttgaaaggcgaggtcaggcaacctgtccggattattgtcgacagtacagctgcaattgctaccgatagtcaattggtgcgtactgccgatcgctatcgcacattagtcgctcatacctctcgggctgatgccggaaaattagtacaattgcaacagaaaggcgtggaaacaattttatgtcccggctgtgacaaccgggtcgatttacaggcattgacaactaaactgggccaggccggtatcgattcggtcttgctggaaggaggcggtgaattgaacgaagctttcttgcgacaaggactggtagatgaggtttatgctttcatcgcccccaaactgatcggaggtaaagatgccaaaacacctgtcgaaggaaaaggtatcgcctggatgaaagaggccatcgctttacaatccgtttcgattgaaaaagtaggcgaggatttccttataaaaggttttccccaacccagtaactcatcacccagtaactcaacaactcagtaactcaacaactcagtaactcagtaactcaataactcagtaactcaataactcagtaactcaacaactcatcaactcaaactatgtttacaggaataatagaagaaatcggaaagatcaaatcggtgaaacgaggcagcaagagtgtcgtccttgaggtggaggcccggaaagtattggcggacacgcggattggggatagcatagccacgaacggggtgtgtttgactgttgttggtaaagggaatgacgggttttctgccgatgtgatgcctgaaaccatgaatcggagtaatttgggcttattgaagccgggtgatcctgtgaatctcgagcgggccttgtgtctgaacagccgtttgggtggtcatttggtagccgggcatgtagacggtaccggaaagatcgtgagcaaacaacaggatgaaaatgccatttggctcacggtgggggctgctcccgaaatccttcgttatattgtagaaaagggctctgtggctatcgatggggtgagcctgacgatcgcttatgccgacgagcaggttttcaaagtgtccgtcattccgcatactcaggaagagacgacgctggtgaaaaaggagataggagatgtggtgaatttagaaaacgatatgattgtcaaatatgtagagaaactgatgggacaaggaaaaccgaaggggggactgaccttggatttcctggtggccaatggcttttaagccggttagaatgattttgattatagataggataaaaaaataagaatatggaaggatttaaatttagtacgatcgaggaagctgttgctgatctgagggccggtaaaatgattattgccgtggacgatccggatcgtgaaaatgagggcgatctgatttgtgcagctgaacatgctacacttgaaaatgtcaattttatggcttcgtatgccaagggattgatttgtatgccgatgagcaaagctttgacgacaaaattagggttggaacagatggtggccaacaataccgacaatcactgtacggcatttaccgtttcgatcgaccatgtggatacgacaaccggtatttcggcattggaacgctctatgacggccatgaagagtgtaaaggacgatgccaaaccgtccgatttccggcgtccgggacatatgtttcctttggaggcgaaagctggcggggtactcgaacgtatgggacataccgaagccaccgtcgacctgatgcgtattgcccggctcaaagaatgcggcttgtgttgtgaaattatgcgggaagacggtaccatgatgaggacacccgaattgaaagaatttgccgtacggcatggtttgaagatgattactgtggccgacctgatcacttaccgtcgtcggacagagatcctggtggaaagagtgactgaggctgaaatgcctactaaatacggaattttcaaggcttatggttatgtcaacaaaatcaatggagaacatcacattgcccttgtaaaaggggacatcgctgacggcgaaccggtattgtgccgggtacattccgaatgtctcaccggggatgctttcggttccttgcgttgtgactgtggcgagcagctggcggaagctttgcgccggattgagaaaaaaggccggggtgtattgctgtatatgcgtcaggaaggccggggcatcggactgatcaataagttgaaagcctatcatctgcaggacgggggaatggatacggtcgaggcgaatctggcactgggatttaaggctgatttaagagaatacggtaccggtgcggaaattttggccgacctgggagtgaaaaaaatgattcttatgacaaataatcctttgaagataaaaggattggatggattcggactcgaagtggtcggacgtgaaccgatcgagatgacctgtaatgaaaagaacgagttctatatgtacaccaagtataaaaagatgggacatatattacatgtcagaaatgactggaaaaaagaagaatagaaattgaaaatagagattaaaagtgtaaaagttatgaatttactggaaggaaaattattagcagaaggacaacggatcggagtggtagctgcccgttttaatgagtttatcacggctaaattggttggaggagcaaaggatgcttttgtacgtcacggtggggatgaaaataagctggatctggcttgggtaccgggagcattcgagattcctttagtagctaaaaagatggtagaaagcggcaaatacgatgctgtggtttgtctgggggcagtgatccggggagctacgccccatttcgatatggttgctaatgaagcgaccaaaggtgtagcccatgtcggattgcagacaggggtgccggtgattttcggtatcctgacgaccgattcgatcgaacaggctgtcgaaagagccggaacgaaagccggtaataaaggtttcgatgccatgaccaccgcaatcgagatgatcaatttattgaaacaaatctaatctgttttatcgttgagaattacaaagtaattctcaacgataaaacttaggccagcgctttttttatcgcctccagtgctttttcgtagttcggttcgtgggttacttccggaacatattctacatagttcactttattgtctttaccgataacgaccacgcctcgggttaaaagtcgtaattcttcgatcaggaacccgtattttttcccgaaatctgtttctttatagtccgacaaggttatgacccggtcgataccttcggcggcacagtagcggtgaagggcgaaaggaaggtcgcaggaaatagccagaataacgacatcctggcttaactcggaggccatcttattgaaatggtgcatctgggccgagcataccggggtgtcgatagaagggaaagaagaaatcacaacaacttttccggcaaattctttcagggataccggttgcatctgttggtttattccataaaataccggagccgtttctccggttttaatcggtgtccccactaaagtcaggggatttccgtgcatagtaattttcatgttttccatcattttttcttgtttcttacgtttatgaatgattttggtttttcgtaaaaatacaaaaaatcctgcaaatttcagatttcatccgaatttgcaggatttttttttactttttatctttaattactttttacctctcttttgctgttgttgttgcattctttgcatttcctccaaacgttgctggaatttcgatttcttgaccggtttacttttagctagttcgatttgcttcagcaatttctggtcatcgacaaacttccggataatccaggtttgcaaaatggtaatcagcgtcgcgatgaaataataataactcaatcccgaagaataactgttgaaaataaacaggaacatgatcggcatgatatacatcatggtctgcatgcctttcatctgatcgttctgcggttggtttttattattcataatcatatagatgatattggtcgcagtcatcaacagacagaataagctgacatgattaccgtaaaacggaatggtaaagggtaaggtggcgatagaatcgtatgaagccaaatccgtcgcccacaggaagctctgctgtctcagttcgatcgctcccgggaagaaatagaacagggcgatcaggataggcatctggatcaacatcggtaaacatccacccatcggatttactccggcttgcttataaagcttcatggtagcctgttgacgttccatcgctttgtcggccggatatttcttggcgatctcatctacctggggtttcaatacccgcatacgtgcctgtgacatatacgatttataagtcagcgggaacaggatgattttgatgatcagggtcagtaataaaataataattccgtaattcaatgcggtgtggttttccaggaaattgaaaataggaataacgaaatatttattgaaccacgcaatccatttccatcccatattgatgacatcgggaaggtctaaatgatctccgtattctttcaataccttataggagttaggaccgaagaaaaactgcatgttgtattgctcgttggccgaaccgttataggctaaaggaatttcagcataagcatctttcagatatccgtcttttttactgatgttcgatttcagttccacatcactcaaaggctgttcgctgatcaggatagaggaaaagaattgttgtttgaagtctatccattgtaccttgttcggaagcgtctcctcttcatcggaggtcagggacatgttttcaacggcatcttcgctgaatttgtagtaaacaccggtataacggttttcaaaatctttacttttttccagctggggcatattgattccccagaaaagcgtcagaaacgaggaattggatgcaatgacatcccccatattgtgggtgatgatgctgaaatcggtcatatagctgtccggggctaacttgtaaaggtattccaggtatctgctgctgtcggcataaagacgcatagagagcacctgttcatttccctgggcataaagcgtcgtttctgtcgtactgggtgtaaagaaaaatttctcggtattgatctcctgattccgggcgtagaaattcatgccgaaagcggtttctccgtttttccacaacaccaaaggcagcgaatcgtgtgtccggtattcttttaagtctacatatacgatgcgtccccccagagtactgatgtgcaattttattttatcattttccagggtgatgattttgttttccgtatcgttttgtacgaaaatagaatcacttttggtagccaggggattggcggcagtcgtattgtccggcgttttttgtgcctgttgttgtgctgccagttcctgggctctgagtcggtctacccgcgcaatggaatcctgtttccgctgcatttcggccacttgctccttactcggacgcgtgagataggaaaagccgatgagaataagaaaaataatgactaatccggcgatggtgtttttatccataggttcttttaactttatgataaacaagctttgataaatgatacgaataacggatgaggtttaattacagtacttttatactccggatggaactgtactccgacgaaccatttgtgagcaggaatctcgacgatttcggtcaatccgctttccgggttgataccggtggtgatcatacctgctttttcaaaatcctcccggtatttgctgttgaactcataccggtggcggtgtctctcctgtatttctttttgtccgtaagcttcataagctttggaaccttccgttaattcacatttgtaggctcccagacgcatggtgcctcccttttcggttacattcaactgtgaatccatcaggtcgatcaccggatactgggttttggcagccatttctgtcgaatcggcaccttccatgtgcagcacgttacgtgcaaattcgatgacagccatctgcatccccagacaaataccgaggaaaggaatgttgttctcccgggcatatcggatagcgaccagtttccccgaaatcccccggtgtccgaaccccggtgctactaaaataccgtgcagatttttcaggcagtcggctgcattttgttcattcagttcttcgctgtggacccattcgatatttactttacagtcattgactgctccggcatggatgaaagcttcgacaatcgatttataggcgtcgtgtaattcgacgtatttcccgactaaaccgatccgtacttctttgctgtagttttttaatttatataggaattttttccaggattccagatccggttcgctgtttaaaggtaatcccaattgttcgagtacgatttcatccaacttttcttctctcatcttgatcggtacttcatagatggtagaaacgtcgatcgactggatgaccgctttgggtgctacattacagaaaagggctactttccggcgtaaatcggaattcagttcatgttctgtacgtaataccagtacatccggttgcactccgatttccagcaaggctttcaccgaatgctgggtaggcttcgtttttaattcaccggaagccgataagaagggtaccagtgtcaagtggatcaataccgatttttcccccaactcccatcgtaactgccggacagcttcaatgaaaggcaaagattcgatgtctccgacagtacctccgatttcagtgatcacgacatcatattcgcctttgttgcccaataatttgatgtttcgtttaatctcatcggtgatatgcgggacgatctgtacggttttacccagataatctccccgtctttctttgttgattacattctggtaaatccgtccggtagtaatattattggcctgcgaagtcggacaaccggtaaatctttcgtaatgtccgagatcgaggtctgtttctgctccgtcgtccgtcacataacattcgccatgctcgtatggatttaatgtccccggatctatgttgatgtagggatccagtttttggttcgcaactttataccccctggcctgcagtaatttagcaagtgatgaagcgataatgcctttccctagagaagaagcgactccacctgtaacgaaaacatactttgttgacactgtatcttgaattttattgatttatcaaagtggcaaaggtaataaattaaaaggttaaaagtgaaaagtagaaggtaaaaagttggcgaaaggtaaaagcaaagagatgggagtggttatgaggtatgaggcggggaggaagaataggagagtgggtaaaaaattaacgctctgtgaacaaaggggggaattgttctcctggggagaggctttgtcggcagagcgttaatcggctttgaggagccgctgtttagatcaggctgtcgagagctttcagtttttcctgaagtaaattcagccgttggcgggtattttcgattttagaattcaattcttcgatcaagccttgagatttactggatttggcgataaaaccgatgttgttttcataggtgttgacgtcgagttccaattgtctgattttggccaccaacttttctctttcgttgataattttgtaatccttataatcaccggcatccagtgaggacaattttgccctgaatctttccaggtcacggtcgtattcatccagattgagctggtcgaaccagccgtcgatgagatgtctgaattcttcctggatagcgtctttgtatttaataggtacaaatccgatttctgcccagcggttctgaaagtctttcagcttattgatatcttcctctgcattcccggacaaagtaaactggcgggcttcttcgataatcgcttttttcagttccagatttttgctctgttcagaatcgatgtctttgaaatggagttttttgttattgaaaaaagtatcacaagcttcccggaaacgtgcccatactttgttcgaatatttcttgggagcgggaccgattttcttccattctttctgataagagatgattctgtcggtcgtgattttccagtcggtactgtctttgatcgcttctactttttcacagagcttgatttttaattccaggtttttatcctgttcggccgacatgttcttatagaaatcccgtttacgctcgaagaaagtatcgcaggacgagcggaattttttatagattttattccgctccttttggggaatggttcccgaatgcttccattcttcctgtaggtcaataatattctgagtggctgtattccattccgatatagaacggtattcaccggcagcgatagctgctgcttttccgcaaatttcttctttgactttcaggttatcttcctgttcctgtttcagggattcgaaaaaatgatggtatttttcgttgatctggctagtggcagctttaaagcgttcccaaagcggttctttttgttctttgggaataggaccgatttctttccagcgggaatgcagtagttgtaattgtttgaaagctccggcgatatcgttgttttcaaccaatttttcagcttcttcacaaagagcgtttttcgcatccaggttccgtttcaggtccaggtcgcgcaactctttattgatcttgatatagttataaaaattttcaacgtgatggtgataagtctccaacaggccgtttaattgcccttgaggtaccattccggtattccgccagcgttcctgtaagtcccggaattcctggaatgtcttgtccagtgcttcttctttttgcaccagtgctttcaattcttcgataataccgagttttattttcagattttcttcgcgttcggcttccgtttgccgggctgtagcgttttttttatctttatagagcttgtagagggcattgaaacgttcccggttgtcgtttttgtattcgaaatcttccggtttatctccgtcggcagtgaagatggccaatgctttttcatactcctctttataccgggattcaaaaatctcgggtaatccttcaaatatttcttttaaagataccaccgggtaatcattgatcagcttttgggcttgccgaatgatttcctctgtacttaatatagaaaaatcaatttccggtacttctttcttttccttagcgttttcgacggccttgctttcagcgacaacgggttcgtcgtttgtactggtttctaagatttccggattcttgatttcctcttccgggattaaactgttttcttgctccatgatttgtcagcagttaagtgttcgcatatcaataggatacattatcataacctgctttccctgaaaaggaatttcgaaaacctttgagaaatacagcttctatgctctattgaactcacgaaaatactttatttttctgagaaagacaaatttttggatttacctttgtcaggtttgttgtagatcatgatattatttgactgatgtgtaaattattttgttccttttcagaattctttcaggagatttactgtcttgaattttaaatttagtaagaaagcttttatctttgactttttaatatcgagacaatgggttattatattttgtatggttttctttgggtgggtgggctgttgcctctgaggatcttgtattttttttcggatatttatttttatctgatttactatctgttgaaatacagacgccgggtagtacgggcgaatttacagcatgctttcccggaaaaagatctttcggaaattataaagattgaaaaacgatattaccggcatttgtgtgatttttttgtggaaatgtacaagatgtggcatatgtcggatgaacaaatacgcagaaggtgtaagtttacgaatcctgaagtgattcggcggtatttcgatcagggtaaaagtgttatcggggtattggggcattacggcaattgggaatggatgtcttcctatagcctttggatgccccgggaattcgacttctttaccttatataaacctctgcataatgcggtagcggataaaatgatgatccggctgaggtcgaggttcggggcgaaaccggtacctaaaaacgatattttgcgccggattgtcgaaaacaaaagaaacggacgcttattcctggccggatttatcggtgatcagacaccgaatagggctaacctgaatttttggatggaatttttaaatcaggatacgcctatattagtaggaaccgagaagattgcccggaaattcggtttgccggtaatatccctgaagatgcggaaggtgaggagagggtattatgaggtggattttgtcgatgtatgtagtgatcccggacaattggaacccggggaattgacccggatacatacacgtcttttagagcggtatatccgcgaggttcctgaattatggctttggtcgcataaacggtggaaacatacacggaatacggatggaagtgaaaaataaagaaatggctcgggttgcggtgatcatattgaattggaacggggaaaaattactccgtgagtttttgccttcggtggttaaatacaccgatcccggtttgggccggattgtcgtggccgataatgcttccgaagacgattcggtccggatactggaacaagagtttccggaagtggaattgatccggttttcgcaaaatcatggatttgcaggtggatacaaccgggctgtcggtttggtaccggaggagatcgttgtattgctgaatagtgatgtggaggtcgctcccggatggctggaacctttggtcgctctcctggacgaagaaccggggattgcagcagtgcaacctaaaattttggcttatacgaaccggaatcatttcgagtatgcgggggcttgcggagggtttatcgattccctgggttttccgttttgcaggggacggattttgaacgtgaccgaagaggaccggggccaatatgatgaggtgcgcgaagtgttctggtgtagtggagctgccttgtgtatccgccggaaaagctatctgcaggccggaggtctggatgagcgttttttcgctcacatggaagaaatcgatttgtgctggcggatacggaatcgcggttatgcattgaaggtacagccggcttcagtcgtttatcacttgggaggaggttctttgcccatgaatcatccccggaagctattcctgaattaccgtaataatctgctgatgctctataaaaacctgagcccgcgggagtggaaaagcaaaagccggaaacggcgtgtcctggattttatggcctgggtgatgtttctggtgaaaggggagtgggccaatgcacgatcggtgggccgggcttaccgggaattcggaaaaatgaaaaaagggtatatttctgccactattatcccgaagcaggatccttgtatttatccgggatctgttatttttgctttttatttcaggcatgttcgttctttttcacaactctggaaataaacctttgtctggcagatttgtctaaatgttaaatgctggaaaaaatcgaacccatggaattcatagaagatgacgagatcatccggttgtttcacgaaaggaagagagaacaggaagctttccggttgctggtaaataaatataaagagcgtttgtattggcatatacggaagattgtgatcaaccatgacgatacggacgatttattgcagaatgtgtttgtgaagatttggcaaggattgcaagagtttcgcaacgattcgaaactatatacctggatgtaccggattgcaaccaacgaatcgctgaattttctgaacgagaagagccggaaagtgtacgggaatagcgatgagatttctgtatatctggaaaatactttagaaagcgatacttactttagcggggataaaatacaaaaagaactgcaacgggctattctgactttatccgaacgccaacgtttgatcttcaatatgaagtattttgacgacatgccttacgaggatatggcagatgtgctgggagtggctgtcgggaccctgaaagcgacttatcacaatgccgtaaaaaaaatagaagaaaatctcaaaatagtggataccttaaattgattaagccatggaaaattttgacgataaatataaaaagaaaaatccgttcactgtacctgaggggtattttgacgaattgaccggccgaattaccggtcggatagaaaaacagaaagaagtgaaaaaaagttcttctcttcgcgggttgaagccttatatgggcttagtggctattttctttcttgctttaatggtggttcagattctatttcccggagcgaagaatactgacttgccggatatcgagggggaaaatgctattgtacaggaaatggaagcagaggatattttcgacagccagtttaatccgacaaatgaagaaatcatcgaatacctggcttctgaagtagataattatgagatgattctggctggaatttattaagtaaataagaatatgaagaatataattttgattgtgttgctgttgtggagtggggtgggcgtatgggctcaggacaaattgaccgacgagaaacggaaagaattcgatgcgcagaaagtcgctttctttacacaggaattggacctttcccctgctgaagcagctgttttctggcctttgtacaatgagatgcagaagaaaaaccgggaaatagaagccgatatgcggaaaagctttcatgaagtgagaaatgcgaaaggactgaaagaaaccgattataaagaagcgatcgggaaaatgttgggctatgaagcccggctccatgaagtgaagaaagaatattatcaaaaaatgatacaagtcgttcctgcttcgaaaatatggaaactcagtgatgctgagcgaaaatttcatcgacagttgttcgataaactccgccgcgaatcctgctctcagaaataaacctaaaaaaatagagtaaaagtttgcaggtttgtcaaaaagcactacttttgtgatcgcaattcagcgcagaacatcgaggagagatgggtgagtggctgaaaccaacagtttgctaaactgtcgtacgggttactgtaccgggggttcgaatccccctctctccgccaaattaatgaaagttgtaaaaagggatattcagtaaatgtccctaaaaagt

SEQ ID NO: 6253 - DNA, 8474 bp, Unknown
  gut microbiota DNA sequence
acaataaattgaattgacaatgcacagttgacctttactgtcgggtgcattgccggaatataataggtaaaataagtaataattcagattgactgttgaaaatggatagcattatcaattgtcgattatcaatttaaaataattatggttttcgaaaattttgaagtatggtttgtgacaggagctcagctgctgtacggaggagatgctgttgtggctgtagatgctcactccaatgagatggtaaaaggattgaatgaatccggaaatttgccggtgaaagtagtatataaaggtacggtgaattcggcgaaagaaatcacggaagcattcaaggctgctaatcatgatgcgaaatgtatcggggtaattacctggatgcatactttttctccggctaagatgtggattcatggattgcaggaactgaagaaaccgttgttgcatttccatactcagtttaataaagaaatcccctgggataccatagatatggattttatgaacctgaatcagagtgctcacggtgaccgggagttcggtcacatcgtgacccgtatgcgtaaaccccgtaaggtggtggtggggcactggcaggatgaggccgctcagaaaaaaattgcagtttggatgcgtgtcgctgctgcctgggccgatgctcaggatatgctgatccttcgtttcggtgaccagatgaataatgtggctgtgaccgacggggataaagtgactgcagaacaggtattggggtatcatgtcgactattgcccggtgaatgatctgatggtttattatcaggctgtcgaggataaggaggtacaggctttagtggctacttattttaaagaatacgagcatgatgctgctctggaacagaccggtacggaagcttataccaaagtctggaactctgcaaaagccgaaattgccttgcgccgtttgttgaaagataccggagcaaaaggatttacaaccaatttcaacgatctgggattgttcgatcagattccgggtttggcatcacagcgtctgatggctgaaggatatggcttcggggcggaaggtgactggaaaacggcggctctttaccggactacctggtttatgagtcagggattacctaaaggatgttctttcctcgaagattataccttgcatttcgatggggaaaagagtgccatcttacaggctcatatgctggaagtatgcccgttgattgcagagcagaaaccacggctggaagtacaccggctgagtatcggtatcgacagcgaaaccgcccgtttggttttcaccagcaaacaaggagaaggagttgctgctactgtcgtggatttgggtaaccgtttccgtctcattgtcaatgtggtggattgtatcaagagtaaaaaattacctaaacttcccgttgcttcggctttgtggataccgcaaccgaatctggaagtcggtgcaggtgcctggattttggcaggaggtacgcatcataccagtttttcgtatgacctgactaccgaatattgggaagattatgccgagatagcagggatagaaatggttgtgatcgacaaaaacaccaccattccggaattcaagaaagaactccgtatgaacgaagtttattatatgctgaataaagcactctgttaattgataattgacaattatttctgtcaattttcagttttcaattagagaaaatatggaaaaatacgttataggtttagattatggtagtgattcggcccgggcgatcgttgtgaatgcgctgacaggggagacactggctactgctgtgaaatattatccccgctggaaagaggggaaatactgtaatccggcgatcaatcaatatcgtcagcatccgcaggattatatcgatgtgttggaagcttcggtgaaagaggctttggcggcttgtcctgccggtacggcggaaaaagtggtggggatcgctttcgatacaaccgggagtacccctgcttttaccgatgccacggggactcctttggcgctcttgccggaattcgctgagaatccgaacgcgatgtttgtactttggaaagatcacacggcaatccgggaagctgccgagatcaatagactttgcggagaatggaatatcgattattcggcttatgaaggaggaatctattcgtcggaatggttttgggcaaaagctttacatgtacttcgtgaagatgagcatgtcagggcgaaagcatattcgatcgtagaatattgtgaatggttgccggctttgatcaccggagtgaccaagagtgacgatatcgtccgcagccgttgtgcctgtggccataaagcgatgtggcacgaacaatggggaggattacccagtgaggagtttctgaccactttagatcctttgttggccggttttcgttcacgcttgtttgaaaagacggagactgccgataaaccggtaggtaagttatcaccggaatgggctgaacgcctggggttgactacagaagtcgtggttgcgggaggtgctttcgattgccatatgggagctgtcggagccggggtcactccgcatacttttgtgcgggtgatcggtacatcgacttgtgatgtcatggtggctacttatgaggagatcggacataaactgatcaaaggcatttgcgggcaggtagatgggtcggttattcccggtatggtcggtttggaagccggacaatcgggattcggggatatttatgcctggtttaaacgggtgttggaattcccgttgaaagagatagtcggaaagagcgatttgctggatgaggagatgaaagagcggcttgtggcagaagcttgcaaccggattattcctgctttgacggccgaggctgaaaagataccggcggaagaaagtacggttattgctaccgattggatgaacggacggcgcaccccggatgccaatcagttgttgaagggaacgattaccggattgactttgggaagtaccgctccccgtattttccgggctttggtagaggctaccgctttcggttcgaaggcgatcgtcgatcgtttccggaatgagggggttcagatcgatagcgtgatcggaatcggaggaattgctttgaaatctccgtttgttatgcagacgctgagtgatgttttgaatatgccgatcaaagtctgtaagactgatcaggcctgtgccctgggagctgctatgtttgcggctaccgcggccggggtatataaccgtgttgaagatgctcagaaggccatgagctccgggtttgctatggaatatactcccaatgctgccaatgcgaagctgtatgaggaaatctatcggaaatacctgaaagtcggggagtttacggaaaaggcattgttttgctgattctggatgacgaagttaggaaatgccctttgaaagttttgaacggctttcagagggcaattttcttttaggggatgtctttgtcgttacatgcccggagcgtctgctgtgatgcagatggtgacccggttttcttccggagtggcgaatggctggacggtatcgccttgggagtcgacggtgatgcggtcggcggcaatgccttttgccgtgagtgcatcggctacggtctgtgcacgcctggcggagagcgtcttgttgatgcgcgggttgccggtctgcgcatcggcataacctgtcagggtaacttgggctgccggatgtttttgcagataagccgcaagtttatccactttaccggcttcctccgggcggatcactgccgaattgattttaaagaacacatttacctgtatcggcagaagtttctccatctttttttcaggcacgacaaccggtttcacttcctctttcggctcttccttcggtacggtctgtggcgggatagaagtcggggcagccttttgtgttttcctggtatatccctttccgaagcggatgctcacgccggcaagaatgttgaattgccagtcggcatttcctgctttcttcgagttgaaatggtcggatagggcattggcattaccttccaggttaaacgctacggcctcgcagatcctgaaatccattcccacccccaggcggcctgccacgaaagctttggtatcgtcccatagatattgtagtttgtttccagccttattaagggcaacagcgtcgtcgttgttgaaagccatgttgaccccgatacctgcaatcagataaggggtgaagaaacgcttgtgattgaatcctccgaggcagttggcgatgtcgaaagtggcatctgcgttcagctgtgcataattgaacttatactcctggtggggattcacccaacagcctttcccctgccatccgctgaatcctccgcgcaatccccacacgggtgtaaagcggtagcctgccgacagagctgctgccggcgacaccaggtcggaaaacttaccttctccgatcgtatgaccgatacctccctgaacctgcatataccaatgcgggcggaactcaattttctctgtctccttttgggcgaaaagagaagtggtgcttgctaaaagcaaggcggctaaaattgtttgtttcatattcatgataatggattttgtgattaattcattttcactccaacggatcgtctactttgtctttaaggcaaagactccaacgaccaaggtagcgaacaggtttaaaataccagtttagctttgtgttgtctgatgttaatatcctgcattttatttcattattgttgggattcttaaatttaatatattccaacgtataatttgccaccgggaattgtctgtatgttttcatgaactctataaacccctcccggttcaaaccttgtggttcgcaatccggttttgccgtgcgcagcagcatcagtgccgaatccggatgcccagacttcattcgatccataaacatggtgacgagggttttgacagctgcagaatcctttgatcctaccttcatgacattggggtcggtagcatagacaacctctgtcttcgggcccttatcgcggcaagcggcaagacccattgcaagcaacaataacaatcctagtattctcatgtgtaaaatcgtatttgataaaaaaggggggcgcattcacgccccctctgtcaatgatatatccgcttcaatatcttattgaccaatggttttcttaaccacaacaggaacaggaactttgaaagtaccccatttgtaagtaacctctaccggtaactcgatggtgatatctgcagacaatgctgtactgttgttatgccaggtgattgtaccgaaatctccacttgcgatcttatccgttgtcgtttcggaataatcaacccgtgcagcaggatacacgtctttcagtttcttaccgcctaacatgatgtcatcaacattgatagcgattgtttcaacaccatagtattcgaaatagttcatgttatcaggaacaaattcaaatcctctccaatctacaaactgcatagcgtccttcaaagcaagatcagaaccattgtctttagcatcttccaaagaaccatcggtagcctcgatagagattggacgcaagaacttcacatcgaatgtattgttggcaacatccaacttctggtcacaaccgttaactacatttacctgtacttttgcagtcagagtttcatttttacctagggctaagtgtccggcatagttcaatactgcttttgcaatgtcattatcttggtaagttacaaagttgttagtagcatctgcatctgtagtagtcgacaatacagctacagcatctttagttgcagtttccttaccattctgatccaacagggttgcattcaatgtcaggccgtctgtacttacgcttaatttgtagctattatcatcagaaccggatactatagtttcgtcaggagtaacgaatacaaattctttaactaacttatcagctgtgaatgaaggatatgtcgttttatcaacatcgctaatcagtactttttgtccaacaaatacgtcaagaatattcttttcgaatttgcaagttgcatcagtcttaggaacctcaacattgaagtgaacttcatagaatccaggagttcctttatcttctgcaaaccaagcacttgtgaatttagtgttcgcatcgtctaaaatggctcctgtaggctctacattcaattcggccggtttccaggtcaaggttacatatacatagtgtttcgtattattggcattttctcttacgaaacgaacgatgattttagcttctgttgcacctgcagagaatatattgtaagcttctgcctgagatacctcccatgccagtacgtcggtcatttcgccaccagtattatcctgttttctggaggcaatgcccaatctcgtcgtaactttctgtgcgttgatggttgtgttagtgaattgttccagattcggatcggtatagaattccaatttgaattcaccttcgaactcttctttagacatattcaatgcggtgtagataccttcctctactttagcccaattcaacgggaagttgtaagaagcaggagtacagccaactgtgtacttgtcgttgaaagtaaagtttgctacatgtaatacctcatcgactggagcaacttcttctttgtctgtgattttgaatttgatgtaagctacagctactacgttgtttgcagcagtatcaatcaagcttatacgtaccaacggcatacgaccgatggttgaacgattctgctcagcaccgaaagcctgttgtaaaccgttttgtgttgtttgtgcacgtaaaatagaaccgttcattgctgcatgagcactctgagaagtcttattgtcacctgcaaggtatccaatcaattcatacttgtacttgaatccgtaggctttgattttatcggttgaagccttttcatcaagactaatatgcttgctgtcagcatcatctgcatgtgtcgctaccaattcagctacgtcgattcccttagcattatcccaaaggatagtgaattgcgggtcattggcaatagcttcggcagctgtagttacaaaatgtacctctgtagcttgatatccttttgctgcatcggccaaaacaatatttttcacttcccttgctttaacagcggcatagtcggaagtaatcagggtgtcaccttctgcattcttggtacctacttgcagagccaaaactgtaacttcaccgtctttttcaatgtctttcagcatacctttgttcaagccggcctgaactgtcaatacacccttatttactttgaagtcagtaacctcaacattgtgtgcaccagctttagtatatgctttatcttcagcgatgaagaacatgttctcttttttcagatcgctgacagcagcatttgaaggattcaggtggtaatttgcaactaaattcggggttaaagagaaagtttttccttctgtggctttatcagtagaaaagtcgtcgtttgcgttaacagtaggcaatgtcagagccttgtagtagaaagtattggcagccatagcttcaattccctgatagtaaaagtcaggtatgaataccaaaccttgcagtttttcagaaatcaattttaagttaaccggttcgttatcgccatatttgatggtgtaaccgatgactgtaccggcagcatctttgatttctgtgatagtcattcccggaatggtaacttgaggtaaagttgctccagtcggttcgccatcatataaaatagctcccttttctccaatagtcaattttgttccatcaaattcagccggcgtgtcaggcattgtgattgtcggtgcagaaataacttcgcctttatcgttttttaaagtaatggtaacagttttaccctctgcttttgtttccaaagtatattgggtgtttccatccttagtatcggcatcagctatggtataagtcacaggattaccggttgccggtgtgatggtcagtgtgcgggttgattcgtcccatttcacatctttgacaaaagcaagagctccgaaatcttttttcagatcctcaaggcttttgtttacagcatcgattcgttcattcaggctgtcaatatcatcatcatagtctttacaagactgaattgatgtagagaagcccaacgctgcgcacaataaaactgcataaaattttgttgtttgtctcatctgaaataaatttaaaagtgattagtttctaaaagttaattgtttgtctatttaattttttattagctatgtacaatcagttttttattggtttgtataaatataagattaacatatcaatgacataaaataggaaaattcccatgtaaatcagatctgatttctatattgaaaagtttatagatatccaacaaaagcgaacgtttaatttgtgtaatcatataaccatcccgggaaggggtggtttttttatttgcatataaggtaattttttgattctcaaacgctaacacataattcatcataatttatttttttataaaaatcatcc

SEQ ID NO: 6254 - DNA, 137 bp, Unknown
  gut microbiota DNA sequence
aaatcagagggtttattccggttttcgcggtcgatctgactcaatatctgatattgcttcccgttcaggatgaaataaccgacccgctgttcactcatggtcagctgtaaggtctctgcaatattctgcatagaaac

SEQ ID NO: 6255 - DNA, 431 bp, Unknown
  gut microbiota DNA sequence
tgtcaacaaaaccagagggggtatgaaataaagaaaaaatattattgttgtactgcatgatgagtaagtggtataataatacaagtttatattgcagaaaaaagctgttgttcgtgagaggctgggaataatgattgagtggaaacaaatgacgatgcaggaagcagagaataaaatggaggtgcttcgggagatttttgatgtagttcgtctcctgaaagggagtgatctgcaggctgccggaatggaaagcaagcttgcaggaagagaaaatctttgccagtgttatgctttctggaataaagataaaagatgtgagaattgcatttcccttaaagcactggaggaaaagaaacagacatcccaaattgaatttctcgattctgatatgtatcaggtatttgcaaggtatctggagattgacagtgagc

SEQ ID NO: 6256 - DNA, 249 bp, Unknown
  gut microbiota DNA sequence
attaaccccgtaatttcgggaaaaggggtccctatgaaagtagggcgcagcgaagaggtccaggcgactgtttatcaaaaacacagggctctgcaaattcgaaagaagacgtatagggcctgacacctgcccggtgctggaaggttaagaggggatgtcatcgcaagagaagcattgaatcgaagccccagtaaacggcggccgtaactataacggtcctaaggtagcgaaattccttgtcgggtaagt

SEQ ID NO: 6257 - DNA, 519 bp, Unknown
  gut microbiota DNA sequence
ctttatcctattaccaaaggggtgagcaagcaattgctgcccattttcgataagccgatgatttattatccggtttccgtgctgatgctggcggggattcgggaaatattgattatttcaacccctcaggatttacccggattccggcggttgctgggagacggatcggattacggggtgcgtttcgagtatgcagaacagccgagtccggacgggctggcacaggcgtttatcatcggggagaaatttataggggaagattcggcttgtctggtactgggcgataatatattttatggccagagttttacacggatgctgctggaggcggtgaggacggcagaggaagaacaaaaggcgacggttttcggttattgggtgaatgacccggaacggtatggtgtggcggagttcgacaaggaagggaatgtgttgagtatcgaagagaaacctgcacagccgaaatccaactatgcagtggtggggttgtatttttatcccaataaggtagtggatgtg

SEQ ID NO: 6258 - DNA, 137 bp, Unknown
  gut microbiota DNA sequence
gcatgcagcagaagctcatgaatgtgaggataagatgcgtggctgccgattccatatatgccaataataccaacagaaagttctgtacaaaatatggaatatccacatcctttgtacgcaagggaagggcggccagg

SEQ ID NO: 6259 - DNA, 241 bp, Unknown
  gut microbiota DNA sequence
cattccgtttgcaaaggcaagaaagaggattgagacaatattctcacaacttacagaccagttcttggtcatcaggaactacgcgaaaataacgaatggtttgtttgccagaatcattggcaaaattagtgcacttaccattctgcaatacgtaaacttcattaacgacaagcccattggcagaattaagtatgcactaaattaattccgccaacaggtaagataagatattttgtggcaa

SEQ ID NO: 6260 - DNA, 43690 bp, Unknown
  gut microbiota DNA sequence
cataactcccgttcattttgggtaatttgtaataagtgtaatctgcacgatatgagccatcttcattaaaaggacgttcgtacggatttgcaaaataagcataactgaatggatctgttgatggtcctgtagaattttgcatagccatatcgaatcccagttggaaatgcaaatgtttgttcggattagcatctattttaccacttaagttatagcggtcgtaatctgttttttttacggcaccgttatcttttgaataaccgaaagatacataatatgtatttttctcacttcctcctgaaaatgataaataatgattggtagacaccgctgtccggaataacaaatcaatccagtcggtattcacagaagccagctcttgaatatatgcctcttgttcagtgacactcatatccctgaactcttcttttcccgaacggatcataccgacaatccccactacaggataacgatctcccccggcatatccctctgccgcaaattcatcccacaactcctgttcccattccaatttctcccgggaattcataagctccgggtcgcgtccgggtttcatcaccatcgaaacattcatagaataattcactgccatctttcccgattttccggtcttggtcgtaacaacaatcactcctccggcagccctggaaccataaatagccgctgctgccgcatccttcagaatcgttacattctctatatcattgggattgataccggcaactccattggtaaaaatatcgctgaaatctccggccttgatctgtcctgtagaaataagaggaatatttttttgcaagggaaccccatccacgacccataaaggctctgcattccccgtgatggtattagttcccctgatccgtattttggcagattctcccggacgtccggagcgggcttgtacactgactccggcaatctgtccctgcaacagcttatccatcgtcggcaaagctttattctcaaacacttttttatccacaacagctaccgatccggttgccctccacttggccgtctgtgtatatccggtactgacaatcacttcctccaactcgctgatatgcggacgcatcacaacattcaactcattcatctgcggagaaatcttaatctcctgagtctccattccgataaaggaaatttgcaggacttcagtttctccgggtaaatccagcgtaaaacttccgtctatcgccgtagaaacccctatcaaagtccctttgatcaacacagtaacccccggtataggttctccattttcatctctcaccgtcccccggagtgtccggaaacgaggttgttctaccctattttcctgaaggataatgatattatcctgaatcctgaaattcaatcctgttcccttcaacaccttttccatcactgtttccagaggtaaattttttacttccaaagtaattctacccacatttctggtaaacttttcgttatacataaaattgtatcccgactgttttctgatctcttccaaaaccttgacaaaagggacatccgatactttcagggaaatcagatcctgttgctgtcccaaagcatatcccggggacaaaaccacaaacatcagccatccgcagataaccgcaactctattttttttacccattttgagaaaaataaaattatacacttcttttcattatatttgtattataggatgcggttcggcaaaatcaatcaaacaagtttgttgtttttgctctcacctttcactatatttgtgggacatgtttgtataaaacattttgtgttaaagagattaggagaaaggccaaattcaccctaatctcttttctttgtgatatacacagtcctgttcactattttaaattgaatatccgttgtctgtgcgctaatagccccgagcaatacttccaaagatacgttccgggagatatcaccggtataagcttctccttcagcatcttccagattcataaaatgcacatcataatacctcgccacctgtttcaaaatatccggcaaagaagtttgtctgaaacagaacaaaccttttttccaggcgaccagttgttctaccgatacctccgacatcctgacacatgctcccgggcggcgtacatccagttcggcaacctgtccgggagccagaatcaaagtattctccctgccacagtccatctccacaacgccactttccaaagccgtataaactttgccattatcaccgaaagtattgatacaaaaagaagtacccaatacttttacattaaaattttctgtttgtacaataaaaggctgaccagaattcttggtaacttcaaaataagcctctccggtaagaattactttccgggcattacctgagaaaacaagcggataagtgatttttgaatctgaattcaaccacacttttgtaccatctgaaaatatcagatgataaaaagctcctttgggaataatcaaagtattggtctcttcagaattccgctttacagaatcactacaatattccaactgcccgttatgcagaatgacttttccttcgatttcgcgtacatctacattttcacagtccgaaaggtccaggattctccctgaagagagcaccaaccgtacagcttccggaaccgttgctgcaatttccggctgaggaaaaagacgggcttgccggtaaaacaaccaacccgttcccaacaataaacatattccggcagcaacaacaccgactctccaccagatataagtacgccaggccgtccgtttctgaaaatttttccattgacggtctatgtctatcttttcataacggtcagctaacccctccgggtcaatatgctgtagatttttaaatgctgatttatcacgtggattctccttcagccatgcttctaactgctctgcttctctcccgtttaacccccaaagccggcgcttgcaaatcagacgggccagctcaatgtatttctgaatagtttccatttattcctgttttataccataaaaacaattcagaaaaaaaaaggtatgagctaaaattgattttttttcacactatttacacaaacaagcaaaataaaagaaacagaatgtgctaatatttttctcaattccctgtaagccatcattttatgagatttcaccgtaataacactaatccccatttcttcagctatttctttattttttttccctccaagatgtaattttatgacagtctgacattgcggagtcaaacaccggatggcctcataaaggacataatgtgcttcttcatccaatacggagctgaacatatactcttctgattccagctctttcaaatatttctgtgaatattgttctctgattttatggtgttttaagtaattgagcgctttgttacggatagttttatagataaaagcatgcagcattatcggagaatcgtactgattactacccgactcccatacagaaataaatgtttcctgaaccagatcttcacaaatatagctgtcttcaacaaaacgaacagtaaaagcataaaacttggagaaattctccttgaaaaacttttcaaaagacagaatttctccggtaccaaaccttatctgtttatctttattcaatggcacctcccaaaagatgttctgcaaaataatgccgtaataaattaaaataatacggggaatctatactgtggtcagctcccggaataaccatcatatcaaacaatttatccgccttgatcaaagcatttgccagacggaaggtattcgcaggatgtacattaatatccatatcccctgtcaccagcaataattttccctttaaattcgctgccaattccattattgtaggaatcttcgattcaaaaatatatttttttataccatctgcatcttttttgaccttcatttttactccatgatacatctctccccaccatttggtataaatattattgtcatagttaccggaagcagccacagccaccttgaaaaagtcgggataagtcaggattgctgctgctgccatcatcccacctcccgaatgtccgtatattcccacccgatcccggtcaatataagcataacggtcggccagttgctcaatggcaaatttgcaatcggccaaaggataatcccgcaaattaccataaccgaaattatagaaatttttcccccggaacatagaacctccccggtatccgatatggatcacaataagccccaattgtgccagagcctgatttccattatcatccatagaaaaagcctggggtacctgatcctcctgaggcccaggataaacataaacaaccaagggatatttgcgggtagaatccatgtcaaagggggtatacatcacgccatacaaatcagttattccgtcagctgattttaccgctattttttgcggttcccgccaaccggtgctatacaataaactcagatccgctttttcaagcggtaaaatctccttccctttcatatcgcggacaaccgataccggcgccatatccactctggaataaacatccagcaaataatttccctgtttggacaattcgatagaatgatatccattccccggagtcagcaaagtcaggccggaaccatcgaaatttacccgatagaaaaaacgataggcggggtccatccctttttcacgtccatacccttcaaaaataaaacgacgtttcagtttatccaaatgggaaatcctgcaggcggtaaaagtaccggaagtaatggtatttttcaattttccatatttatcatacagataatattgcccccaaccggtacgttccgaccaccagataatatcttccccaccgttcagaatccggcaatcaaacaattgttcggtaaaataaggcatggaagtttcgctgatcacttcaaaaacgtctcccgtacgggtatccacccggcataaatccattttatcacaagtcctgcttttacgggtaaaataaagatcctccggacaattttccaaatcagatgcaacaatccgaacctcctgatcggggtatttatcaatattcacaacaatatgttggcaggtttccggataaaacaaatgcagatcgtaggtaaaaacatatttttcacccggcatagggaatttataagtacgcaatttaggacgtggttcggccagattatcaactacccagcaattttcaaccttacgcctgtcctgacgtaagcagtaaaacaccttagaatttccagcccacacaatattgggagttgtatttttatccgaatcgctgtccttctgattactataggaataatacttctctccatctgtggtcaactgtaccggaaccgtatcctgcctgttcagcagatacagattgtgccggtaagcatatatactgtaactactgtcaggggaaaactttaaccaataaggggatgccggaggataaaaacggcaggcttgttcagggtccagttttttcagctcccgggttctgatattgtaatgaaaatccagtcctcccttggaaaaagaaaaacaatacggatccccctcatcaaatttcagccctcccaatcggaaatctttgatattaaatgatatccccgtagcttgggttaatttaccgatcatatcttccatgtcaaacatttccagtttttttttacggaccggatcgaccagatagtatttagcacctccgggcgtaatataattataccaaaacatatctgtcccggatatccaggaaggaaatacactcaaagagtgataatacttcttcagattttcttccgaatacttgtaacaattttttaaatctgctttctgtgcataagaaaaaaaagcacaacagaaaaaagcgaaaaaaaggatctttttcatcatgtttacattttgcgttctacttattatcatatacacatactttcataaaggccaataaataaaagtacatggtgaccaaaagtagtaatctttatttattctttttataatttggacaaaattaacaggataaagtgcctaaaatactatctttgtagcagcatcggtatccccgcatgggaatttgggaattcggtgaaaacccgaagctgtccccgcagctgtaaagtcattactgtcattttgcaggtcttttcaatgatccactgaaacccgggcgttttgggaaggagaaaagatgacaagccagaaaacctgccgatcatagctaataaacaaatttctttcggaggaaaagagcatgaaaaagatttattttttatcactggtatttaccatcggtttttgtctggccttaggttcctgtcgttcaggtaaccgcaaaaaacaaaaccctgtcgctacacaaacagatcgttcgaatattcgttatgcacaaggcttctggctggaacaacacgaaaattaccgactcctccatatcaaagatcctcaaagcgaaaccggttcggaatataccttcgccctaagacagcgaggcacacatcctgagcttcccccgcatatacctgtactcgatctgccgatccggggcgtcatctgtatgacttctttacaactctctaattttatcaagctcggagcaacttcccaagtcgtgggaatcagcagtacccgctttttgaataatgcaacgatcaaacaacagttagccgaagggaaaactcagaaaatcggtatcgagggtaatttcgatgcggaaatcattatgaacctcgctcccgacctgatcctcatctctcccttcaaacaagggggctacgacgctatgaaagaagtagatattccactagtccctcatttgggttataaagaaacgactccattgggacaagccgagtggattaaatttgtcggtcttttaatcggagaggaagaaaaggcgaataaaatattcaatgagatagaacaaaaatacaatgatctgaaaagattgacagcccgggtcgaacaccggccggtcgtactcagcggtgaaatacacggaggaacatggtatgccgtaggaggacaaagttttctggcacaagtgttcgaagatgccggagccgattatttcctgaaagacgatccccgttcaggcggcgtatatctcgatttcgaaacggtatacaatcaagccgaccaggcagattactggcgcatcctgaatagctacccgggacaatatacctacgaaacacttttagcccaggacgaacgttacggagactttaaggctttcaaacaaaaaggagtgatttattgtaatatgcgtgaaaaaccctattacgaaaatatgcccatggaaccggaattattacttgccgatttcattaaagtgtttcacccggaattattaccggattacgtaccggtatactatcatcagttaaacgactaatcactatggcttcaaccggacgaaatacaacttttatcctgcttatcatgttaagtatagttgtattcttattcctcaacatggtattgggttcggttcgtataccgatgagtgcggtatggcacatcttcaccggtacaggagatgagcctcaaacctggcagaatatcatttggaaatcgcgttttccgcaggcattgaccgccttggtcgccggagcaggtctgtcgatcagtggtttgcagatgcaaacggtatttcgcaatcccctggcaggaccttctgtattaggaatcagctcaggagccagtatgggagttgctttcgtcgtacttttttcaggtagcataggcggagtagccctcagccacctcggtcttttcggagaagtggcgctttcgatcgctgccgtcgccggttcgttatccgttatggcactgattgttttcgcttcacataaagtaaaaggaaacgttaccctgcttattatcggagtgatgatcggttacctggcgaatgccatcatcggtattttaaaattttttagtgtagaagaagatattaaaacctatgttatctgggggttgggaagtttctcacgggtatccggtaatcaaatgatgctttttgttacgatcatggccatcttgatccccttgtcttttttgttggtgaaaacattaaacttattgatgctgggagatggttatgcccggaatctgggattgaatatcaaacgggccagagttctggtgatcacctgttcgggcgtattgacggctattgttacggcttattgcggtccgatcatctttttaggcttggcagtccctcacctgtgccgggctgttttccaaacttcggatcaccggcttttgatgccggcctgtctggttatgggcgcctccctggctttggcctgtaatctgatcgcacgcatgccgggtttcgaaggagccctgccggttaattcggtcacggcactcatcggagctccggttgttgcttcggtattattccgtaaacgtaaaaacgaactgaatgaataagaccgctaccatacaactccgtaacctgacgatcggctataaagggaaagtacgccctaaaattgtagccgaaaatatttgcagtgatatttatgccggtgaactgacctgtcttttaggaacgaacggtattggaaaatccaccctactgcgcaccctttcggccttccagcccaaattaagcggagatatttacctggctggaaaaaaattggaaaaatatacggacaaagccttatccacggtgatcagtgtcgtgttgaccgaaaaatgtgatatccgcaatatgacggtccgggaattaatcggtatgggccgtagtccttatacaggtttttggggtaaattaagccgggctgacgatgagatcgtggataaagcgatcgggctggtcaatattcatcctctggcttcccgaatgcttcataccctaagtgacggtgaacgtcagaaagcaatgatcgccaaagctttggctcaggagacaccggtcatttatctggatgagccgaccgctttcctcgatttcccaagcaaagtcgaaatcatgcaactgcttcatcacctgacccgcgaaaccgataaaacgatttttctttcgactcatgatctggaactagccctccagatcgccgataagatttggctgatggataaggtgaacggtatcacctccggtacgccggaagaccttgccctggaaggatacctcagtcgttttttcgcccgcaaagggattactttcgacatggaatcaggacttttccgcatcaccaacaattatcggtacgaaatccgtctgaccggacacggctatcgctatgccatggtacgtaaagcccttcaacgaaatgagatcctggccaatcgcgatattgactcagctgtttacattgaaaccaacaggcagcctgatcaattcatattgcattttcctcaccaggaagatattatagtccatacaatagaagaattattagaaaaactaacactgtaacatacagagacaggggttttgtgctaattcgatcgacgcattgttggaataaatactgtcctgtctcaaataatccggtcgaaatatctatatacaactccctatttttagggtatttctctgatcaatttcactaaaagaggggattttccaacccgatagaatcgcgtattttcgttccgatcttattaattaaaacatgaaatatgaaaaagattggaatattttacggttcaacaaccggaacaaccgaatcagtagcggagcagatcgcttctcatctgggggtcggtagcagtgaggtgtacaatgtaggaaataccgatgctaaagtagctgaagagtatgaactgctcatcttaggaagttcgacctggggatcgggagaattgcaggatgattggtatgattttctggaacaattagccggaaaaaatctaagtggtaaaaaaatagccctattcggttgtggggatgccatgtcgttcggatctactttctgtgatgccgtcgggatcatctatgaaaaattacagggtacaggagctacgtttatcggaactgtcgatccttcggattatacctatgatgcctccactgccgaaatcgacggacagctggtcggattattgatcgacgaaaacaacgaagcggataaaacggaactccgtatacaaaactggaccgatgcgttgaaaaaagaaatttaataccctgatcatggatagttgcattttatccggagacatgaaaatattcgtacaccatatctacgaattacaaaaaggtatacggtacatggcattgtgtacgatagacaaaaccgatgaatcttttgccatacaaagattagaaaaatcaggtcttgaatatgaaatctgtcccatcaatgcccaccgactgaacttgtttttcggaaaaaaagaatgtatcgatattgtccggttaatctgcaaccgtccattaaacctgttaacccccgaagaagattttatcctgggtaccatgctgggatatgatgtgtgtcagcaatgcgaacgttataaccatcgtaaaactttaatccaaagtgcctgataattaatcataaggactcttcagaaatcagcatcagttcaattatacactttttttctccctttatataggaataacaaacttcctcgcattttttcaaaaggaaggagaaaaacggatgatcggccggtaacatgttccataattcccgggctaaagtcatttcagaaatgcgggcacaaatcccgtcatcacaaccggcttccttcgccaaaccgatgataaaatcgcggttcataactacattccggctatgcgtatccccatgcccctcggccaatttcaccgctttgccgatcataatccccatcgttacccgcccgataccttcttcctctatgattttcaaggtctcttcgatataattaccataatggacaaaagcctgaggtatcatttcagggaaacgttcacggaggatccgctcacttttagctcccgaattaatgacgatatgccggcatcccaatgctttagctacctgtatttctttacggatggtcgcaacgaaagcttcggacgaaaaaggacggaccactccggaagtaccgataatggaaattcccccgacaatacctaatttcggattgaaagttttgagagccagttcttctccatcgggtaccgaaatctcgatgactactccttgtttcggtatacgatgagcttccagaattttttctgtctcggcggccatcatctttcggggagtcggatttatagccggttctcctatctccaaacccaatccgggcaaagttacgatacctactcctttccctgcggcaaaacgaataccggtttctttagaaagcattacttttgcacagatttcccgtttattagtcacgtcaggatcatctcccgcgtctttgaccaccgtgcagattatactctgtccgtccttctctgtacggctcacaggcaattcgacttcttcgccgtcaggtagagtgatcgtcacctgattcaacacttctcccgtcagcagagtcgataaagccgcttttgcagcagcacaggcacagctaccggtcgtgaaaccactatgcaatggataaaatccgggcaacagacgttctatgcggtgccgcaaaccgttgttcccggttacgacatagaatccctcgggcaataccggacgtttgatcacgacaaccggaatacctgatttccgggcagcttcgaccttttcacggaaataaccggaccggccgctctccttggtcaggatagcatcggggcgtaattgcaataacaactccctttcctcttttccctcttcccaaaaaatcagcttccctgccggaaatccatattttaaagccaattgccgggactccggccgatcgagtacccggaaccaacaaggattttccaaccaataagccttcaatttaggtatggtctgcacaccggacaacgccagtaaattccgtattccctgatttttcaaccatacacaagcttctgcatacgaatcacaccagatcaggtccggatcacggggaggataaatccgttcgtaacgaacaaccggaatattcaattcttcagcagcttgtcctatattcttgtgcagttgttcggcaaacggatgagcagcatctaccaacaattgaatcccgtgttcccggcagaaatcgatcatttccttcacttccatagctcccgccaaccgaatgccgtgtatacactccacttgctgtccgtttccccgggttgaataataataagtttgcccggcttcatccaaagtctctactgcagccctaccttctgtagttccaccaaataccaatatcatttttacctttttaaaacaaagggacgggggtaatgtttcatttacaaacgatggattatacctaaactgatccctgtaatacgggcaagttgccgtaatccaatgttcggattctgtttcaatactttcagcacctgtctctgttcaactttagttaaaatctcaaaactttccccttccaacatttcttctaacaatttccggacctcatgatctttaaattgatatcccgcttccatgaattccccgtcgtcatcttctaacatataggcctgaaaatctgctttactatcgaaaaacaaagttaaaaattcagtggaaacaaaagaatccaccggattaaaatataccgaataactgttccaccggtattccgaaattttatgacacaaacctgctttcaagggattttgcagcacataccgaaaacaacgcaacaagtaaccctgatcttcaatgacctcacttttaaaacgatcttgaaaaagataaccctcccgttcatatttatgattaaaccatatcgcatacgccgtcaaaatccgatgaatataaaaactcaagcgactggtttttacgataagatgaatgtgattatccatcaaacaaaaacagtacactttgaaaaattcaccagcctgtgatttcaaaagatcgagaaacatccgtcgatcagcatcttcatggaatatcaacatacgattaacaccacgttggatgacgtggtatacacctgtattggactgttgacgagcctgccgggacatttttttgccaatttaactacaagttaaatttacaaaaaaaattccagaaaacaaaatgaaacattatccccgtccctttgttccacgaaacaggtgggtgaaatggttggaatagagttttgacaaaccttcccggttaccgattgcttcgccgactacaatcatggtggtcaaggtcaaattgttctctttcattattgccgccaaattacggagttcgccccggaaaatcttttcgtctttccaggtcaggtgataacaggctgccacaggagtctcgggaggataacattccagtaattcacgctgtacttcttcggcaatcgaagcactcaggaaaatgcacatcgtgctttgtgaccgggccaacagatggagtttttccttttccggcatcggtgtacgcccctctccacgggtgagaataatactctgaaccttttcaggtatggtaaactgtgaacgcaatgcagcagcagcagccaggaaagaagagattcccggtgtaatccggtaacgcataccgtaccggtcgaaaaaggccatttgctcctggatagccccataaatacaaggatccccggtatgtaaccggacaataaataatccccggtcataaaactctttcatcaatgcaaattgctcttccagggtcatggaagccgagctacgcacagtcgcccccggctttgcataataagtaagctcgattggcaccagacttcctgcataaagaattaaatcggctttttccaataaccttttcccccggacagaaaccagttccggatcaccgggacctgccccgacgatctcgataaaaccgcttcgttccgcctctctatccagagcaacggcaaaagtaaaatcattccccggagtaacctgtcccttctgtttttccagcaataatttcgtattcccggcacttttcaaagcagttgcttcggaaacactataggcgcctgtcacctcgaataccttcccggagggattcggtacttctatatccttcagttcctcaggcctgtaaatctgcattttagcagacagattccgaaccagatcggcgaccataggttcatcttttttcaactcaatagttgtcacgaccttaacagctaaaggagaaagtccatgccgtttcaattcatcaccaatataagcccaaataccggtcgggttacactgcttacggcatcctacccccaaatgaagtacagccggatgataatataaaatcggtgtttcacattcatacaaacagggagtaacggcaataatcagcccataacgtcctgccggaatatcctcgaaatgataatagacatccacatgggccggtcgtgaatgttcaagccggtcggttccctcatcgcgtatatccaacaacagggccgtcggccgctggttgacgaaaatggaaatcagctcattcaaggaacgccggtattccattttccagccattctctttacctaacaaatccaaagcccacaatccggtattatcactttgggtcgtaaccacaggctgagcccctaatatacgggctaaccgttcggtcagggcatttgcgccaccgacatggccggccagaaccgacacaacaaaatgtccggtagcgtccacattgactacggcaggatctgcatatttcgaagtcacacaaggagcgatcgcccgtacacaaattcccatcgccccgataaaaacaaaagcttcgtaatccccgaaatgccttaaggtaaaatcagtgatcgaatcgatccggacacacccgctccgttccgatacagagaacaggtccacttccttacctagttcttcccggataattccggcagttcgtgccccggcatccgaagcgattatcatagctgttttcattgtatttattatcatatttaattagctacaattataattcaattatattctcatccaataaagtcattttttccacaccggaatctgtcactaaaaatgtattttcaattcccacggctccgattcctgccaatacgaacttcggttcaaaagcaaaagtcattcccggttgtagtatatccttcgagcgggtggtcaatacaggcaattcatttatttccaatccaaccccatgtccgacgaatttcgcctgcaaatgagtacccataaaacaatccttcagcccttcttgtccggccattgccaaagcatccctatacaattcggcacaggacaccccgggttttgccgttcgttccatgcgagcctgtatttccaaagcgacacgatgcacccggtaggcccggtccggtaatttcccgattgaaaacacccgggtcatatccgtttggtaggcggtatagtttcccgacatatccgccattaccgtagttccttccctcaacaaagtcccgttcgctcccaaaggccccgaagcatgtattcctttcccccccaaggcaaagtcaaaaggggaaggttctccggcattttctcctgccaacagacttcccataaagatatccatattcgaaccaaaagcccggaaataacccagggaaccatgcatccgcatccgcttttcaatctcgatctgcaattcaacatccctcatcccaggccggtaacaggccggaatctcacgataaaccgcctcatgcctcctggcagagatacgcatttgctctatttcccaaggcgttttgatcattcggatgtgccgtatcagggcagaagcgttacccgttgcttcagcccggaatacatgttgcaaacggatacattcattataagaaagctcgtcctcctcaagaagtagcttgcggggcattgccagattcaggtcccgaaaaagttccggcatttgttccggtttccggataacatgtacctgatttgtttcgggtacagtcagtcgtttgacaaaccaataaggccgtccctccgccggaagataaaaataaccgttaaacacctgccctgacacatagtacaaattcatattcatcgtcagcaaacatccgtcagcttcttcctgccgcatagcctgctgaatccgtcgccatttcaactccaactcgttctccatttgctttctttccatctatcttcaaaacatactgataaataacatcacattcaatacggtcacaatccctcccaaaatatataagatccattttgtagaagtccggtttttatatttacccatgactttcccggaagaagtcagatatacctgcaggaaaatcgtaacgggcaactgaatactcaggatcatttgggaatagataagtcccataaacggattagaaaccagcatgataataatcaatgccatcaccagtgaaagcaataccccccaacgggaatgactgtctttgatgtcgtaaggctcccggtaaatgccggcaaagatcgaaccggcagccattcccgaagtaatggtcgaagcgatgccggcaaacaacaaagccacggcaaaaatcacagcggcattatttcctaaaagcggttgcaataaagcactggcatcctgtaactcattgaccgtactaccgcttttgaaaaaagtggctgccgccaataggatcatggcactattgattgcccaaccgatcatcatggataagaaagtatcccaaaactcataacgcaactgcctgcgaatcactttatcgtcttccagattccattgccggctctggattacctccgaatggagaaaaagattatgcggcatcaccacagctcccaaaacactcatgatcacgaccatcgaacctttaggaaaagaaggagtcacccacgcgagaaccgcttctccccaatcgatatgtaccagggacagttcgtaaataaaagataatccgataatagacacaaaagcgatgatccaacgctcgatcacccgataggaattggtaaaaagcataatacatacgaaaacggtagtcaatatagctccgatccgcaccggaataccgaacaacatttccaaagcgatcgctcctcccaaaatttcggccagggaggtggacaccgaagctcccatagccgtccacaatatcattttagcatatttcggccggatataggtcatggtggcttcggaaagacacagcccggtagcaatccccaagtgagccacattgtgctgcaaaatgatcaacatgaccgtagacaacgataccatccacaaaagggtataaccataatcggcaccggcagccagattcgaagcccaattccccggatcgataaatcccacagtaaccaataaaccgggaccgatatattttaaaatctccagtcctcctaaccggggatggtgttttgccgttttcaacgacttacggataaagtgaaacataaacattcatttaaattcaattttacgcctctgcacaagctttcaataccgttatcggattgtgatcgtccacagcgatccggcattcgtccgtcagacggaaaccggaccggaccgcttcctgacgaaataaattcagactctcttcggaaaccgaattaaaaacgacaatacctcctacaggcataataccggctaatatcgtcaggatacgggcaagttttccaccgtgtccaccgataaaaacagcatcaggaaccggataaaccgataaatcggcttctgtaaaatcaccgataactcccgttattcccggagtaccgaatttccggctattcttttcaagcaattcacgcccttcctcccgaacttcaaaagccgtgatatgcaaatgaggaaattgcaatttggcctcgacagacacggaacctgtacaaaaaccgatatcccagaagctatgccggttatgtaaatccagcatactgagtgtaagtaaacggacaggcatcttggtaatcattttagcacgcccgtccaatagacaaaatcgattttcaggaataccgaaagggcggctccgcagcccggtcctttcaagcatcagacaattcggaaacgcaaaatccgaacgcaacacctcaggcaattccatcgtccgtacccgttcggtcacatttcccagcatttcaccgatatgcatccgatagccggcatacccgtattccaacatatgcccggcaatcgctaccggagtatgctgacggtcggtcaacaccccgatcttttcctttcctgcaatcaaagcccggtcgaactcatgccacggacgccccgtaagggaaacgacctccatatcctgataaggaatgaccaaacgatgagccagcatttgtaaagaattgaaccaggggaagacttgtatctccgcttccggtaaacggctctttaccgtattggcaaatccgaaaaaaagcggatcacccgaggcaaaaaccaccacttcgcaataagcggtatatttctcaaaaacctcctccagaggtacggtgatatcgatccaaacatactgttccggcagacggtcgcgcattaactcataatgacgcttccccccggaaaatacccgatgagttgtaatgatctcccgaacttcagcctgaaattccctttggccattatcgtcgatgcctatgatatagaattttttcatttatctctattttcattccggattcatcagaaaactatcggttcaacaatcgctggaattccttcaaatacaatccgatctgatagccgctgacaaaaccgtggttaaccgataaagccaccggcatgatccgcttaccttcccgttcttcgatcttaccgaaagtaaaaatcggaatattctggtgaggttctccgggaatagcaagttgtacatttgtaaaacgataccagggattcacactgatcagcaaaatatccctaccttgtccggcctcattatgtacctctccttctccacgctttgcagcctcgataagaggccgggcagcagccaggaaatcttcgaatgtttctatcgcaggcaaacggacagaacgataactgccgtcggcattttgtacaggcgtaaataaatcgattcgttcataaagtataacctcttctcctacttgccggtaacgaaattcctcgatgcgattagccgccgttacagctgcatgcatataatacaatgaaaagggctgttgtcgttcttttgcctttcggtaagccgtcgtacaatccacctcaaccgtaacagaaatcatcggattaagaaaagtcctgaaaaacaggtattcttctttccgtgtccaattttgtatatcgattaccttatccatcctacaccatctttaaaggtctctccccggcaataactgccctgcatcgtcgaaacaaagaatggcattcacaatcgttgcagccagattgctccctcctttccggccttcgataataattttaggaacagccgtaaaagatttcagcatatgcttggattcacgtacgtttacaaaaccgaccggagcaccgaccacgccgacaggacaagcctttcctctccgcatcagggaacacaattccatcaatgctgtcggcgcattaccgaaaacataaagtgcatcgggatgctcttccgtagccagccggatacctgcttgtgtacgggtaatattcatccgggaagccatctctgcaacccgcggatcggccaaataacacttcacttccaaacctaaacgttcgagtgcccctttccggattcccgaagcagccatcgtgacatccgtgacgatagtctttactttccccccgcttaaagcccggtagatcgaatccaccgcctcctcgtcggcatagaatctattttccatatcgaaatcggcagtggtatgtatcgtatgcaataaaacccatttgcgatccagcgggatatcgggatgcttcaactccgaagcgatcgtccggaaactacggatcatgatctcctgacctggctttgaaacaaaacccccgtccccgtgtttcattttttggtaatatccgcggggggtgatcatttttccttcccagttataggactgggaatttcccaaaagtactacggtgaacatatctatctgttccggatcgaaatcggccagggtggtcacggttacctcctgctccggccgtccggcctgacggacataacccaccggggtattccctgcccgttgttgcagaaagatttctttcagacggtataattgccaataacgcccttcgcttttggggttgtatacagcagtgataaaatcggcagcggcagcagcctcaatccgtttttctattttttcccagggagtcatcaaatcagacagcgaaatcacacaaaaatcatgtccgacaggtgctccaagcaaagaagccgctttctgaaaagcactgataccgggtaatacttcgatttcgatttcagaacctctttcccgtttcatctcccagactaaaggcgccattccatagattccggcgtcaccggaactgatgacacaaacggttttaccctgttcggcatacccgaacgccatctgagcccggtcccattcttttctcatcccggaatcgacacactctgccccttccatgacaaagggctgtataaaagaaaaataatagttatatccgaccacgacatccgataccgacaccgcttttttcactgcaggagtaatatcatcctcacaaccgggcccgatcccggctacatatattttaccgtttttcatttgaattcattttaaagacaaagataaaaataatgtgataatccatttcatctattattataaataaagagacaaggattctgtggctatctaccacaaaacccttgtctctttatgcatttttaatcaaaaacggtaagatatcgttccggtaaaatttctcggtttaccatataccgtcgtacttttaaaatattctttgtcaaaaagattatccacatttaaagccaaagtgactttttgctttatcgtatagaataatcctccgtctacaagaaacagagcagggttgtaaacccggttggctacatcggtaaatattttatcctggaaagttccgctcaaatggaaggacaaatttttcaataatcctttaggtatggtataatcggcatacacataaaaagtagtgcggggaattcttgtagcccgtacatttttaccaggatcggtatattccggatagtctttactctgattgattttcctgatccggtagtcctgccagcccaagccacccgtaacagccaaggtagaaacgggatgtaccgtcaactccagatcgaatccccgcgaatcggcagtacccacctgagcttgtatcgttttttgaaccatttcaccggttgtctcatctttctcctcctgggttcctaaatttttcaccacattatttttccggatatagtatacacttcctgaaaaatcgatccggtcagcccacatataccgtactccgatttcagcctggtatcccttttcaggcttaaagacttcacctccgtctttagaaggattaaaccgctttccattgcggtcgagataaattacccggctactgtacatcgtattataaggtttgaaatgagaaccaaaagaagcatagagagaaatctcctccaccggaatatacactaaacctgccctaccggtaaaggcagaagtctttactttcttccattcactccggtctgcctcatcgtattcctgccgtccgtcttttactttagcagtagcagtacggtaattataaaaatccatacgggcagatcccatcgctttccatttgttatttatatcgatcacgtcatgtatatataatcctgaagttctccaatcccgaatggatgctttggaatatttataatcccaccaatttcttaccagctgcggattatgcagcgataccagctgattcaagccaggtccccatacatctccttcattccagccattatactgtgtataattaaaataggaataggtaaaacccaatatatatttatgtcccactattccggttttaaaatctcccgttaattccagcatattggtccatccccggctgtcaggactgaaacaaagcggagaacctgttttcagggagtcggtaagatcaatataatatcttttactgccgttttcataataatatcccccactgaaacggttcaccgtatctgtccggtaactcattccttcaaccgcagcataatccaaatcactatgattccagctgaaccggtcccgtattttcataaaagaggcgagttgctgcgtataggataaagaaatatcagtcacccggcgtttcatcatattattattgaaatcattatatatggtatgataatcggcaaagggattccgggaacctttcgccataaccaccttcccgtcgggaccgaagatatctgcacgattataggttggagcagatcctatttccgtatcgtatttgtcatcactataacctaacgttccctcgaaataaccggttttaccaatatttgccgccagtgatcccgttgctgaaaaacggtcagcacgtacatgccggtatccatctcctgtcgaataatgtgctgttgcccgataagtcaaaggacctgccaatttcccaccgaaatccagacttgtcgacttcaccccccaattcccataactcaaccgggctccggcagtaaaatcaggaacggcttttttacgcacaatattaatcactccacccatgacagaatgcccgctcaacacggctgccgctcctttcaacacttcgatagattctacggaggacaaatcaccgaaaggtacattgtttaataacgaacgctcatctctaaaaccatctacagccactaccgtctcattcgatccccgaaccgaaaagcggtaaaaagctcccaactgatctttcaccgtaactcccggtaaaaaacggacagcatcctcaagattcagaatattcttccgttccaaaacatccgacgacaaagtagtcaccgtcatcggtaatgtttttaaaggaacatccagattcaaaaggtttactttcttcttgattgtttctttcacaatggcttgatctaactggaaaaccgtatccgttatacttttccgctgattttgtccaaacacagacaccatcatcggccacattacaaaaactaaaattaattttttcatttttagcactattaataacaattcaattctattactttatctataagattatcggaataatttccggatttttcttcccaaccacttgaaagtcaacacaaccccggatagagaaaggaaagttcctccgagcatcaacacatacatcacaacgttccataacaacggacgttcggccagaaatttaaaattcagactgtgcaatccactatacaaaactcctctcaaacgtccattatcatcgatttgccgatggtataaagtttcgggattgaaataatggcgggtatgcaattcatcgtctatcaccactttatacaccggaagtgtcagcatattccggcgggagaaataatcatcatcccaatccgtcatccattccagagtataaggggtatcctgaccgtgaatttcacgaaccgtttcacgcaccatctcttcggtcagggtaaaaggcgacaaacagctcgtatccgcagcatcgataaactgttttttactgcccgaattcacgacataataaggatattttccaaaggatgcccactcgatacttttcacatcagacagactatccacgattttccggtaatccaaggcatacagatcggcggccaacattcccccctcacgtccccgaaaacgtacttcacggttcctggttttacctttctgcatccaggaaggaatatccaccagcgacatcattccgctaaatacaaatgtcagagcaaaaacaccgaaaaccacaccggtgatatgatgccaacgtaaccaccattttttataaggcgaacgcaaccctttcttccggtttttccaaaatacccaaatcccgatccacaaaccggagaagcacatgatagctcccaatccggacgcccagatcataaaattaatccaaagcgcttgattttgccgtagagaagtaaaatacacccaatgaggaatagcccccagccaagcccaaaagcgggaattccggtcagtccattgcaacactttaccgcttttcgaagatatatacatctcttgccgggcatcatcttcgaacgaaaacttataaatcggaaattctttggtcaaataaccgaaaggaatccactgatccaaccggtttaaggaatctacccgataagcaaccgatccacccaattgtccggcaatccggcaaatctcgttaaaatcaggtttaccgacaacctgcaatgaatcggcatacaaaccggcaggtaattgccgccctttcagatgaaataccggccggtcgagatacatatctacagacaaacctcctaaacgactactgtcgggcagtacctgcaataaagaatctacagccggaagcggacctgtcagagactcctgacgggctaatttcaatttctgatttacccgtgggaaactatgataaatcattacaatcccagagataaaccacatcagaaacaagatactgagtaataaaccgagtatccgatgaatttttcggaaaatttttgtcaacatgtttttatctataatcttattcctgtccacgggaatagcattattattattttcggcaggtttcctgactcagtccggaaaagtaaccttccagtcgcgtcgaccgtggttgtaagaaaacttttcaccttatacgaacctcacagtagcgggcactgttccggaattgcaccggattccctctcattttatgcagaaaacataaaattcaccgaaaaattaagaaacaccaaataaaacgttcgtttaatttagttgaaaatctatgaatttcataatgtttataaagtcatggaaccctgcgggcacctggttaattgacaatgaaacagtatacccgaagaataggatatattgtgttgattgtcaatgattttattctcattttcttttctcatttttcttcccttctttatcttttgatggaagcaaagcttccaataattgtccatcgtccattgacatctgtccattattctttttgcgggtttccgcaaaaagaatcgaccttttattttccctgcatatacccctttttcctggtagccatatccaccgctttatgtccggcagcaaaccgggcatgttggatgaagagttgctgaacagttggattttctcccaaccctttcaggtaaagattcactttataaccctgtttttcaagattttccttccattcgcctgctatatcatttttagcatgatctccggcaacaaacatcaggggggccaaagtcaatgttttggattttccgtttttcaatagccgcaaagcgtcttcgtattccggatacccttctacagttccgacatgatattccggatgtccttccgctttcagcatataatcgaacatagcatacgaagctgttgcaggatcgggtgttccatggcccaccaataatttttgtccacctctatcagcctgattcatggcctctgtaattgccttcacaaccactgtataatcctcaggagcatacaacaaaggatttccgacacgaatatctttaaaattcagcgaaagcccttccacttcgcgacgcaattctttcatctcggtaccttcgattatattcgtagattgtattaaaatatgcgtataaccttgttcatgcagctgaatgagtgcctgggccggattcaggcgttctactcccctttccttcaatttcttcaggataatccgggaggtccaggcttcccggacttcgatacctggaaaagcttctttcatctttgcattgattgcatcgattgtcaaaacccgggtatcgtcatgagtggtaccgaaatggatgatcaggatggcagccttatcccgctctcctaaatttccgaaaagatccgattctataaaattttcatcggaatgggccatacacaccggcccgataaacaacgctattactaaaaacaaatatttcatatgattatcattttattttcaacgatccaatatacctcttatcctacaattagttcggactgatcctgttatttgtaccgacacataaccgatggcaaataaccctagcgttaccagcatacaccattttttcatgaaacgattaaattaagacattaataataacttttctgaccccggaaaagctttattacctatacaatcatggcaggtctcctgacttaccccagaaaagcaaccttcccatccttacatccggacagtggtgtaagacgcttttctacacacagggttcacagtagcgggcactgttccggattccaaccggattcccttttaaacagcaaagaaaaatactgcattaccacaaccggccgcaaaggtataaaaaatctccggaataaatgagaaaaacgggagaaataaagcgaaacggaggaatcggctgccgaaacgtcgtttgcgcacatcgaaaaaacgaacgggaggaagcccgacactcaggatttcctctcgtatgaataaaatctcgcatctatatactttaatgtttagggtgtttgcaattcggctcttagataattttgtcatctgatccaattaaatttttactgtcataatagatatttctgactgattgagttaatgactgaatggttggctggattactgacctactggttatatccgaccaacaatccaatatcaaattgcttttggtcatacttaaattacagacaaatttacctgcttttttatcttgatttttatgttcaaacgaacatcaagttgtgttttggggcaccggaaatatttcgggagccccaactacttgctaaagcctttccttccaaggtcggtaaatatgtgcaaaataaaaagtgaattactcctattaccgaacaaaattaattcattacctttacgtaaaattcaatttaatgattggcatggaagatataaatagacttaagttggttttggtagaaaaaaagaaaacaggaaagtggctggcagaacagttggggagggatccatcaacaatatcaaaatggtgtaccaatgtttcacagcctgatttggttactctttcaagaatagcagaactattaaatattgaacggagagaacttatcaataaaagtaagtaaatattatctgccacaagaaattatttgataacattagaaagagtaatataataatgacaagcatacagcaaagagaacagctgcaatctcagatttggaaaatagccaatgaggtgcgtggggctgttgacggatgggactttaaacaatttgttttaggcacattgttctaccgtttcatcagtgaaaattttactgactatatagagggtggagacgatagtatcgactatgcttctttgcctgatagtgttatcactcctgagattaaagatgatgctgtaaagacaaaaggatatttcatatatccgagccagctttttggtaatgtggtaaagactgccaacaccaatcccaatcttaatacggatttgaaagccatcttcgattctatcgaaagttcggccaatggttatgcttccgaaaagaatatcaaaggactgtttgccgattttgatacaaccagtacaaggcttggtaataccgttgaaaacaaaaacagtcgattagcggctgttttaaaaggtgtagaaggattgaattttggaaattttgaggaacatgagatagacctttttggtgatgcttacgaatttctcataaacaattacgcagccaatgcaggaaagtcaggaggcgaatttttcacgccgcaaaatgtttcaaaactcatatcacagcttgctatgcacaaacaggctactgtcaacaagatatacgacccggccgcaggttcaggttcattgctcttgcaagccaagaaacaatttgaagatcgcatcattgaagacggtttctttggtcaggaaataaatcataccacctacaacttggctcgtatgaatatgttcctgcacaacatcaattacgataagtttaacattgcactcggaaatacgcttaccgaccctcaatttggagatgacaagccttttgatgccattgtttccaatcctccctattcggtaaattggattggttcggatgatcccacgcttatcaatgacgaccgctttgctcctgccggagtacttgccccgaaatcaaaagccgattttgctttcgtacttcattcgttgagttatctgtcaagcaggggaagggctgctattgtatgtttccccggaatcttttatcgcggaggagcagaacaaaaaatcagaaagtatttggttgacagcaattttattgaaactatcatctctttgccttccaatttattttatggaacttccatagccgttaatatcttagttctctcaaaacataagccggataccaaaatccagtttattgatgcaagcggagaaagtttcttcaccaaagaaacaaacaacaatgtccttgaaaacaaacatatagacaggattatagattttttcgacaaaaaagaagatgttgattatatagccaagtctgttgactataaatctattactgagaatgattataacttgtcggtaagcagttatatagaagtgaaagacactcgtccgaagaccgacatcaaggaactgaacgaacggattcgccgcattgtggaaagagagaacgagttgcgtatagagatagataaaatagttgcggaattagaggaggacgaattatgaacaatgaattacttacagccggcaatttatatggttcgttgataaacgatataggcaatatccttgtcgaggcacgtggcaaaatatgtcgggaaatcaattctgtaatggtagatgcctattggaatataggcaaatacattgtagaatacgaacaaaaaggagaagaacgagctgaatatgggagtaacctcttgaaccgtctttccaaagatttgacgagattgtacgggaagggattcgggaaaagcaatttgttgtatattagaaagttgtatctgtatttcccaaaaggtgggacagtgtcccaccttttgaactggagccattactatgagatacttaagttggataatgaattagaacgttctttttatgtaaaagaatgtgagaagcagcattggagtgtgcgcgaactcaagcgtcagatgaacagtatgctgtttcaccgcatagcattaagcaaagacaaggaaggggtgttgaaacttgcggaatgtgggaatgaggtgcaaaagccggaagacatcatccgcgacccctttgtgttggaatttgccggattgccagacattaatcattatgatgaaaacgatcttgaaaaatcgcttgtaagtaatttgggacagtttctgctcggtcggggatttgctttcattggacaacaataccgtttcagtatagccggcagacattattatgtagatttggtattttatcatgtgatattgaaaacttatgtgctgattgatttgaaacgcaatgaggtacagcacgaagacatcgggcagatgaatttctatctgaattatttttgtaatgaagtatgtacagacggagataatgctccgataggcatcgtttgggagctacagccgacaaaatgactatggaatatgccatgggaagcatttcaaaccaactttttgtcagccgataccagctgtatctcccggacaggaagttgtttgaagatgaattgtggcggataatgaagaagcaggaacttgaaaaagaagaaagggaggacgaacgatatgagtaaatcgcaaaaagatttgaatattgtgacacatacaaccgaattaaatcccaaacttctgactgatgttcggaagagtatagttgtaatcagggatattcctgtaatagccgatgccgatgtggcaagtctttatggcgtcgagacaaagagggtcaatgaagctgtgcgtaacaatccggataaatttccggaggattatatgtttgttttgtcttctgaagaatcagatgttttgcggtcgaaattttcgaccacaaaagtttcttccaaaagcagggtacttcccaaggtctttacagagaaagggttgtatatgcttgccacaatcttgaagagcaagaacgcactaaatgtcacatttgctattattgaaacatttacgcaagtaagatgcttgaagcgtgaattggtcgatttacataaggaaaccgattccggaaaacagacagcgaaaatgcggcactttggtaaagtgctgtcggatattgtgatgcctgatttggaaacttctattgaagaatgtattattagttgattatcagtattatacgctctaaacggtagaaaagtgaccgtatggattctgattagatacgaaaaggtgaagatttaacgtatttaactttcaatcacatcaggaatcacgaaataagggttgggaggggcgttttaaactgaccctataatgtggtgaatagaagttatatgacgaaattcataaaggggtacggttgaaacgactcccttgaagggtgtgattacatgtcatacccttttgttctataaagcatttttgtgtagtttacgaagctacgttttgcagtttttttacttgataaacgcagttttttcattgattgtgctggcttttgggataaaactattatctttgcggtgcaaaatgtgataccagtatcaaaaacaatactctaatatgatatttgaacgtaagaaatacttggatgaacttattgcaggacgtggaaacggtcttgtgaagattataacaggtgtcagacgatgtggaaagtctttcctgttgtttgatatctggcataactggttgttggaacatggggtgactgatagtcacatcattgagatacaacttgatgatttccgaaacaggcggttgaggaagcctgataccttgctcgactatatagattcaaaggttatggatgatggcaaaccttattatatagtcttggacgaggtacagttggtagaagaatttgtggaggttattcttagcttgacacacatgaggaatgtagatgtgtatgtgtcgggctcaaactctcgtttcctgtcaagtgatgttgtgacagagtttcgaggcagaggtgacgagatacgcatctggcctctcacctttgacgaatactttagtggtattggtggagatatacgcaaagcttggttggattactatacttttggaggactgccacaggtggctttgcttgaaacggaagaaaagaaaacagactatttgcgtggtctgtatgaaacgacctatctgcgtgacgtaattgagcgcaaccatctgcgtaatcctgaaggaatgaaggaattggtgcgtgtgcttgcctcgggcattggttcgtcaaccaatccaacgagaatagccaatacctttcaatcttcacaaggggtaaccataaaaagagacactataaaacaatacattgactatctgaaagactcattcttgatagaggaagccttgcgctatgatgtgaaaggcagaaaatatattggtaccgagacgaaatactacttcgctgatgtcggcatacgtgcagccattctcaactatcgacagcaggaagaaacgcacattatggaaaacattatctataatgaacttcgcagtcgaggatataatgtggacgtaggattggttgaacttggtggcaaggataagaacggtaagtttgtcagaaaacagttggaggtagactttgtggtgaaccgccctccatacagagtgtatatccagtcggcttttcacatgcctacgccagaaaaggaacagcaagaacgtcgcccattattgtcaatcaatgaccactttcgtaagattgtcattgttggtgatgagattcatcgcaaggaggacgaactcggtgtgttgactgttggactattggattttctgacggataagaacttgttggagcaaggataaatctcataaaaaattattttttacaggcaagatttttgctttttgatgatttaataagtagaaactaaaaagcaagaaatatgagaataacaaagaaaacaattctggcaataggtctgatagccagttcgctcacgttgaactcatgcgattacaatgataacaatgtggtgttacggcgcccaactgcccttgtaacggtgtatccttctgcgcctgacggcttcttcatgcaacttgatgaatcaatgtcgcttgtacctaccaatatgaaagcctcaccgtttggagacaagaaagtgagggctttggtgaactatacaatagaggaagaaagctacggaggcaaccaactgagtgtgtatgtaaattggattgacagcatccgtaccaaacagccagtaatgacgcaaggatcagaagaaaaaaatgcgaaagcatttggaaatgaccctattgaaattgtccgtgattgggtctctgttgccgaggacggatatgttacgctccgcatacgcacattgtggggaggaattaccaaacatgttattaatcttgtgagcggtgtgaacaaggataatgtatatgagttcgacttgcgccacaatgcccaaggtgacaccaacggaagaatgggggatgcacttatagcatttgacctcaactcactatggaagaaacatcctaaagaactgaagataaaactcaattggctgtcgttcagtggcaaaaagtctgccgaactgtcgctcaaaatgcatacggtcacatcggtgtacaatgccgaaacaccctcatttttgcatcgtatagaataaaaatcgaaaaaaaatatttttcccaggcaagattttacattgctcttcatttaagggaatgagagtactcgaaaaaaacaatcgtgctaaggctgtagatggacgcatactcatgccgtggcgcataagttaaacgacaaaattatagaataaaatgaaatcaatgaaattctttaagtttgcaacattaatcgtttgtgccgtatttgcagtggcatttgcttcatgctctgacgatgatgacaacactcccgccatcaagttcaatccttcaaccgtttcagttgccgttggcggcacaaagaatgtaaaggtagcaggtggagatggtatttacaccgctaaatcaagcgatgacaagaccgccaccgtaactgttgacaaggctacaattacggtaaaaggagttaaggctggcaaggctacagttcttgttactgactccaagaaggtgactggcagtttgagaattaccgtggttgatggtgttgtcgtggacaaagccaagacaagtattgcggttggtaaggaagatgtagtaaacattagtggaggtacaacaccttatacggctgcaagcaaagatgataagatcgccactgctaccgtcaaggacgccaaacttaccataaagggagtgaaggttggaagcacaactatcaccatcacagacaaaaacaaaaaaactgctacggtagttgttacagtaacaaaataagaaactcgttgttacgagatagtgcaaatgctttttgctgtatggtaaaggcatttgcacttcgctgtttccaaggcttttaaccctataaacatcatgttcggcataacattcagaaaagaaacggaagaggaacgatggttgcgaaaggcactcgatggcgacaatactgccaccgagtggatttatcgcaggcatgggcgatatctgtctgcactctgctcgcgctacattacagaagacgaagacattaaggacgtgctacaagaatcgttcatcaagatatttacttctctggatagtttcaagtatcgtggagaggggtctttgaaagcatggatggcaaaaattactctcaatgagatcctgaagtttgtacgcaacaacagccgtttgcccattgatagtatcgatgataaagatatgaacattgcagatggcgacagtatggagactgaggacatacctaccgatgtacttcatcagtttatacgtgagttgcccgatggataccgaactgtattcaatctctatgtcattgacgacaagaatcacaaggaaatagcccaattgctgggcataaaggagaacacttcagcttcgcagctgcacaaggccaaatcaatgctggcgcagaagataaaacattatagaaccatcaattccatttaacgtatgaaaaataattggcaaaaagacatacacgaccgtttgggcaactatgagaaagatgcaccaaaaggactttgggaggacattcgcaaaggaacgactgatgagaatggtggctatatgcatggcggcagacctttcaaaacctactggctacggcgcacagcgtatactgcagccgctgcaagcgtggctttgttgataggatattcaatatattctgaatacgcaaacgatggtcaaacgccatcagaaatgacaaatctacaaatagcacatacaccagcagagccatcccctaaaggcaatatcgttgctgatgacggcaataatcctattgcctgcaactcacctgtgccacgcatcattacgaccatagtacacaaatctgttggtgacattgatacattgttatcttatgctaatgatgagaaatctttggaaacagcgtctgacaaccgtgaggtggatgatgccaacaattcaaaagaaacgaatacaactgccgacaaagaaaatttgccgaaacgtgagaatgagagcaagaaagcaaacaattatcatcacaacagcaattacggcagtcttgtggcttacaactctgacgcaaggcgtcacgcctcttcgtccacatcgccacgttggattgtaagtacaagtgcaatgggatcggtgggggcatcaagaaccataacatctattggtgcccctgctgtcgcaactggtccagatgattctgactgggaggacacccctatgctcggcatcaacatattcaatcagggaaaggaggtgaagacagaatacaagcaccgcttgcctgtacgcattggtgtgaaagtggcatacacacttaacgagcattggatcatcgaaagcggacttacatacactcgtctctcttccgacatgaaagacggaacaaaagagaactactttacgggcgagcaaaggctgaactatgtaggaattcctgtcaacatgaaatataatgcatggtcatacaaaaggttcaatctatatggctcggcaggtgtacttgcagaaaaatgcgtatcgggaaatgtcacgaaagaatatgtcatcaataatgcgacaaagaagaaagagactgtcaacattgacagcaagcctttgcaaatgtctgtaaatgtggctttcggcgtgcagtttgacgtgcttgacaatgtcggtatttatgcagagccgggcgtaagctatcatttagatgaccattcttcgctccagactatctacaaggagaaaccgctgaacttcaatctcaatgtaggtgtaagatgcactataggtaagtaacaattaagaaatataaaatcataaagaatatgaatacaataaaaacattggcattagcgaccatcatcattggtatggcatcatgcgccagcacccaaaaatctcaaatgttatgaatgcgtggataacaacaaaaaaaaggttgaggttgtcgtctatgagccacttccaggacaaggcgatgcccgcatattgagcattggcggaaaggaatatacggaatagacgactaactcgacaagtgttatctatccctgatgattcctaatgatatatgcttagcgggcaaactattgctttaataaaataaaaaaaagtgtaacttgcactgaaattcaaagagcaaatacgatttcgagtttattaaaatcgtttgtctttccaaacaaaagagggtgtccaaaaaggcaaaatacccccttgtagaatcggatatttgatttcagtctccaatagggatacgaataaatcgagggtgccaaatactttttggacaccctcttcttttatcgcctatcagacgttatttcgtttaacaatactactttatattcacctcaatggctgccggatatattcttgccggatcataaaaagtggcacaactatttaccatatgttcgagtccaagctttacttttccctgaaatgcttttttaccattgacaatcagagtgattttcttattcagatcgactagttccggacataaataaatcacgacctttcccttggttgccggccgataatctttttcgaatttcagctctattccccaattagggtcggtctcgaccgttttataagtaaccagatcgactttcaatgagatttcgttttcttttatcgccaattcataataagttcgggaagaatagtcatcattcgaacgttctttaacggccagattataaaatcccttccggtacatcccgtccatctcgaaattttcccaatttacatttttaggataagggttgcgggtatattgtttcaaccagggagtcgtaagcgtataatcgatagcatgtcctctccctggaatcagttctatccgatggatataatcttccggatacaatttctttaatctttcaaattcatttttagtatatgttgtcagtttattccggtagaaaccggcatctgcggctccggtcagaaacgaaaaggcaatattccggcagttttcgacaggtgcatttttcaaaggttctcccccggccataggtcctgctccggccagataatcggcataataagaggcgagacgctggctaccgtatcccccttcggatataccgaaaaaatagactttatcggggttgatatttccggaaacaaaagccaggcgtaacaacttttcccaggcaaactgttttgatttttgccaccagcggtaataattacccatattgggaatctggggtataaaataggccgaaggaacatcgtcgaatttttggcaaagtaagatcccggttgcccactcctggcccttatcaccggaaccatgcatatagaggtaaagcgggtatcccccttcaggcccgggctctcccttacatccccaataatagggcataacagcatgcggttcgagctctgccggtaaatcccaattaccggagttttcctgctccaatttaccgagtccgatcaatttttgctcgtcaaaccgattgttcgcttctacccacgcatcccaaaccaactggcgctgacgggcaatatcggccaaagataccggcttattgtcttgatataaggtttcatcacccgacaggtaatttaaaaagaaacgaaccattttctctttcaacgctttattttcgccggcaacagcttcgttttcatttccggaaccgacggccagagccggacaagcatacgataatatcggaagtactaaaaagcaaaaaatttttaaatagtgggcagtagttttcattttattcagaccagaaaatttataaatagaaaagaggcatcacaaacgacacctctttccgaaatctaaccactcctgaaagggtgtgaagacaaaatttattgaatgacattcaattttttaccgattttgataaaggctgcgattgcacgatcgagttgttcacgggtatgggcagccgacaactggatacggatacgtgcctgtcctttcggaacgaccggataatagaaaccggtaacgtaaatatgttctttctgcagctcggcagcaaactgctgtgacaatacggcatcataaagcatcagtgcagcgatagccgattcagaaggtttgatatcgaatccggcctctttcagtttaccccggaaatattcggcattgctcatcacacggtcacgcaattcggtactttccgtcaacatatcgaatacagcgatagaagccccgcaaatagccggagacagagagttggagaacaggtaaggtctggaccgctgacgtaacatttcaatcacttcttttttacctgtcgtatagcctcccatagctcctcccagtgcttttcccagcgtaccggtgaaaatgtcgatacgatccatcacgccgttgtattcggcagaaccacgacctgttttaccgataaagccggcagcatggctatcgtctaccatgacgagggcattgtatttttctgccagatcacagatttctttcaatcgggcaatatcgccgtccatagagaatactccgtcggtaacgataatccggaaacgctgagcctgagaaattttgagctgttcttccagatcttccatattggcatgtttgtatctgtaacgaaccgctttacataaacgaacaccgtcgatgatagaagcatgattcaactcatcggagatgatagcgtcttcctgaccgaacaaaggttcgaaaacacctccgttggcatcgaaacaagcagcatataaaatagtatcttcggtcccgaagaatttagagattttagcttccagctctttgtgaatatcctgggtaccgcaaatgaaacgaacagacgacatgccgtatccccgggcatccaatgctttcttggctccttcgattactcgcgggtgggaagaaagacccaaatagttgttcgcacaaaagttcaatacggtttcgcccgtagtcagtttgatttctgcatcctgaggtgttgcgatcaggcgctcggttttatataaaccggcatcttttatagactgaatttcagcctttaagaaatcttgaaattttccgtacatagcagtaaagattatttatataatttcttcaaacttagaaaatatttcaggaaatcccataaaaatatcacttaaagattttttaaagttacaatccgaacccaaatcccccgattttctaagaattcgttagtttcgaaagatgccggtaaatattattttttactgagttttttcaatatcggctcgatgatctctttttgtgaaggacggggagcatcggccgaaatgatattgaagtgttcgtcgatcaacaagaaacgcggaatgcccgtaatatcccaaccggatttagtgcgggagtcctgacagttcagttcgttgacagcgccatgactaccccgcccgataaagtttttccaggctttctcactttcatccaccgagattccgataaactgtacattcgggtatttactgctcaattcattgaaatagggcatttctcccatacaagggccacaccaggtcgcccaaaaatcgacatacatcggtttacctttataatcactcagttttcctttcttaccctcggaagtcacaaaatcgagatcgatagccggacgtccttccatcaacttcgcccggcgctccaaacgccccagataagcttcgctgaaatctttatatttcagtttaccggcaaaatttttcaattcccggtatttttccggcgtcagttccccttccagttcttctcctttttccagtacttcgaccagttctgccaagcgggcggacttcggataatcgaaaactttcaagttatagcaactgaccaggacatctctcacaacggccacatccagataatcgtccgaaccggcaatttcctgcagaatcgggttcatatccccttgtatagaagtgtaaaatttcccaagtacctgtttgaattcttcctccgacttacaatcgctcaacatcgcgtccgaataaccggcaaaagacatatagctattcgccacatcagctttaatccgttctttttcgagcagcctaaattctttactgacatttttcaactcctccaactctttcatacgcagggcagctaaactatccaccgtttttttagtcgcttcaaaagtcggtctcagatttcttccggccgaaagaaaggaccctgctttcggaaacaagcgtcctttcagataggtattggcttccatacctttcccctcgaatgtactttgcggctgggaagtacccaaatatactttcagttcatctccgggagtcagatacaaggtatttcgtccgatacggaaataagcaggtttgctcaaaggcaacaccaaatcgaaatttccatctgcgtccacgggtatttttatcactccggcatccgaaatctcgccggcagctccatccggagccatattcacttctgccgctttaaattctttcaacgaaccatacaaatgcaccgtgttatttttttccccatacacgagcagcccccacatacagagacaaacgatcaaaatacttttcattattttcaattttatccttattcctgaaacaatttcgctaatttttcattcaaccatcctccacgggcattggtgctgactacccggccttcggcatcgaccaaaacacaggaaggcacaccattggttccgaagagtttcatacattccttgtcataactcttcccgttcgccccgcaaacctgtgtccaagccattccttcttcctttaccgccttcagccaggcatccgtgtcgtcgtctatcgaaatactgaccatatcgaatccctttccatggtaacgttcataggtctctttcaaatgggggatatctgcccggcaagggccacaccaggatgcccataattccaccaaagtataatgacctttgcgtaatatcccggacaatttcacctttttcaaaccggtggtcaatacctcgaaatcaggcaatacatctccaacgtataaaggctggcccaggacagccttctccagcttctgtccttccggggttttccgaaactcttccgggaaaagtccggcaacctcccgggcaacccgtctttcatgtgcccgtacattcaaccctttagccacatatacggctaccggagaggaaatatgccgacgaataaaaccgaccccggtataaaagatactgtcgcgtacggcatccatttcccggacacagcgaaatacgtcttcttccgttccttttttataataatacacatgccggtaagcatcgaacaaactatcgttctgcaaaacaaacggagtcacccgtcgcttataagccatatacagatcatgagattccgaccctttcacctgtaaaccggcaggaagttctttttgcagcttcgaaggcatttcagcaaaaggtaaagtgacctgaatagcagcattctcaacataaaccggaatattcagaattttatcccacccaaaaacccgttgtgagggatctttaaaataagtaatacaacgcaattccggaccgtcaactttccctttgaactcaaaccgtccgttttttaaccgggtactatcgtaataatgagtttgtccggtatttgtcagaaatacccaatgatcatccggagctcccttcaattcacccttcagtacaaagccttccggcttgccggtacaagctcctaacatcaataaaccagctagtataataaataccttcatacgctctatttttaaataaatacaaaatcagtaatttccccaaaatcagtatacacttgcttggccggataatgctcactatccccaccgacacttccggtagacgataaattcagaatgacaaaatctcctttaccgtttcccatatcgaaaccgatacccaaactatattgcacatcaaattcataagcatcgaaagcattactgctggaaagatagcgcttagcgaatttcatcttcaccgccttacctccggcatgggtataaatagctgtcgcctttcctcctgcctgcttgaaatccaaacgataaaccgtattgccggaagcataaaaaagaagcccactgtacggaggggtagaggcaaacactgcactctcgtccaaaccttgggggatatttatggtataatagccattaaacgaagcattgtccgaataattaaatcctctcggattgaactcatagacgaaacatctggtatcgtttttcgccaaagcataggcatacacactggtccaggcagaagcatactgataaccggttcccaaatacaagactttctggtcttcaggcagtttattgggatttacagccgacacatttccatcccgggtcggtatagccttgatcagattcgtattttcctcgctttcactaaaatacaagggatcgtatttctttacacccaacccgtcactcgtattataatagaaagcgaaacgatgtcctgcttcatcgtacaacagcgcattattactgattttagaagcaagcgtgatatttacctctccttccagatcagcagccggctcataaattttcccggcacggggcgactgataaagcatgccgccggacagcaacaaagcactggcagtgccatcaccatctgctaaagtgatatgctgaaaatcaaaactattctgagctaacggagctaccatccgcgtcaggctgtctttcttttcaaaatgtttccactggcaatacacgcccgattctaccggatcatccgtaatgacggtaaacatattccagcccgatcctgtaccataatacttgcaggaagtcgtatacgacatcaaagcctgcggtttttccggtaaatctttttccggtttcttcataataagcatcttcctgtacgacgatgtctcccccgatatattcgacagaacctaattcagtctgtccgtttttacggtgtaatatcatccacgaaccgacataaggtttgatcaattcgatggtcgtattgaccggatattctatatccgttattctatcgtatacattcaaacgaaaataatgggcataggccagatttttagcctcaggatcgatatgaaaatttaaattctgttccaatccaaccgtgtcgaacttgccatgtccgtaaaaattatgattggttgtcgaatgcagccacgtatattccagattatcctcattttcttgtaaggactgagacaattgcggtataattgtaaccgtcgtatctttatccagacgcaccgaatatactttattcaaagagacatccagtgtatttacctcctgataagtataatttcccttatcatcgtagcacgaagccacgagtaatcctaatataaaatagatcaatcttttcatactgttcaaattttaaagtaattccgaaatatccgggatctcgatccattctccggtgttctcatcaatcaaaggccggttggccggatccgccttataagcttctaaatccgtataaaatccgttcgacaagagtatatcgtaaaactgattggtcatcatccattcattcagggaagtccctccgtattttgtaatcagataccgggctttcgtctcactataatcgccgaaatacatggcatagtaaccgtcccattcttcctcataggatccccataaaccgagatttaccgtatcttcggcttttaatctgaaaaattgtctttctaaagtacccgcttcaaaatcagattgggcataatcgaaagtcagattagccgaatatgtagcattacgtgttgccggacgttttaaaagtattttttattaacggtttaacacaaccgtt

SEQ ID NO: 6261 - DNA, 329 bp, Unknown
  gut microbiota DNA sequence
aaacaggaattgtaccgcgacctctacctgttctgcgccttcacggggctgtcgttcgcggatatgcgcaaccttacggaagagaatatccgcacctacttcgacgaacacgagtggataaacatcaaccgccagaaaacgggcgtggtgtccaacatccgcctgctcgacatcgccaaccgcataatcggcaaataccggggactgtgcggggacggcaggatatttcccgttccgcattataacacgtgccttgccggtatccgtgccgtcgccaagcgttgcggcatcaccaagcatatcacgtggcatcagagccgccacacggc

SEQ ID NO: 6262 - DNA, 1763 bp, Unknown
  gut microbiota DNA sequence
taaagttttttgcggagtgaggagttccgccggtcagtgatagaaaaagccagacgaccgacagaagcaaccgggtccccgaacacgaacactgaagacgaataagtaacgacagaataattctacttttaaattagtttattcgatccttacatttagctccacctttcccggtggcatgcagatataatcattgcaacattgatactccaccgtgcagtgaacctctcctttgccttttcctttgatttcctgacggaaaacaacttctccttcataatacctggttcccgcctcattcagctttttactgacaggccacagcaatttttctgcttctccccatccttccggaaaagtaaactgcaaagcagtcggcatatacggatctgtagacgccacccgggcatacgtatgataccccggatgaatattcatctttaccacgacccacttattaccgttttccgcctcttcggttttcatttccatatataccggatttttatcactgttcagggcagcttctgtttccggaactcttcgtttctctccccggtaatcttcacccggaatcttttgtcccctcatccgataatcatttcccggcacactcaaatccctcgtatttaccataaaaaaccaaccgccggattcggtaaaaaatatccggtctttattggtttcgtaccaatcgcgccattcctgcggtgtagcgaaacgacacagcgtataacgggtaagtacccgtttggccttatccacttcctctccccgttcccaacaaccgatagccttgtccaacaaacggatatcattattgggaatcccccagcttttcacatcttcatctaccatccaataaatcactttatcgccaccgtaaaaataatcccggttgtcatcgaaataatccttgtaagcctgttcattgtccccgaacttttcaaacaaaacaggttcacgggatttcagccattctgcataactctgtagttttacggtactccttaaagctgctttttcttcacttgtcagcttctcccctttggcctgcttcgccagagccacttttttgatttcttccgttttttctatatactgtttctccacgaccattctttcctgccatcttttataggaaataaaatctttctgctgtacggcatattcacgggtggctatatcacttttatatctccgggcgataggtgtctggcccgcgaattttgaaatatatgccacggcattggcaaaaacagtctgtgcttcatccgtcatattctccggggaggcagaaaatccccaaaagaagaaattaccatgccttcccatcgctacggcatcgatatctttagcactgacaccccctgagatgtattcggcatccggcgaatccgcaaatccccagggtctggcgatcattccggggcggaaaccttcttcagttttatatccttttgtctgtacccgccacatttccagcgaatccggcaaaggttgcccgtcagtccgtacaaaacggaatgcctccgaaggagtcggttttagttccactgaaatattcacctcaaaaggtccgtgaaaaataggatgttctttattaaaatgatgcgcatctgcatccagacacaaacaataccaatctgtttttacaccgatccgtgtcccaacgatatcgcctgcttcagcgataaataccatcggacggtcgaaatcctccggcaaataagcaggattccgggctccatttgggatatttt

SEQ ID NO: 6263 - DNA, 179 bp, Unknown
  gut microbiota DNA sequence
tacataaaatattgcgaattagttggcttttttgtatctttaggtattcccccgcaaataaggtttggaagccaaaacgggggaaattttccaacaaagatatggcaaaagtacaaaatatttcggaaattcaccctactttgggctttacagaatttgatattatagaaaaatatcgc

SEQ ID NO: 6264 - DNA, 267 bp, Unknown
  gut microbiota DNA sequence
taactcgtaatacgaggacactgattggtgggtagtttgactggggtggtcgcctccaaaagtgtaacggaggcttctaaaggtgccctcagaccgattggtaaccggtctcagagtgtaatggcataagggcgcttgactgggagactaacaagtcgagcaggtaggaaactagagcatagtgatccggtgtttccgcatggaagggacatcgctcaaaggataaaaggtactccggggataacaggctgatccctcccaagagct

SEQ ID NO: 6265 - DNA, 195 bp, Unknown
  gut microbiota DNA sequence
gtttgagggggaagagtatcgatagcttgatggagaatccgcaaagtttcctgataggtgatttcatgcagaaaatccgggtcctctgctttcgataccgattgtgtctgttggtattgttgttttattttctggtgtttaagatgatccagacagagattccgggctgtgatatagataaaagattttgctttt

SEQ ID NO: 6266 - DNA, 139 bp, Unknown
  gut microbiota DNA sequence
caggattaccagaagcgtctttccatcatcagaaaggttcttgtacaggaaaaggagttgtttgaaggcaggaaggtcagggaccgcatcgtcagcattgaccgtcattatgtacgtcccattgtaagaggcaaggaaa

SEQ ID NO: 6267 - DNA, 239 bp, Unknown
  gut microbiota DNA sequence
acagtctttgctatatgctcaaatggaaataccgaatgaagcctgccaagctcactctcatgaaaacttttgcggtatctttccagaatatcaaattctgtaaaccccaaagtagggtgaatttctgaaatattttgtatcttagccatatcttagtcagggtatttcccccgttttggctgccaaaccttatttgcgggggaatacctaaagatacaaaaaagccaactaattcgcaa

SEQ ID NO: 6268 - DNA, 485 bp, Unknown
  gut microbiota DNA sequence
gggcgtcagccgaaagcgattattgcgataaacagagaaacaggagagatacgaagcggtcaaattgcagctttggaaggatatgactattatcttctcaaatttggtaactccgaatattgttcggcagaattagaaatgacttattataagttggcaactatggcaggtataaatatgatgccgtcaatgttatattcagtggatggaaacaatcattttttaaccagacggtttgatcgtaatggtggaaaaaagattcatacacagactttggcagccatatatcccgatgcagagagttatgagcaattgatatctgtttgccgtaagctccgtctgcctgatgcggattgtcaggaagtatttcgaagaatggtcttcaatattctgtcgaataacacagacgaccataacaagaacttttcatttattatgaatgaagatggtgcctggcgtcttgctcctgcatacgatattaccta

SEQ ID NO: 6269 - DNA, 137 bp, Unknown
  gut microbiota DNA sequence
ttcggatgagcggacgattcggtagctacggcgaaccggcttccgatctgtaccccttcggctcccaagatcatggcggccagcattgctttaccggaagcgataccccctgcagcgatcagcggaaggcggcaatg

SEQ ID NO: 6270 - DNA, 2279 bp, Unknown
  gut microbiota DNA sequence
gatatggaaattcatccaaacataacgtgaaacgcttgtctgtgcgataattgagcgcacgaaacagagactcccaatccggataagtcagcttatcaaaatcaggaaatacttgcgctaccacctttgcaagcaaagttctttgatgttgcccttcggaacggtcggcaaggaaatatacatcactgtccaacaacacccttttgataagtgttgacttacccaaccgcctgcgaccgtacactacgaccaacgaggacttctctcttgaaagagcatccctcagtcgtgctgtttcttctattctatcaacgaagttcatattacgattttattatgctatgcaaacataatgtttttacagcataacacaaaattttgagccaagtattttccgtatggcaaaagaatttaatgtaaaatggtgtgtgattgggatttatttactaattttgcacagcttttgagacaatataaacattaacgatgcaaagaaacagaatgaacatattaccaacaaccgcaattctgagcaataaacgcacagaatccgtgtcaagtgttcatgtttcatgcattgaacctcgtagagtaaatactttccagcgaacatagcaagtactttattgtactttgagagaatagaaactgaatagttggagagtccttaccaaactttccaactttttttgttatgcccatttgtgacagttgcctttgtgatgctcctctgccatttccgtctgatgggctgttagtaaccggattattaacgtgcagtgatgcacataaattgagaagaaaatgaactacaaatttgacggcagcaaggtgttctttacatctgacacccatttttatcatggaaatatcattcgtttctgtaacagaccgttcaaggatgtggaagtgatgaatgagactataatctctaattggaacaatacagtcgggcaggatgacaccatctttcatttgggcgatttctgtcttggcggttcggccgaatggactaaaatccttgacaggttgaacggaaagatatatctgattatgggtaatcacgatttgaaaaatatacgccaaggctacattgatagatttgagcatgtagcaatgcagatgcacatagaaatcggcaagcagaggatatatctgaatcattatccctttttatgctttgatggtggatacaaggatgtgtggcaactgttcgggcatgttcacacaagaaagaacaacaccggacttgacgctgcccggcttcaatatctctatccgacacaatacgatgtcggagttgataacaacaactttacacccgtttcatttgaacaggttaaaagaattattaccaaacaaatagaaaaaggaggacggtgatatgaagatacaatacatgaacgacctgcatttggagttcagcgataacagcaggtggatgaaacataatgaattacctgtaacaggtgatattctggtgctagccggagatatattctatttgaaaaacaaggttgctcctttgagcaatttctggaagtgggcatctgcaaattatcggcaggtgctcattgtgcccgggaaccatgagtattacaattattgtgatgtgatggacaagggattgcaatggaataggaagttcaaaaacaatgtaggatattatcagaatcaggtagtgcggattgatgataccgactttatcatgagcactttgtggtctaggatttctcctatcgacgaatacttcgtatggaagggcatgaacgactttcggcagataatgtataatgggaaattgctccagacagaggaattcaataagatgcacagtttctgcttggatttcatcaaacaaagtctggcagaaagcaccgccaaacacattgtggtagtaacgcatcatcttcctacattagaggtggtagcccctcatcataagggttctgtgctgaatagtgcatttgcaactgaacttagtgggcttattgctgacagtcgcattgatgcgtggatttatggtcattcgcataccaacattgatgctgagataaacggaacaaaggttgtttgcaatcagatggggtatgttttccaaaatgaacatctcgccaatggttttgagccgggcaagttccttgtcttgtagcaaatattgtcttggttgatatgccttaagacatcaatgtatcatatagtaaacaaaacagctcggttttgcatattatatgatatgttgtgatagagtattttcagttatttgaatttttcgaata

SEQ ID NO: 6271 - DNA, 252 bp, Unknown
  gut microbiota DNA sequence
tttaagacctcaatgtatcatatagtaaacaaaatagctcggttttgcatattatatgatatgttgtgatagagtattttcagttatttgaatttttcgaataactgaaaatactgatttttaccattacataattatcgtaacgcaaacatcgtaataatcacccagcatcctcattgtaaaggggttttcttttggtcagcataacttaaccttacagattaaaacatttttccaccagagttttcaaat

SEQ ID NO: 6272 - DNA, 277 bp, Unknown
  gut microbiota DNA sequence
gaataacttgtctgcgtttcattataaaataaacacatagcgaaaaagtaaatttgggcaaagcgtagagaattagctgatacagcgttcgttacgctttgtttttctatgggacagagccaacgaaaagccagtatgaagccaaatagcgcaagagttcagttaccacctcattacccccgtaatgggtgcggatttcttgctaaatagttctgtttctgtgatttgcgtaattttgcatagcagtcggtaactcactaataactaattttgtaac

SEQ ID NO: 6273 - DNA, 191 bp, Unknown
  gut microbiota DNA sequence
ttagtgatggatgcctccatcgcctcgatctggccgggcagcggcgccgtgtaggttcccatcgccttgaagtcagccgtcacaaggttgacgggaggcagggcgatggtcacgtccttggcggcgagaacgccgtccacatagacggtatcggcgaggatggggcccttcaggtcgagccacaggtttgc

SEQ ID NO: 6274 - DNA, 4402 bp, Unknown
  gut microbiota DNA sequence
caactaattcgcaacattttgtgtatgaattagttggctaattttatactatttactgaatatccctatttaacaaattgaagttttcccgctaaaaccggacttcaacctgttaaatagctttcctatcaggtaaaccccaattcttagttcattctcatagcacggaatactttccctccgcttcgtttttccccttctttattatatttttcttcttccatcttggatttatcggctcccagcgtgtcaccgatcttggtttgcagacgagctttggaattcatcagatttgctttggagaaaaaatccggcgtcaccgcacaaacctcgtcaatccatttgattccctcttccaccaaagccttgtcatcgcaaagtgtaagggcttcgatattgttctggaaataattcaggtcagctccagagcggaacatattataactcaacacttccttcattttatccagtaaaccgcggaaatctcctttccggatataagcagccgtataaagctgtgccaaagctgccggaactcctgcataatcgacactgagcagatagccgatcaattcttcattccgcttttcatcaaaagtctgccccatgcccggacgccaatgtgtcaatgccattgtcgcccccataatactattgtctaatttatagtcaaccacctctttaccggccaccgcataaaatttatcccggctctgcatgacttttttcaaaggttctgacaacggatcactgacatactttttcaccaaatcccagttctctttggtagccaactgctcctcagaaagggtattcaggtattcggaagccacctttccctgttcttcctgcatgtaggcggaagccaaggcagccagataacggcccaaaaactcgccgtttctctctccggcttcgtaacgtttcgtcaaaccggtcaggttgttctgcggatcaccggctgttttggcaccctccaccaaccattctgcgctaccggcaccgaccatccggtgcaccacctgttgtgttgccggatcaacgaacaccaacgtagggaatgccttcacgccgaactgcgttttcagtataatgccgtcctcgtctttttccatatcatactttgcattcacaaaggtctgattaaagtaatcggctacttcatccttagtaaacacattattcgccagcatcttacacgggccgcaccaagaagtgtaacagtctacgaaaatcagctttttctccttcttcgcttttttcacaatctgcttccacactttggtctgctcgaaattgatactgcggttttgagcctccgcaccaaacagaattccggcaaccaacataaccaataaaaatacttttttcataatccttttttatttcaatgagtattcaaatatacaacatcaaattttaattacatccccatcgccggcatagccacgcttttcttagcgccaccattcaccatctcttccagcttgtccatcagtttctgtccccgcaggttcttgcccactatacggccttcctgatccaagaccaaaatatagggaattccggagaactgatacagtttcatcacatcctttccggccttgggagcctgtacctgtgcccaaggcatattctcatccttcatggcttttctccaggcattgccatccttgtcaatggaaacactcaggaactcgacccctttctcgttataagcctcgaaagcctctttcagatggggaatttcctgacggcaaggtccacaccaagaagcccaaaaatcaagcactaaaatcttgcctttaaagttctgaggtcccaggtttttatttccatccggagtcggatatgaaaactcgggagccaccttaccttcagccagacgctctttttgagccttcgcctcagccatatccgctttatattttttcaacggtgcataatccgggttcttagcttccaatttagccagcacctgctctaccaatgcggcattctcatttccgcgcagcatcggcaacactgccagcacactattccggtcggcataatgctcggcaatatacttgctccgggctctggactcgtcgcccagcatgtcataaaatttcatggaagtttcctgcttcgcctgcatatccaatccctcaatccgatatactccctgcgaaacaccgatcatcagctgatagccccggtaactgtcccagttcaacaagttcatcacctcattgttaggacctccgttgatgtgtacatacggcgggtttttgattttaatccgggccgtatccataccgcggaaattgatttccaaatcctcatcctccgcccagaaagaaacgccctgccatttttggcaatccaaataataggctccgggacgatccactttcatggtaaactggtaagtcccgtcagcattcactttacaggagtcgataatggtcttgtcaaaaccgttccgttccacaatctccatgttaaactgattgtccggaaactgtactttacctttaatggtaatcgtatcctttttaggagctgcacaggatgctactaaaaggcatccgcccaacactgcatttaaaactcttttcatactttatttctacttatttttcttgataatcctgtttcaaatcattagccactctttcaaaataaactttaaacgacatcggtccttctttcgattttgccgcagcatcatccatccatttggccaccctcaaccgcaaagtctggtctttgcacaaacggttcacacgcaatccccaattgtaaaggatcacatcccccacagaacccgatttcaattttacatcacccaagtcgacataagtttcccagtcgcccaatttctccgcattgttcatccgggcatcggaaataatgtcttcaacaccttctacatccgtctttttcaaacgcttgcaataacggttaaacccttttttgtcaaaagtcgcctcctctccctgaccggtcacaaagcggttcgccccgatgatataaaccacgcggattttgttttttacctctttctcaccgatgacttgggccaattcattgcgatgttcatacacataggcaaacacatccgaatccacatcctcaacatatttggcgaacaggtcccaatatttccgctcactcaatttcgccttgtccaaggtagcgaaataatccagacagaccttttcggtcacttctccccgattggccaaatccaaggcgctcatatatgtttcgatgaactccggttcccggtttcccgctttgtaggctttctccaaagaagccaccccttggccatccaacgccaaaccagcctgtttcaatagttcttccgcaggcattccgccaacgatacaatgttgtaactcaccgtctccattcaggaaaagaagtgtcgggaatgcgttcacgccatattgttttttcaaggccggtccctcacctttttccatatccaccttagcattcacaaacttttcattaaagaaagcagccacatcgggatcggtaaagacctccttcgccaacatcttgcacggcccgcaccaagaagtataacaatccataaaaatcagtttattttccttcttagcctgttccagcacctcttgccaagtccctttgaaaaaggcgataccttctgctttcttcaatgcctcctctccataaccgatgaaagcatctgcttccgtatagccccctgccaaatgaaccaacttaccgttaccgttcaagaacaggaaagccggatagccacgtaccgcatatttctccgccagctctttttctttaccgaaatcaatttttaagttaatgaaatgctcgttgtagaaatcagctactttgtccaaggtaaacacattctttcccatcatcacgcacggctggcaccaagcggtataagcgtcaatgaaaaccaatttattctctttcttggctttttccaatgcctctttcaaacccatctcctcaaaaacaatggagcgtttattgttccttttcacctcagcctgctcccaagcctttttccctctttccaagaaaagttccggatttttaggcaacagaaacggactgaccgtacccaaaatatcaccgttcggcatgaagaaagcgtaagtaggatacatattcatcactaatttcggagcaaaagccttgccctcttcggtagccatatcgatacggatggccaccacatgctgtttgcaaaactccaggttggcaggcactttctgccatacagcctcttctttatctttttgtttctgcgcctctgccgtagcgggtttccgcatggcatccaccaaaataatcttattctctttctgtgccagctccgctgcctgttcccatgtcaggttttgaaatactgttt

SEQ ID NO: 6275 - DNA, 497 bp, Unknown
  gut microbiota DNA sequence
acgtgtaagtacggttcgggggcaggtaagcgaaaacctaccgctgtaaagcggaaaggcgttgtttgccgagcctacagataaccaaagaaaaactcaatcaagacatggagatccttgcggcaaggttgaacggcattgaggaatttgcaggttgtaccatctaaaaaagagaagccatgaagcgtgacataatcatcatagaggacaaggcggtcagcgtaaccggtaacgaagtgtggatgaccgccaccgaaatcgccggactgttccatacgaccgtcccggcagtgaacgctgccatcaaagcagtccgcaagtcggacgtgcttaacgactacgagttgtgtcgctacatgcagcttgaaaacgggctgtacgcggacgtgtacgcgcttgaaatcatcatcccggtcgctttccggctgaacacctacaacacccacctgttccgcacatggctggtgggaaaggcactctcaaaagagaaacggcag

SEQ ID NO: 6276 - DNA, 30079 bp, Unknown
  gut microbiota DNA sequence
aaacggctgtatttaagaaagagatcttatttccggaacataatccgttatgctgctgctgttttgttattagctatgatcagcactgccgtttacctgtattggaaacagtctccttctgtttctatccccatggtttggcagacggaaccgcttccgggttcagccagggcatttttggtttttgcatccggagaaacggtaaatctggaagatgaacggaacttctctccacaacaagattctgacgtcagattggataacaaagacaacaccctgaccatcaaatccggtcaaccggcttcggttgccacggaagagtatcagacccttgtcgtgccgaggggtggggaatacaagctcgttcttgaagacggaagtcgcgtttatctgaattccaacacaaagttgcattttccgttggtctttgcgggcgaaaagagagttgttcatttagaaggagaagcctattttgaagtagctttcgattctctgaaaccttttatcgtaatgaccgggggaatggaagtccaggtattaggcactaaattcaatatcaaagcatacaccgatgatcaggctatattcactactcttgtttccggttctgtacaaataaaggagcgtgaatcggcgcatactgcgctgttgcgtcccgatgaacaatgtatttatactacccacgatggccggatgcggattcatacggtcgacccgcaagtttctttaggatggatacacgggcgttttgtctttgaaaacgagacattggaagaaatattaaaacaactcggacgttggtatgatgtgaaaatattcttccgggatcctcaggttgccggctatcgctttaccggaaatgtaggacgtttcgaccagatctctacccttctccgcatgatagagaaagcctacgatatttcctttactattagcgatgacacggtgatagtgtctaaaaaatagtgtgcgaattaatactaaacattttgaattatgaaaaaaatccgattaaccatgaagctattgttattctttagcttggccttggtgttgaacacttcggctatcccgagtaaggcacagcagacgaaagtgtcgctgaacctgaaggacaaacagttgaccgaagtattaaagctgatacaacagcaaagcggtttcaacattctttacagtaatgagctggtgaaaaacaatcgtatggtaagtcttcgtattgatagtgacgatattcacgaagttatgcgggcttgtctgcaagggaacgcgctggactatgaaattcaaaacaacaccatcattatcaaagcacttgcagccgcacctcaggtgccgcaagtagtgaaagtacgggggcatgttatcgacgccaaaaccggacaacctatgccgggggttactgttgttgccatggacggaggcggtgccgtaacgggtgctgctaccgatgccgatgggttgttcactgtgaatttgccggaagatattcgggaactgaccttcactttcgtcggttataagtccgtcacgcttcccgtccagaccgataaagagatgaccgtacgcctggaagaggaagtcgctgagatggacgaagttgtggtgaacggctatttcaccaaatccaaaaacagttacaccggtgcagtaaaaaccatcaccaacgaccaattgaaatcggtttcaaataccaatatcattgcagctatcagcgctctgactccgggattgaacttagtggagcgtagtgatctcggttctaatcccaatcgcgtgcctgaacttttattacgtggtatgagttctttctcttccggcacgcgtgttgtgaaccaacccaccattatgctggacggggtggaaatcagtatggaagaattatatgacctcgacatgaacgaaatcgagaacatcaccgtacttaaagatgcctccgcaactgctttatacggaagccgcgccgccaatggtgtcatcgtcatcgagcgtaaaaaactggcagagggaaatatccgggtcaattacaaccttaccggtaacgtccaattcccttacctgaaagattacgatctcttgaatgcccgggaaaaactggaatatgaaaaactttccggactttataccccagaacaggaccgttggggcagtgtggatatggataaagaacaatatcgtctcgatcagctatacaacgaacgatacaaagaagtagcccgtggagtagacagcgactggctttcacagcctgcccgcacggcattctcccatgaccattccttgcgcatctacggaggagcgtccaacatccgttacgaactgtccggacgtttcaacaatacgcaaggagtcatgaaagacgactatcgccgccggtatgctctcgggttcaaattggaataccacttgcccaaccaactgactttctccaatcgtaccaactacaacgaaacggacacgaaagataccccctatggcagcttccgcaactggatcgaccaaaatccttatgaccggatatacgatgaatacggcaatcccaacagaaacctctcgtgggacaactggaatccgatgatagacgccaaattgggtaatttcacattgaatagcaacaaaagcattaccaatacaacagacatacgctgggatatcaatgatttgttccgcattaccggtaacttcaatatcgccgtttctgaaggcaacggagaaaaatacatatcgcccgattccaaagcattcaaagatgagacggatatcaccaaaaaaggacgcttggaaatcagcaacagccgctcggtggactgggcggggaatatcaacggcgctttcaataagctgacggaaaacaacagtttaatcagtatgattatcggagcggaaatccgcaagaacagaagtgagaactcctctctgaaagccgctggattctatgacgatgctttgaacttcataggtcatgccaccgggtatccgacagacagcaagaacaaaccttccgggaatcaggacctcagtacggaagtcggcttctttgccaatgctaactatatgtataacaatcgctactatgccgattttgtataccgtctttccggttcctctaaatttggaagcaaccaacggtatgggcaattttggtctggggggctcggttggaacctgcacaatgaaaatttcctgaaattcgagaagttgaatttgttgaaaatacgtggtagcgtggggtatacgggtaaagtcaatttcgagcctttccagtctatcaccatgtacaaatacgaaaacaccttggaatatttgcatggtatcggcgccattccgcaaaccatcggtaacgatgatttgaaatgggagcgggaattttcctacaatatcggtgcagatatcagccttttcgatcgcaggttgaacgccaccctcgatttttatctcaaaaggacgaaagacttagtgctggatgccagtatcgctccgtctaccggggtggtcagtggtaaacaaaacatcggggagatggaaaacaaaggcttcgaattttctgtcgacgggtttatcattcagcggaatgacgtatggtggcaattggggatgaacggttccaccaataaaaaccgtatcctgaaaatcagtaatgccttgaaacgtcagaatgaactgaacaatgacgtggctccaacccgtcagactcctgctccgctggcacagtatgaagagggcgaatcgacttccgccctgaaagtcgtgcggtcggcaggtatcgacccggctaccggacgcgaggtgttcatcaaattggacggtacccgcactttcacctactcggcggacgataaagtggttgtcggcgataccgacccccgtttttacggcaatgtctataccaatgttttctataaaggtttcagtctttatattatgggctctttcaaatgcggcggttatctttataatgtgacccgggccagccgtgtggaagggactacagggcggactaatgtggatcgccgtgcatttgacagccgttggaaggaggtcggcgatattgccctgtatcgcaaaatcaccgaacacagcgttccacagcagaccgaccgttttgtggaaaaagaaaacgtgctcaccatcacttccgtgaatcttggatacgaatttccgcaacgtatctgtcagaagatgatgctccgaaatctgcgcttgggcgttaatctgtcggatatcctgcgcttttcgaacgtgaaagtcgaacgggggctcgattatctctacggcaacggatttgaatttaccttaagtaccactttctaatttcagaatcatgaaactcaatataaaaaatatgatttgcgggcttggcctcatggtgttggctacctcgtgcgacaattttctcgatgtacaccccaaaggagagatagtcggcaaagacctcctctctgaacgcaaaggttttgaaaacgccctttacggggtttatgcttccatgcgcaatgacaaagcttatggcgcttatatgacttattatgtcatggatgtgctggcacagtatttcaattgtccgggcaacagtgacattacggacctgtctgccttcaaatacaaggagaatccggaagttaccaaggtgttttccgatatttggagcaccatgtatcagaatatctcgtatgccaacaatattttggttaatctggaaaaccaatctcccgagacccttgaattttacgacatctataaaggggaggccttaggacttcgtgcctatatgcatttcgaccttctgcgtctctatgccgaccaggcaaccgacgccaagacccgcggtatcgtttataatacggcattctctctgaaaccgtcggatatactgcccaaaacaaaagtgtacgagcgcattattgcagacctgcgtgcggctgagaaattgttggacaacgaaaaactttatgaggcggcttccccggaagacggtttctttctggaccagtccatccactttaatcttcaggcagcgcgtgccacgctggcccgtgtatacctcactcaggggaatatcgacagtgctttctattatgccgataaagtcatccgtgaaggcggtttggaattagtggaaaaaactgaaatcgcaggggatgttatcggtgccctttcgcaaaaagaaaccattttcgggttgtatgccaaagagagtttttacacccgtacgaaagaagatttgtatgacgctgtttctttcaaaagtctcaacccgtggaacggtatcgccaccgtgtatcagcagggaggcggagaaaacgattatcgttgggcggcctggttccagaccatcagcaataacctccggtttgtcaaactgacagacccttatcaactgagtaccggcaataatcgtccggctggacagattccgggtgttaacctgatccggttgccggagatgtattacatcgctgccgaatgtctcttgcgcaaaaatgatccgaaagccgccgattattttaatgccgtattggaaagccgcgggcttgtggcattggatgaccgcatacccgccgaatcgctgaccatagaaaaaatcacacaagaacgctacaaggaatttgtcggtgaaggacagacttttttcaatatgaagcgtcttaacctcgacattcaggctatcacgggcgagattctcccggccgccaatagtatctatacggtacctgtccccgaggaggaattcaactatcgaaacgaagtctatgatgttaaacaataaaacagaaaaccatgaaacatacgatattatttctattcatcggcttgtgtatagcctcttgccatgaaacggattatccgactttcgatgactcggttatcgacatctatttcacccaggactccgttaactactctttcggtgtgactccgttgagtaccacagagcatgtggttgagcttccggtacgcattatcggggcatctgtgaaagaggtggcccgtaactttaaaatcgaggtagtagataaacgcaccaatgccgaatcgcctttgcattatacggtgccggaacaactcaccctggagaaagattccgttaatgccgtagtgcctgttaccctcaaacgctctgccctcggagacaccgaatggacggtagcgttccgcctgttgccgaacgattatttcaatcccacggcacaaaccgagaaagaaatcagttgcgaagccatcatcactttcaataatgttgtcagcaaaccgaactggacgacgtggaacggaagttttggctggtcggaaagtaatatggggccctggaatccggtggtgtatgtcactttcatggattttttccaccggttggaagagacgttgccggcaacctatagagcgctggtggaaagatacggagagaatttggatcaaaaatacaataccggttggggagaacaggatttcggaggttgggactgggattttaactatgctcttcagaaatacgtatgcggccctatgtatgaatactttcaggcacatccggaattgggtgtgaccacctttccgaagcccaatgtataataaccgaaaaagaaaaatatcatgaaaacattgaaatatctgttctttatcctttgcttgccgttgtttgccggctgtttcgaagatgaaacgactgtggatacggtgcgcatttcagaaatcagtatcgatacgctgaaaatgcagaaagtctacaacatcgaccaaaacgaggaattgcttattcctactgaagggttggtcagccaaagcgaacggcaattgccccttacgtatgaatgggaggtgaattacaaattttattccgactcctccgcacttcgttttacgggtaatgaattgggggcgttcccggcacggttgaaaatcagcaacgagcacggcagcagtttttacgaatttaccctgaacatcaattccgcctacgaaaaaggtatcgctatcctgagtgacaactccgaaggtgaacctttgctttccattatgcgggaattgagcgacagggaaattgccgaagggaaaaagcgttttttcacgaccaattgcttggcggtgaataatccgggcgtggaatttccacgccagcccaccgacttcagacaacgggacaaacaactttttatcagttttaaggataagccttccgtatatgccttgaacagtaaaatgctgaacgtggagaatatcattaccgacggcaatccggatttcattccggagcgattgcttgtcgtggatggaacgggtgcggcgtcgcctgttatatcggaaagccgtaaaatatataaaatggccacattggaaggattgattgtaaattatggccggcaaatggcgtctacctacgataaaaatgtggttttggcaaaagggttaggttatcaggatgcgattatcttttgggatatggaaaaagagactattgtcgatttctacaattattactatgaatattcggctgccgaccaaggattggatttcagaggtcattctccgatagcgctttatgagcgggatggaaattattttaccatgattacttgcaaagacggtgtctttatgaaaacctctattgcatatacctggacaatatggaatagcgattacacccaacaaagtttcggactatccgataatcaagtggtcattaacggtactccggcactcacttcggaaagcccttatgtttccaacacgacctaccaatgtttgttttatgcttccggcaataaaatctatcgttggtattacaataccgccacttcgttcccgaccgaaccttggcgcacgttggatgacttggaaggggctgaaattaccagtcttgccgtcagtccggataaccagcagctttatgttggcgtctatcaacctcaggcaagtggtttgaacggttcgttttatctgttgaattgcaacaccggtaaaaacgaaggagattctccctatttgaacgtggcatacaagcccttgaaagtagtttataaaccccggtaattattttcttattgcgaactggagaatgtgccttgagaggaaaagtctttcggcgcgttctcctctttttgaaacaatatccatgaaaaagacattcatttatctcttcatcctgctttgttttgcttgtcggaacaaacaggagtatactctttgcggcactctctatatggacagcaataccgttgtcgatatgctcggtattcagatggaggacacactactctatgttaaggtggatagtgccgggtatttttccacaactattccttttcgggaggtggttttttgtaatctcttcggcgtagctgtcaccggggaagagcgctggcaattcgtgactcctgtcgccctgcaagccaatgcctccgtagaccttgatttccatcttaccggcggccagacgtccatcggtgctacagatccggacaaccgggcattgcaggccttccgggaatggtcgctcaaccaaagccgaaccctttggagcaatccgcctgccggaacggaactcgcttcccgcctcgcccggtttccatgcgaagtccaacgtattaccgaacgggagcggctcgattcaacgactgccggttacctttccgcctgggcaaacatcgaatgtctgaatcttgcccacggattgttccgcgacagcatacctgcagcgctcgcctccgctttgcctgtcatctcccaggccctggatgtgccttattggaaactgttatacggcagtgacctctatatcagcgaatacttgcaacaaaacgccccggaacccgaagaccaaatccgtctcctgcaagagcggttccgcatttcttccatccgggaaaacatcacccggagaatcatcgaagactacatccgccggcatccttattccggggagcatctggcacgcctcgacaaactttgcagtgaccgacccgataaggaacaacttatccggaaatttcgcgacaaacgttatgcctctcccggtgctcccttgcccgacgctgtatttgaagataagaacggtcaggagcatcgtctcactgaatttgccggcaaatatatctacattgatctttgggcatcgtggtgcgctccctgtgtggcggaagtcccccacctccagaaattggaaaaggatttgaaccgtcgggacattgtatttgtcagcatttctttggataccaaacgcgaaaactgggaaaagcaaatggaacagctccatatgcacggaaatcaatggctcgtccgcgacgaggctttcgccgatatgatgaatgtcaaaggcattccccatttcctgctctatggaaaagacgggacattgctggattataaaacagcccgtccttcatcgggtgacctgctgaaaagcagactcgagcatctgccttgattgtctttgcggatttagattccgattcattgccaaatattccggggaaaggtatcaggcatctttttatactagatgcctgataagttcttcccggtcgccgtaaagcatatcgatcattggaatttcgatgagagagtagcagcccggttgctggcgtatggtggcacgggcggccgataccatgatttgtgccgtcagggccgggttgttgatgtgcatgttgaattcaaacaactggttttgcgttttaccggatacccctttccgggtgaggttcacgccgtgccccatgtcgagcaatgtgtctacgttttccacctgcatcacgtgggtttcgtcatgggcgaaatagggatcgtttttgatcttttgtgcaacttcaccgaagggatatccttcctgaagttcgatatataccattctgcgatgaatcccggttcccgtggggatagtcatagacagggcggcctttactccttcgattgctttaacggctactgtatgtcccatactcatgcccggaccgaagttggtataagtcaaccccttgggtgcacaggcttccaataatgcgcgtattacggaatccgtccccgggtcccagccggccgacataatggacactgcatggtgtttgcgggccacttctcccaaagtgcggtgtaaatcgacggtttgagtgtgtatgtcgaaactgtctaccgtattgatacctagccggagggcttcggttgcatagtgttccacgctgcgggtcgggttacataaaatagctacctgaaccccttccaaatcctgcagatggcttactactttgtatttgtccaattctgccggtacatcggcggcattccggcgcacaacacccacgatctcgaaatcgggagcaacttgaagagcttctattacatatctcccgatattgccgtatccgataacggctgctttaattttctccatatatttctaatcttaataatctgaatctgttttatatctcttataccggcacgtcgaattcccgtaatgcactgttcaacgaggttttcaggtcggtagatgcttttctttttccgatgatcagcgcacaaggcacttcgtattcgccggcaggaaattgtttttttcgggaaccggggatcacgacggaccgggccggcacataaccctggtattctatcggttcatttcccgtgacgtcgatgatcctggtcgaggcggtgattaccgtattcgcacccagcacgacttcttcttccagatgggcaccttccacaataatacaacgcgaaccgatgaagcagttgtcctcgataatgaccggtgcagcttgtaccggttccaatactcctccgattccgactcctccgctgagatgtacatttttcccgatctgggcacacgaaccgacagtcgcccaggtgtctaccatcgttcccgaatcgacataagcaccgatattgacataggaaggcatcatcaccactcccggggcgacataggctccatagcgggcggcagccggaggaactacccgtactcctaattctgcataatcttgtttgagccggatcttatcgtgatactcgaatggtcccgtggtcatggtcgacatgggttgggttggaaaatataagataaccgctttttttacccattcgttcacttgccaaccttcgtcggttggagtagccgtgcgcaatttccctttgtccagtaacccgattacctgatcgatagccgaccgggtctcttctttcttcaataattcccggttctcccaggctgcttcaatgatttttctgattgctgtatacatttctaactcgttttttgtcggacgaaagtgcctatgcccaggatgtctctggaattgcaaatttcgcaataatttgttgtacgacaaaaactgttccccggattgttaatcgtctaaccgatttttcccgcgatgtgtagaataaaacatagatcaataaaaaaatatatatacctttgttccctcaccgtatgcgtgtcgtaaaagtttaattatttaatgtgctatgctgaaaaagattcctcatacttatacgattattttttcgattattctgctttgtgccgtcttgtcctggattattccggcgggagagtatagtcgccataccgtcgaggtcaacggaacgacccggtcggtgattgtcgataattcttatcatgcggtggaatcggttccacagacctggcaggtattttccgctttgttgcaaggatttgagaagcaggccggaatcatagcctttttactgattatcggcggggcttttcagattatgaacaatagccgggcgatcgatgtcgggattttttcttttttgcgttttacgcagggattggaacggcatcgttttatgaagcggatcggggtgaacaatctggtgatcgctatgattatcttcttgttcagtatgttcggggctgttttcggtatgagcgaagaaacgctggcttttgtgattatcattgtacctttggctatttcgatggggtatgattcgattaccggattgtgtatggtctatgttgcggcccacgtgggatttgccggagcgatcctgaatccgtttaccatcggtatcgctcagggactttccggtttacctttgttttccggttttgaataccgcttgttttgctggtttttgctcaccgtgattttagttgcctgtgtgttgatctatgcggcccgggtgaaacgcaatccgaccctttccccgatgtatcgggccgacgaatattggcggaatcgccgtaccgaaagtggcgaagaggttgcttatacgatcccggtggcttcttatatcgtgtatggattgattctcgtgtctctgattatttttgctgtcgtttatccggttactacttttagtttggggaatgcttcggtcactttttatgctgtaccggtcggtacggttttgttcgctttgttcggatggttggggctacggaaatctttccatttttttatcctttctatcctggcttttacggtcatttttctggtgatcggagtgatggggcatggttggtatctgcccgaaatttcggcgatttttctggcgatgggagtgttgacggggtatgctgcgggcaaagataccgacagcatcatcaaattgtttctcgaaggagctaaagatatcttatcggcggctattgtggtcggactggccggaggtatcatccagattttgcaggacgggcgtattatcgatcctatattacatgccttggcttctctgatgaacgaggccggaagagtggcttcggttggtgcgatgtatgtaattcagacgctgatcaatatcatcatcccttcgggatcggccaaagctgctttgacgatgccgattatggctcccttctcggatgtcatcggtatttcccggcaagctacagtgatggctttccagttcggtgatggctttaccaatatgatcacgcccacctccgccgtattgatcggtgctttgggaatcgcccgcattccctatgaggtgtgggtaaaatggtttgccaaaatcctcctgttgtttgtcgtcctgggttttctgttactgatacccacagtagtcatgcagttgcctgggttttgaaaatcttaagctttaatgatgtatttttgtctaaataaatgctgaagtaaaaatggagaaatttgctgcaatagatttcgagacagccaattggcagcagaccagtgtttgttcggtggggatcgtcgtgatgaaccggggggtgatcgaagaccggttttacagtctgattcatcctgcaccgaatttttattcccggcgtaatacagctattcacggtttgagtcgggaggataccgaggaagctctggcttttcctacggtatggcgggaaattgctccgatgattgaagggatacctttggtggctcacaatagcatgttcgacgagggatgcctgaaagctgtctttcggctttacgaaatggattatcccggttactccttttactgtacctaccgcctttcccggaaattatttaaaggactggaaaattatcagttgcataccgtttcttccttttgcggatatgacctgaaaaatcatcatcatgccctggccgatgccgaggctgcagctgtcattatgcaatccattttgcagcaatgtcccgatttatagtagaattattcagtcgtacatttgtacattaattaataattcgataatttataactttgaaaaggcatggacaaagcccgatttttctttggtttcttgaagccgtaagtaacgttcagtccccatgcctttacactggctttttctatcactgacgaacggagtgaggagttccgccggtcagagaaggaaagccttagcggaccgttccagacgacccggtctgacggtataaaacccgaaatcggaatagaaagaaaaaatatatctgcgtttaaggtaaacatgtatataaacaccttcttttataccagtgtttctaggaaaggtgtttgccggtattatttccggaggcgtctatcagcaaatgtcggataaagtagttatggcgcggaaactagtagcagagaagggcttacaactatcggatcagctttcgaacaatgcttattttgaagaagtagcccggcaattccagctatcgggtcaagaattaactcatttattgtaggagaaatacaatccttccgggatatgggtggttatattggcaatagggctttgttcaaacctatttctctggatatacgatagattaacaacccggaaaattcaggcccggttatgaggttcggccagtagttgcggcaaatacttttgtaaagccgacatatccggatagatcaagtcggctccggcctcttgcaattgtttttcaggaataggccctgtatttacggcgatagtgaaaactccagccgctacaccggcttttacccccaaaggggcattttctataatgaaagcttcgtcgggcatagcatgtgctttttgcaggcctttcaggtaaggttccggatggggtttaccatgctcgacatcgaaagcggtcaccaaagtcgaagcatcgacaaaaccggcatattcttcggtcaaccgtttcaacaacgattgttgaccggaaccggtaacgacaacgggcaataaaccgtgctcccggacaatcttcaaaacttctttggcacctggcataggcccggcctcgggcagctcattaaaatatttactttttaaggtatatagttcttcaatctcctgcttagtcgcttgccggtgataggtccgttcaaaaatcaaattaattgtccattcggctgtagctccctcatattgataaaattcatctctttcacaagggatctcccgggaagataaagctctataccaagctaacgtatgattcttcatcgaatcgaataatacgccgtccatatcgaagagtacagctttcaacggatgtcctttttttatctcgaccataataaaacacaattcgataacaaaacgaaaaacaaacgaatttgttcgtttagcttagtataaataaaatcgtattccccattctcaccgaccagataataaagtcaatcgatggcaggaactttatcttcagtcataatcatcaattagcgggcaaatatataaaaactcgctcacatacggatggctttggagaaaataatgcaaagtgtttgaaatcgaaagggatacatagttttgtaccagatccttctattagtggcttttgaccatttttgggggagtcaggagaacaaatttgttatatctgctgatgtaaacttagtcacctgagatgatacgaaaaggcggatacacatctatgtacccgccatgttaaaaatcaatgtattgttcctgtttacggcaacacaattttgaagttaggatctgccggttcgtaggcactacggatcatatctatagctttggtgtctccggtagttttcaccttgttcgtcttacgcaaagtttgtaaatccgttctgccgaagaacagtttgacgaaatccattttcgcaatctccatggtcaggtcagcttttttatcctgactgccaaggcggtgattcaacaccccatttttgagcatcagcatcaccttctccttcgtatctgtgaagttaatgttgataacagcttcctttccgccagctttctccccgttcaactggatggcacagtagtcgagcaaagtgcccatatccatctgggacaatacaccgtcattgatgagttttgaggtgtaaggcacagccttcttgagtaaatcttgagctccagtcaagtagaagttacgccacggaccgctttccgcctgataacccaattgggaatatgtgtcggacaacaactggcgtgcttctttgttttcgggttcggcaaaaacgagattatccagtagcgtagccacccaacggtattcacctttggcatacgaggccttggccacttcgagtaccttatctgcaccacctatagcttctacatacttggcgcccaattccgaagggggcaacgggttaaggtgcgccggattaccatcgaaccagccgaagtaaaggtcatactgtgccttgacgttgtggctcagcgtaccgtagtagccacggcagttgaactgcgatgccagcgaagcggggagtttcatctcttcggcaatttcatcaggtgtcagaccacggttagccaaatgcagggtctggtcgtgcagatagcgatacatatcacgttgagcttcccagtagtccacgatgcgttcattgccccaggtgggccagtgatgggtggagaatgacacttccacccggtcaccgtaacgttcgatagccgtatccaccgccttactccacaacagtccgttacgcactttcgcaccacgcagcgtttgcagattatgcatgttgtgcgtcatatcttctgccgtacagaaggctttcagttgcggaagccaaatcatgatttctacgggagcttccgtgtcaagtacatagacaaactccatctccacgccgtcaatggtgtgtttctctccggtgtttgctatttcaatggtagggcgggcgatacctttgctacccgttgacatacgctgtcccagaccacaacccaatgtacctttttcacccggttgcaattgcaaaccatacatataagtggcacggcgggtcatagccactccggccagcacgttttcgttttgtgccgaggccatgaagcctttgggagcgatgatgtcgaaatcctttttagatgaagcctccttcaccgcagcgatacctccgtaatggtcgccatgagggtgggtgaaaattacgccttgtacaggtaggtctgccacatgcttttttatgaggtcatagcccgccttggcagcggcatctgtagtcgtcacgtcaatgataatccagccattatcagaacggatgaaagtcatgttggctatgtcgaatcctctcacctgataaagtttgccgggtatcacttcaaatagtccgtttatgcggttgagttgcgactgtctccacagactcgggttggctgtctgaggagtattgctcttcagaaaatcccattcttccacagaataagatactttgccttctttatccagtacagcgtttccatcgatgcttgcgataaagccccggttggcatcttcatagtcctgacggtcgttgaaattcagttccgtctttacagcttcgttggcacggatagtgtgttccgtagccgatttctgcgccaaaagaactgacggaatgaccgtcagtgagagcgccacagtcaataactttttgttcattgtcatctgatttggtttcggtacaaagtaacggagatttttcacgcttgtaaatgtgcttttctgcattttatttgtatattcgtacgattattaagggttgaatagtttattaaccctatttacatgtctatttgtatgattcagtctatatttacattcgataaattgcttcaacgcttgcagttgggtaaagaggtgactcctttcgtgatttggcgcgaaaatgaccttttcggcacacacgataatccggtaaagatagatataccctgtctttttttgtgtctggatggagaaatgcaattggatatcaacttacagtcctatcgcttcaaccgtgaacacttgttgtgtttcatcacaccctgtgcctgtcgtattgtaagccgcagccccggcttccgatgtgtagggctgttgctttccaaatctttttggaggcagcttgtttttgctgagcgtaccttgggaaagattgcgatacgtgatgctttcattgccgtccatgatgatgaacacgagcggctgactcgcttctacgagctcctatgtctttgcgccgacgctcccggtttgagagattccgcagatactctttatccgctcatcctgggtatgttctgtcaagtacgtaatatctgtcggcggctggaagacaccgccactcccgtgtcgcacagtgagaagatcttttatgatttcctcgatttgttacacatccattaccgtaagcaacggcgcgtatcattttatgctgacgagctttcactgactccccgtcatcttactactgtaatccgactggtgagcggacgcagtgccgcacggtggatagaggaatacatcgtgctcgaagcacagattctgttgcgtaattcaccaatggccattaaggaaatagcctacgaattagggtttaatgaacaatcacttttctccaaatatttcagtcgtgtttcgggtagttcccccgaaagctaccgtcgttcttctacagcatagagcatccggttagaccggacggttttagtttactttctggattttcaataaaagagggtgtccaaaaagtatttggcaccctcgatttattcgtatccctattggagactgaaatcaaatatccgattctacaagggggtattttgcctttttggacaccctcttttctatctgcagtgatttccccgggttggcggctcctttcgtcggtcggtggagatacgaagcgaatcagttgtattatgagatggaggtgactgccggaatttataacctgtgtttttattccgtgaaagatacgcttggaaatgagttgtggtgtggagttacacgtttccggatgaaaaaagaaggcgataagctgatttgcgaagagttggatacccggcaaaatgaattggggatcggggaatggcaatcggtagatcaaaatgaattgcggataaagatatgggataacggtaatccggaagaagccggaaccgtacgtatttatcggcgcctgaatgaggaaggataaaagtgacgggggtacaaacgttctaaatacggaaaaaaggcactaaataatttttttaatcctttgaaagggttaaatttgttcgttttttcaaacaaacagttacagttaaatatataaattatggcagaaaaagaaaattgtaagcttttcagtgagtttgcgccgaacacaatgcaagagtggatcgacaaagtcactgtcgacctgaaaggggccgatttcaataaaaagcttgtatggagaaccaatgagggttttaatgttcagccgatgtaccggttggagaatatgcaggatctgaaaaatctggattgtctacccggcgaattcccgtttgtgagaggtaacaaaaaagataacaacgattggtatgtacgtcaggatatcgttgtggaagatctggctgaagcaaataaaaaagcattggatgtattgaatcgcggtgtcaactcactgggttttgtactgaatggatgccaggaatttaccaaagcagatatggaagtcctcctgaaagacatctgcctggaatgtgtggaaatcaactttgtcgccggatgtaaaaaaggaagtatcctggatgcatttaaggctgttgtggaagaaagaggtattgcacctgaaaaaatacaggggggaatcaatgtcgatccgttgaccgctctcacccggaaaggaaagaactgttgcgacaaacctttcgaaaacgtaaaagtaaatcttgaaaaaatggctgcctacaaaaacttcaagaccattgaagtaggtggatatgttttcaataactcaggatcttctatcgttcaggagttgggattctcactggctgccggtgttgaatatctggacaaactgacggatgcaggaatgaagatcgatgaagtggctccgaaaatccgtttccacttcgctaccggttccaagtatttcatggagatcgctaaattgcgggctgcccgttacttgtgggctcacatcgtgaaagcctacaatccgtcttgcgattgcaaatgtaagatgaatatccatgcagaaacttctgaatggaataaaaccgtatacgatccgaacgtaaatatgctgcgtactcagaccgaaacgatgtcggccgtattgggcggtgtcgattcgttcaccgttcatccgttcgacgataccttcgaatgtcatccctccgacgtggcggaacgtgttgcccgcaaccagcagttgttgctgaaagaagagtcgcactttgccaagatcgtcgatgttgccggcggttcatattatatcgaggaactgacccagaatattgctgaagctgcctggaaattattcctggaaactcaggaacagggaggatatatcgaagcattgaagaaagggtttgttcaggctgctgtgaaagctaccgcccaggctcgtgacctggctatcgctcagcgtaaagaaaactttgtgggtgttaaccagttccctaacttcaacgaaaagatcgatcgtcagctgtgtgcctgcatcttcgaacccgaagacgaaactgccgaaggcgctgaaatcgaaaccctgaaaccttaccgcggaccggctgcattcgaggcgatgcgcctgaaaaccgatgctttctcggctaaaaacggtcgtccggttgtctatatgtttccgatgggtaatctggctatgcgtaaagcacgggctcagtttgcatgtaacttcttcgcttgtgccggatttgaagtaaaagacaacaatggcttcaagacggtcgatgaaggggttcaggcgtgtctggacaataaagccgctatcgttgtgctgtgtagctccgacgatgaatatgccggatttgcacccgaagctttcgaaaaactgaaagataaagctatcgttgtagttgcgggtaatccagaaagccgtcccgaactggaagcaaaaggattgctgaactatatccacgtgaagaacaatgtactggaagaactgaaaggctaccaggtaaaattaggtattaaataaagtaacgggtaactctgtaactttttaactattgaaacatgaaaccgaattttaaagatataaatattaaagcgtctgaaaaggcttccatgagcgccgctgaatgggaaaaagccaaccacatcgctaaaaactggacgacccctgagttgattccggtgaaaccggtatatactgccgatgatttgaaaggtatggaacatctggattatgttgccggaattccgccttatctccgtggaccgtattctgccatgtaccctttgcgtccctggacgatccgtcagtatgccggattctctaccgctgaagagtcgaatgctttctatcgtcgtaacctggctgccggacagaaaggtttgtctgtggcattcgacctggctacccaccgtggatacgactccgaccacccgcgtgtaatcggggatgtcggtaaagccggtgtggctgtcgactctatcctggacatgaagatcctgttcgatcagatccctttggataagatgtccgtatctatgaccatgaacggggccgtgcttccggtcctggctttctatattgttgccggattggaacaaggggctaccctggagcagctgtccggaaccattcagaacgatatcctgaaagaatttatggtgcgtaatacctatatttacccgccgaaattctcgatgaagatcatcgccgatatcttcgaatatacgtccaagaatatgccgaagttcaactctatctctatttccggttatcacatgcaggaagcaggtgctaccgccgatatcgagttggcatataccctggccgacggtttggaatatctgcgtgccggagtaaacgccggaatggatatcgatgctttcgctccgcgtctgtccttcttctgggctatcggaaccaaccattttatggaaatcgctaaaatgcgtgccggtcgtctgttgtgggctaagattgtcaaacaattcaatccgaaaaatccgaaatccctggctctgcgtacacactcccagacttccggttggtcactgaccgaacaggatccgttcaataacgtaggacgtacctgtatcgaggctatgggggctgctctgggacatacacagtcattgcataccaatgctttggatgaggctattgcattgccgaccgacttttccgcccgtattgcccgtaatactcagatttatatccaggaagaatctaccatttgtaaggcagtcgacccatgggccggttcttactatgtagaaaacctgaccaacgaattggtacataaggcttgggaacatattcaggaaattgagaaactgggaggtatggctgcggctatagaatccggtttgccaaaactccgtatcgaagaagctgctgcccgtacacaggcccgtatcgatagtggcgaacagacaattgtaggagtgaataaataccgtttagacaaagaggatccgatcgatattcttgaaattgataatactgcagttcgtgaagctcagatcgcccgtctgaaaaaactgaaagccgaacgtaatcaggctgaagtagacgctgctctggatgccatcaccaaatgtgtcgaaaccggcgaaggtaatttgctggaattggctgtagatgctgctaagaaacgcgcttctctgggagaaatctcctatgcatgtgaaaaagttgtcggacgttataaagctgttatcagaaccgtgagtggagtatattcaagtgttgccggcgaagatgccgacttcgagaaagcaaaggcaatgaccgatgagtttgccgaactgaccggacgtcgtccacgtatcatgatcgctaaaatgggccaggacggtcacgaccggggagctaaagtggttgccaccggttatgccgatatgggcttcgatgtcgatatgggacccttgttccagacaccggaagaaacggctaaacaagctgttgaaaacgacgtgcatgtcgttggtgtttcttctctggctgccggacacaaaacgctggtacccgccgttatcgccgaattgaaaaaattaggccgggaagacatcctcgtatatgtgggtggtgtaattcctcaccaggattatcaattcctgttcgatgccggtgcaattgccgtattcggacccggtacgaaagtatcgaagagcgctatccaggtcatggaaattttgcttcaactggccaggaagtaaaaatattatccgatgataaagaaacggctgccggggttccggcggccgttttgtattatcatggctcctgttgttttcggttcggtaaaatcaatcaaaccagtttgttgtttttgctctcacctttatgtatatttgtatactgaaacaaaggtcagaggaattatagataccttattttaattgggattatggaaaagttcaggaattatgtagggctggttctttgtctgtgtatagtgaccacggtgtcgacggctcagcgcaaagtggaaacggtggcagagaaagtcatgctgtttatcgacggagcacaggtaacccgtactaaacgggtggacatcccggctggcaattcggctttactgtttaccggtctttcaccttatctcgatgcccggagtatgcaggtgagtgcgaagggaaaactgacgatcacgaatgtgaatctgcaatataatttcctggacagtgtggcggtagggcgtaagcaggagcagttgcagcagactttgaaaaaaatagaaaaacaacaggaagaacggaaagcggctcttgctgtcgtgaaggcggggcaggaggtattgaaaaacaattgtacgataggtggtaaaagcaatgcgttgactatggcgactgtccgggaagcgaccgcttatttcaccgaacggatgaaagcgctcactgccgaagaattgactattggcgggcagctggaagaactgtccgggcggcatcggcaggtgtcccgggaattggcccaggtgaaagggaaggacttgaaacgtaccggggaaatcctggtgggtattcatgctccggctgcctgtaccgtaacctttaccttgagctattatgttaaaaatgccggttggtttccttcctacgacattcgttcggagagtctgaccgaaccactttccattacttataaagcgaatatctttcaacatacgggcgaagcatggaaaaatgtcgctttgtcgctctcttcctccagtccctcaacggggaatgtggctccccggctgttgccttatcggctgaattatggatgggcggcaccggtctatcgcgatgaaatgaatggaaataacgtatcgggtattgtttcggatgccattacccatgaacccttgatcggagctacggttaaaattccgggtactactatcggttgcgctacggatgtcgacggccgttattcgttgacgatgcccgagggacaacaccggttggaatttgcgtatatcggctatacttcgcggacggttgatgtgcgtagcaatacgttgcatgttgtcttggatcccgatacgcaaagtttggaggaagtggtggttgccggtcatggctctccccggaaagcccggaaaaacactttggctcttatgtctaccgcgcctgtggaagaggtagttgccgaagaagaggcggggagcataccgattgaagtagaacaaacccggcaaccgacaggttatgagttcgggattaagatgccctatacggttttatcggacaataagcctattgtggcagagataggccgctatgaactgccggtctcttatgtctaccggtgtactccgaaaatcgataaagatgcctttctgatggcacaggttaccgattggagtaagcttaacctgttggagggagaagctaacatctatttcgaaggcacgttcatcggcaaatcggtgctcgatgtgaatacggccggggatacgctttcgttttctctcggacgcgaccggcagattgccgtacagcgcacgaaagagcatgaatatacctcgcggaaactgatgggagctatgcagacacagacgataggttggaaaatatccgttcggaataatcgtccgcaggcggttgatctgactctttacgatcagttgcccgtctccgccaacagcagtattaccgtgactgccgaagaggtgagcggtggcaaagtggacggcgataccggtatcgttacctggccgctgatcttgcaacccggcgaacagcgcgatcttatcctgcgctataaggtgaaatatccgaaagacagacggttggaggtagaataaacggaccgatggcagaagaacaggaaaaaaatattatccgtttattggcgaaaggcgacgaagaagcgacgggcattttattccgtagttatcatcggcttctttggaagcctgtcttttcggggcggtgaataaagcggcacttaaaaccatgagggaggccggaaaacgctattttgaagatttcaaaaattctatttcttgttttttgctgtcttttctgactattcggcttgtcggggcggccactattcatgccacctattgcaggtgatttgcaggtctggaacctctcaggatagggattaacccttattcatctccgattcacctcctatacaacaacgtcgggaataaggagtgaataggctatgaataggagatgtaacgtttgtattgcctgtcttcaccctgtttggtaaattttcttctgttttttgtcacctatttgggatgttttagaatataaatagaagtgtttatatatgttaccctgactgtacgtttataagtgtaaatatgtatataactgcccaaaacaatagattagattttattaaatctacaggaaaaagtggttatccggaaaggtgaccgcttttttgtcggtatcccggtgacaattgtttttgggtgtggagattttacccaaatctgtagaacgaatagggggattttccatataataaatgtaaatagagtataactattctgttttatgatttttaagtaattgattaataatgatttgttttacgctcccttttgctgcgaaattttcggcataagtttttcatattgttttacgaacgcggttagaaataagagttcgacaacataattattaacaattaaatttgaatgtcatgaaaaatttagtaaaaagcgcatttgtagcattggttgtatgtgtatttgctattccggcatctgctgaaagtctggtgatcgctcctgtaaatgtacaggatactgtggtgaaaaaggataccgtggtgaaagaagaagctccgatgctattggctcaggaaaaagtgacttatacgaagatagaggtagctgaagtacctgaaaaagtggctgctgcagtaacggcaaaatacgaaggttatacgaccaaagaggcagcaaaaggttctgataacagttataaactgattatagaaaaaggagattccacattgaccgtttatttcaatgaggccggtgaatttctgaaagaagaagctcctcaaaaagaaagtactaccttggtttagtcctatccgaataggctcgataagcaaagaattgtcctgaaagttcgaggtagaaactttcaggacaattttttatatgaagaatcatttttttacttatgaaaacgttttaaatgtttttggtgtatctttgtgcgcctaaaaaaaatacttatggattacgggattgtcattgaaaaaatacaccaggaattgaaagcctattggggaaaaggaaaggtggcggattatataccggctttagcggaagtagagccgaaacgatatggaatagctatcgagacattggacggacattcttttcaggtaggagatgcggatattcgtttttctattcagagtatctctaaagtattcgcattagccatggtaacccgtcatttgggtgatcgtatctggaagttcgtcggacgtgagccttcggggaacccttttaattcgcttgtacagttggaatatgaacatggtattccgcgtaatccttttatcaatgccggggctctggtggtcaccgatcgtctgatgagtctttatgaacagcctaaagatgctattctccaatttgtcagaggtatatgtggcaatgacgatatctactatgataaacacattgcccgctcggaacgtgaacatgcggaccggaacatggctttgggctatctgatgaaaagcttcggcaatatggaaaatgatgtggaagatgtggtggatgtatattgtcatcaatgcgccattgctatgaattgcaaggagctgaccagagcttttttatttttagcaaaccatggagtgaatccttttaatcaggaaaaaattctgacggtcagtcaatccaaacgtctgggggccttaatgttgacttgtggtttctacgacgaatcgggagattttgcttttcgggcaggactacctgggaaaagtggagtcgggggaggagtggctgcctatattccgggtaatttagccattacggtgtggagtcccgaattgaaccggcatggaaattcacttatcggtatggaaactttggagcggtttacgacggatattaataattctattttttaataccggggggcttgactgaaagaaatacgaagagggtgtccaaaaaggcaaaatacccccttgtagaatcggatatttgatttcagtctccaatagggatacgaataaatcgagggtgccaaatactttttggacaccctctaatatcattaaattattcgttgataatttcaacttcgtcgacgatcaactcgcttcctcctgctccgcagaacttgtctccatctttactcgaggagaaaataaccgcaaaacgatattttttggcaggattatactgctgtttgtagtccagggttaaatcaaattccttgaaactatcttgctggccggtgatcagctgagcaatagcgactattttatctgaattgaaaatggtttcaccattgaggaattctgtgtaattatctacttcgtataaaacagcactcaaagcgccttggtcggttttttccgggtctaattcggctttgttggaattatttttcgggtctttacaataatagtacttttctccgggtttgtatttataatatcctttaaccctgatcggtttctgaaaataaggaataccgaattgggtactattcaacgtatttttggtatcgacctcaaagtcacctaagaataaagaaccggaagtaattaccggaatagggggaaaaccaagtatactttctttacctgttgtataggcagtcgagatcttggctgctttcccgctttggccttctgttaccggggcaacaatcgctccgccatcgtataatccggggaatatcttgattaaagatatccctttatttgaagtggcccattggccttccggtttataaaaatcattgccttcggaaacccaattttcaaacgttgctttgggaacggattgacctattttaaatcttgcccgatattgacgggttttctgataattttccgatacgacattgaaatagacaaattccgtatcgtctccttgatcgatggctttcgaaaaatcgactacttctcccgaaacaggtttcacgatagcgcctttagagagttcgataataggagtcaattgtagttttgaaaggtcggcatccggtttgacgtaaaatacgatttcatatttataattttcgtatttgatttccggctgggacaagaccatatcgttatcgaaggtcatcttcaggatttccggctgatcgttcatcgtttgccggcctttgaaattcaggtcgacggtcagatcggtattttggagtttcaactggaactggatggctcctcctccgatacttccgtttccattggcggtcatttctcctaacttacttaaaataacctttttattggtaattttaaagtagatattatgatctgctgctttgctgaaactattggctacaggaatagaatcgatttcaatagaaccgatcgtatttttgccaatcttgtaattgatattactggtttttaatttgacataatctttaccttgtgggaaaaagttaatggtttgatcggaggtatcttgggcagattcataagttaaaaataagtcagcattgtatagcccttcgatttctttagccagattgacctctggaggagtcggggtcggagtgtcgttatcatcgtcgtcactgcaagctgtgaaaaaccccaacgaacaaatcagggtgaataaaaataattttttcatacaatttaatttactgtttgtgtttatttcttcagattaggaaaataaacggttaaagtcttcgataagttgttcccggcgctgtctttaacagttaatatgaatttatgaggtcccggattttcgaatcctcctaataacggcatgaactgagagacatcgaaagtagtttcagtactgccttttatttttttatctttcgatagcaaaccaaatccgatcaaggtttgggctagttcctcggaagccggattggccaaatcgaattctttcggtaggtttactgcatttagaacatcttctgtcaataccggcgattctattttaacgatcagattttcgattcctttctctgttgcaatatttactataacttctgctgtattgtctttgtttgttacattgaaagtctgatcgatgttgaatcctcgcccttcgattgtgacggggtcgttgtcgtcatcgtcgctacaagctacaaaattcagcgttaaaaacgccattaagagaaatactaaattctttttcatcatctgtttttattaatgttattttctgataattagggaagaagataaacggacgtttaaatcgtcgtttatttttccctttttttacatgagtatagttaatagcaaaaatcgtgcaaaattaataaaatatgtgtgttaaataataaaattaacaaattgcatgcataagtaaatgatattcaaatcatatcaatttcagatatagaattacagattatctgattttatcactagctttcgtatccgtgtacccaattacttttttctttcagttcattttttacaaatttaaacgtccgtatttattggtcgttggtttctgaatgttaaaaaatgaaaaaattaattatgaaaaaactgattttatttttgtttgtagcgttacttacgcaggtttttacatcatgtaaagacgatgatgtttatcacatta

SEQ ID NO: 6277 - DNA, 58310 bp, Unknown
  gut microbiota DNA sequence
atgtcgatgcgccattcggaggtgttcaattgggagctgatgatattaaacaaaaaatttatattaccaaaacaggggaaaatctggtaactttacaattgaaggattttacatttaataatatacctatcggtacgcttgaaattaccaatgttgaagttgataaggttcatgacgacttcaaaatagaaggaaccggaaagttgacattgattgtaggtggatgtgatatcgctgtgaatggtacggtgagtgctgccgggaaatgtaatattgttatagaagtaaaggttacttctgaaggacagggggtaaattttgtcggtttgaatgtaacggttgattttaccggggatcgcctggctgctgataaaagttcagaggctttaattaaagaatttatcttcaatagtgatagtatttcagatgttattattgctgacaaaacgattgagttttatgctctggagaatacagtgaattataagttcaaacctacaatcacaatttctgaaggagctacaataacacctgctgcggatgttgaacaggatttctcttctcctgttatttatacagttacctctgaagacggaattgtggtaaacaaatatacggttagtgaggctggaaaggtaaaatatatggattttgaagtatggaagaaagacaatacctatggatttgagaaaccggagggttcttttgcttcgacgaacgaaggaagtggtatcgtatactctatattagagggtttgaaaagtgttgatggttttcaggatatagtgattcccagctggtgtgttagatcgtcagaagaaggaaaaacaggtaaagctgctgtattggagacgatagatttgacaccttcaaaagcagacctgctcagatataaagaaactttatcttcttcagatgctgtctttatagattatgttttaggtatgtgtccgaatatcacagcagggagtttattccttggaagttttgatttagctagcgccatgggagatcctttgaaaggaactcaattcggtattccttatgtaggagaaccggttaaattttcaggatggtataaatatactccgggtgcaaaattctatgataaagatggaaatgtagtggaaggacagactgatgaatttgcaatttatgctttattgtatgaagcaaaaggaaaagatggtaaagaggtaactttgactggtactgatatcaatacctctgagtatattgttttaaaagctgaagttactgataaaacggcaaaggaggattggacttattttgaaataccgtttgaaaaaatgaatgacaaagaatacgacgcagctaatcagtataaactggctttgatttgtacatcaagtaaagaaggcgatcgatatagaggagctccgggtagtattttgatgatcgacgatttgaaaattacaaggtaacccccttctctttgtatataacttagccggttctgttggtagaatcggctattttagttattagctttgcaaaaatttcacgttgtaggaattagctcgatgatttaaaacattttatttttttcggcgtatatatttttttaataattaaatagaagacgatgaaaaagaaactctgttttttgatgatggctgtattctttttagggatgacagcttgtagtgatgacgacgatgataagaaagaagcggtggcaggaacctatacgggaacgattacggtgacggatgaggcagggactccgatcggtgaaccactgaccggacaaaagattaccattgtcgatgcaggaaaagataggataaatctcgagctgaaagattttaaattcggcacggtccctgtgggggatctggagataaaaaatgttgctgtgaacgataaaggagaagtgaacggtagcgcatctcaggtgccgattatgaatggcgttcttcaggccgatataacagtgagcgggacggtaaaagataaaaaagccaatttgctgatcgatgtgtccgcacctttgactcccgggaccgatccgattaaaatgaaagttacctttatcggagcccgttgacagaggaatttttctccgggttcgggcatgaattcggaatgatcgggaggcttgtctgatactgattggcggagctgaagttcaccatttatattttgttttcggaaccgaagttgcgccaatcagcgttccttttctctttaattttccggtttattgaaattcttcttccgggtataaggacgtttccttcccgggcgattgtttttgaattttcctctcggacggcgctcgaatgcctgtgggttatagacagggccaggacctacagtcggtggtaacggaattttatagatgtctttttctataaattcttcgattttatgaaatttaccctgttccggttcgcagacgaaagtaatggctacaccatctgcattcgcccgggctgtacggccgatgcgatggatataatcttccggatcgtggggaacgtcgtagttgatgaccagaccgatgtcgtcgatatcgatgccccgggcaacaatatcggttgcgactaaaatgtcggtcttcccgtttttaaagtcgagcattaccgcttcccgttgttcctgttccagatcggaatgcatggctgcaacattgagtttcatgcgctttaaagaataggccagatcttttaccttctgcttggaagaagagaagataatggtttttttacggttgggtttactgaatagctcctggatgatagccattttctgcgtctcataacagatataagccgattggataatcgcttcgttcggtttggaaatggcgatattgatctctgccggatctttcagtatctgtttggctaactgccggattttcggtggtaaagttgctgaaaacagaattgtttgacgttttgtcggcatctgtttgactatttgcatgatatcgtcgaaaaaacccatgtccagcatccggtcggcttcgtccagaatgaagtagctgacctgtgaaagatcgataccgctattggcgatgtgtgataataaacgtcccggagtggcgatcaccacatccgctcccattaataaacccttcttttgctggtcccagccggctccgtctcctccgccgtagactacggtcgtcgaaatggggagaaaataagaaaaaccttcgaattgcatgtcgatctgttgggccaattcccgggtaggtaccatgatgactgcgcggatatgattgtcggggttaccctctgcgactaaacggctgagtagaggtaaggtgtaagctgccgttttaccggttccggtctgagcgcatccgatgatatctttcccctctaatatgaccggaatggtctgttcttgcactggagtcatctcctgaaagttcatagcttctattccctgcagtacgttctcgtctaaatttacttcgtcaaatctcataatttatatcactcaaatttcgcttcaaagatacgatttttataaataattaatggtttaatctctgggactgttttaacattctgtgtccaagttaattccaatacaaagataatggaagttgggcaactaagaagggacattccgttttttttgtggcattatttttgttattagttgttagtgatgaaaaaatagtttatttttgaaagcgatgaagtttctactgatatatggggtattgtttcttcttttgtggacaaaggggtcggcaatcgacagggaagaaagcttgacagactatactgtcgaagaagggattgtgaatgagtctgtcctggtagaagttccgtcttcagatttaaaaaccaactacattccgtattttctgtatctgaaggttttgaatccggctactcaaatcgatttatcggccgggagtgatcaaagctggaatattttatcttataaaattctgcacggtgtccagaaaattcatgtgcctatgcgtttgcagatgtggtatgcctccgaatggatgaggatgttatctgtctggcacgacaagagttttcttttgtactttttagggaaacttatcatttagcattctcgttaaaagaggaaaaacctggttctacacaaatcaggggaaggtgaagtatgtgtagttcgttctgagaatcggtgacaaaaagggatatgcacgcaagtggataaacaggggaggtaaggctgattcggaaattgttaaataattaatgaaaatcaatattatggcagagaagtttggatatgtaacacaggtgatcggacctgttgtggatgtcatttttgaaaaggacggagaggatttgcctcctatttatgaagccttacggatagaacgggataatggcgaaaaattgattatcgaggttgaacagcatatcggcgaagatactgtccgttgtgttgcgatggatacgaccgatgggttgcgcaggggcatgaaagcctgggatttgggacgtacactgacgatgccggtgggaaaacaaatcaagggacggttattgaatgtcaccggagatgctatcgataaattgggaaaactggattataccggtacgttatctattcatcgggaaccgccgagattcgaagatttaacgacgactcaggagcttttgctgaccggtatcaaagtgatcgatttattggctccctattccaaaggaggaaaaatcggtttgttcggtggggccggagtcgggaaaacggtgctgatcatggaattgatcaataacattgccaaagggcataatggatattccgtgtttgccggagtcggtgaacggactcgtgaaggaaacgatttgctgagggaaatgatcgaatcgggagtcgtgaaatacggtgaacgttttcaggaagagatgaatgaagggaaatgggacgtgaaaagcgtggatatggaacaggtgagtcagtcacaagctaccctggtgttcggacagatgaacgagccccccggagcacgtttacgggtggccttgtcgggactgacagtagccgagtctttccgggattctaacgaaggaggaaaggaaatcctgttttttatcgataatattttccggtttactcaggcgggttcggaagtgtcggccttgttgggacgtatgccttcggctgttggatatcagccgacactggcttctgagatgggaaagttacaggagcggatcgcttctactaaatatggttctatcacttcggtacaggctatttatgtgcctgccgacgacttgacggatcccgcaccggcaacgactttcaatttcctggatgcgacaaccgtactgagccggaagattaccgagctgggtatttatcctgcagtagatccgctggaatcttcttcccgtatcctcgatccgaatattgtcggggaggaacattataatacggcccagcaggtcatcgaattgctgcagcattatcaggaattgcaggatattattgcaattctcggtgtggatgaactttcggatagtgataaattggtggtaaaccgtgcccggcgtgctcagcgttatctttcacaaccgtttcatgtggcagaacaatttaccggattgcagggagttatggtccccctcgaagaaacgatccggggttttaaaatgattctcagcggagaaatggacgaatatcccgagcaggcctttatgaatgccggaaccatcgaagacgtgatcgaaaaaggaaagaagatgatgaaagaggcggcaaagtaaaaggtaaaaagctaaaaggctaaaggttataggcaggttataggcgggaagaaagcgaagaactggagacttgttaggttggaaatttgtaatttgtataactatgagactggaaataatatctgcagaaaaagtgttgtttaaagggaatgtacaacgggtgactttacccggttccctgggaacttttactatcttggaacaacatgcccccctgatttccacactcacgcatggaaatgtggtttatgatacaggaggaggagaaaagcaactgacgatcgattcgggagttgtcgaagtattggataatcggattgtcgtttgtattaattagccggtaacacttgtaatttctgaaacgaagtaaaatatgaaattaatcaggtatctgttaggactgagtctattcctgctggccggtcaatgggtaaaggcagacgaaacagcagcagaatcattcaatccccaaaagtcgatattcgaacatctgggagatgaatacggatggaatgtctggaatttgcatatcccgttacccgtgattgtcagggatgaagaaggagcatggcatgtgtttagttctgcgaaattagccggcggacaggaatatgaaggtttttatattgccggtgagggagaatacgagggaaaagtgattgcccggaatgcttccggccatatttaccggccctgggatttttcggtcactaaaaatgtactggccttatttatatgtgctttactgctttgttggctcgtctttccattggtccggtggtataagaagaaaccgtatgaagcgccgcggcgtgtaaaaggaatgatggaatttggagtcggtatgttgtatgaggagttgattgtaccgattttagggaaagatgcccggcgtttcggaccgtatttgctgaccttatttttctttattctcttgatgaatttgatgggcttgattgttatttttccgggaggtgccaatctggccggaaatatgtctgtcactttagtgttggctgtgtgtacttttgtcgtagtcaacttttcaggacgtaagggatattggaaagatattttttggcccgaagtgccgacctggttgaaatgtccggttccgatgatgcctgtcatcgagattttcggtgtgtttaccaaaccgattgccttgatgatccggttgtttgccaatatgctcggtggacatttgattactttggttctgatttccctgattttcatttttgcagcgatgggacctgtgattatggggacttcgaccgtgattgccgttgtgtttgctgtatttatgggatttatcgatttgttgatttgcttcatacaggcttatgtatttatgttgttgtctgccatttttatttctttggcaagacctgcggaaaccggggcccggcatgaaaaataaaaaaagtaaaataatataaaatagaataattttaaaattgaaaagttatgttaagtatgattttattacaggtcgctgccggaatgagtctggcaaaagtcggtgctgccatcggcgcagggttagctgctatcggtgcaggtataggtattgggaagatcggggcgaatgccatggacgctattgcccgccaacccgagcagaccgggaatattcgtacgaatatgatcgtgatcgctgctttgattgaaggagtcgctttgtttgctatcattgtatgtttgttggccttgtttatataatcgtttatgggactctttaaaccggagatcgggttggtattctggatgctggtggtctttctgatcattctggctatcctggctaaatatgcctggcccgtgattatccgaagtatagaacaaagagcggattttatcgatagtggggtgaaatttacccgcgaggcaaaacaacggctggacgaagtggaaacaaaagtggaagagatgctggccgaagcccatagaaaacaattggctgctttacaggaaaccgaacggatgaaacgggagatgatcgagaacgcaaaaaaagaagctgccgatgaagtccggaagatgatggaagaggcaaaagcttctatggaacaggctaaacgggaggccgaaaaacaaatgaggcgacaggtgagccgtttgtcactcgagatcgcggagaaagtattgagaaaagatttgtcgaaagatactgctcaggtagaattggtggatcgaatgttggatgagctggaatcagctcagaaactgtaatgatatggatgaaggtttaatagcacggagatacgctttggctatgctgaaagtagcacagaaatataatgctgcggaagaggtatatcaaaaaatgaagaccttcgaacaaaattatatttcccatcccgatttacataaggcattactgaatccgatattgtctccccgggataaagaacaattgttgacgatcgctatcgggatcgaacccggaacgttgtatctgcggggaatccgtttgctgataaaaaatcaccgcgagatgtatatccgctctatttgtctgatgtaccagaagttataccggaaggtgtaccagatcggacgaataaagattatcacggcggttgctttgaagcaggagacgctggaccggataaaaaaactggtgacggaccggacttccagacagatcgaatttgtcgaaaaggtagatccggctattatcgggggctttgtacttcgggtaaattccatgcagctcgattattcagtaggcggagagttgaaaaaaatcgcaaagcaattgaaataggagaggataagtataaatgattagattatgataaaaccaagtgaaacatcagatattcttcagcaacaactggataacgttgatttgaaagctgaatttgaagaaattggaaccgtattggaggtgggagatggcgtagccaatgtattcgggctggataatgtaacttccggcgaactgatcgaatttgaaaatggggtaaggggagttgccatgaacctcgaagaagatcaggttggagtcgtgcttttgaatttgggagatcgtgtgaaagagaattttacggctaaacgcaccgggcatattgcttctattcatgtgggagaaggattgttgggacgggtaatcgatacactgggagaacccatcgacggggcagggccgattaccggcgatctgttggagctgcctttggaaagaaaggctcccggggtaatttatcggcagcctgttaaagaacctttgcagacagggattaaagcggtggattcgatggtacctatcggtaggggacaacgggaactgattatcggtgaccggcaaaccggaaaaacggctatcgctatcgataccatattgaatcaacgtgaaaattaccggcagggtaaaccggtttattgtatttatgtcgctgtcggtcagaaagcttcttctgtggcagccttggtcaacgtattgaaaactcacggagcgatggactacacggtagtattggctgccaatgcgtccgattcggctgccatgcgttattatgcaccttttgccggagcgacgatcggagaatatttccgggatagcgggaggcatgcgctggtcgtatacgatgatttgtcgaagcaggctgttgcttatcgggaaatttctttgattttgcgcagaccttcgggtagagaggcttatccgggggatatcttttatttgcactcccgtttgcttgaacgggcggccaagattatatccaacgatgaggtggcttcggcgatgaacgacctgcccgaaccgttgaaaccggtgatcaaaggcggaggatcactgaccgctttaccgattatcgagactcaggccggcgatgtgtcggcatatattccgacgaatgtcatctctatcacggatggccagatattcctcgaaacttctctgtttaacgaaggagtccggccggcaatcaatgtaggtgtttcagtatcgcgggtaggaggaaatgctcaggtgaaagcgatgaaaaagattgccggaaccttaaaaatcgatcaggctcaataccgggaactcgagtcgttctccaaattcggaggagatttggatccggtcactcagatggtgatcgataaaggacaaaaaaatgcccgtctattggtgcaacctcaatatgccccgatgcctgtagaagaagagattgctattatttattgcggaacccagggtttgttacaacgggtacctttaaaacatgtcggcgattttgagaaatattttctcgatattcttcgggtacgttaccggaaagaggtgttggatgaattgaaggtgggacgtctggacgaagtcgtcgctgctttgttggaggaagtggctaaggaagtagccgataaatttgctgcacccgtgaaacaaaccgaacaaaccgaagaatttgtagataagtaaaaaagagaagaatggcaacgatgcgtgaactgaaaggaaggatcaattctgtccattcctctcagaaaattaccggagcaatgaagatgatttcttctgcccggttgagaaaggccgagaacaagttacttcaggccgagccttatcgccggaagttatgggaaatatatgcccatattgaaaaatccggttgtgagtttcagtcgccattgacagtgaagcgccaggtaaagaaggtggctattgttatttttgcttccgacgatggattgtgcggagctttcaatatcaatttatataaaaaattggtggaggaagtacaggcttatcagaaacggggtatccgggaaattaccgtttttccggtcggaaaaaaaatactggctgaggtgaaacggataaagggcattcgcctggcccgacatcccgaagcttttgaaaagaaagactatatggcggctacccgggaattggccgatgaactgatggaagattttttgaaaggaaaatacgaccaggtaggagttgtttatgcacattataaaagtatgggcgtacaaatcgtgcggttacgttcttttttgccggttgctgtagaaccggaagaaaaaatagaaaccacagatcgggtcggtccatggtatatttatgaacccggatgtgaacaaatattaaccatgttgtatcccctgatgatgcatgctttgatgtacgatctgttgatggaaaataaaacttccgaacaggctgcccgtattctggcgatgcagatggctaatgataatgccgtgaaattattaggtaagttgcagctggagtataataaattgagacaacaagggattacttccgaactgttggatatcgctggaggcagtaatcgggaaagttaagccactgaagtgttattatattggatgtaaaaaataccaacatttaagtattgcaggctttgtctgttactaactaactttgcagatgaaaagaataacacgtcagtctactacagagaaaagaaacatagcgtacacttattatcgaagcaatctgtgattttaaggaaaggaggtaagcatataatcactcagcttctcagtctaaaagcattgacgttaaaaaacttgttattatgaaacgaaattacatttatctcgcatgcatgacagtatgtatgttcgcactatttgccatcagttcttgtagcaatgaaatggacatgccatcaagcaagatagagcacttgcaaaagatgaaacaactttgtgctcaatatggttggacgcagattgagggagtttctcaagaagaggttgataaatttcttctgtcggaagattacgaaaagaccaaggaattctttgaatttgtgaagacaggaggggaaacaattaatttgacagatctatcttaagtttcacaacagtccagttcttcaacacgggcgagtggggtaaagctcacatatgtacttcgagggcaacacagttcccacgtcgcgacatcaacaacggagatgattgtctggtataatagaaaagagttggatgtagttagtacaaaagttcactctaatccatcatgtactatgattcttagaccaaattcagaagtggtttcagaaggcaggattacaagttttagaggatgaaacaccagtcgaaggagaatagagcaagcatagtgctcttcttgctgtttttgtgttttgtaactccgagagcaaaatctcaggtgttgcttgagaacgactcctcagacgtttgcaaggtgatagacattgtaaatgttggtttatcgacggagatacaaaagaaatacgagaaggaatacattgcaacatctgtaatcgtcggatacaacttacgtaagaatgaagtggagttctattggttagatgacaggtatgacttcgatttatactccttacaaaaaggcgatagcataactctgcattatcctcatatgtcaatagacaataggaagagagcaatagctatggacaatcacagttttcaagaacgtataagagaaaacgatagtatctatgttgatattgacttttttgacattgaaaagaagttggggttgcccccctctctggacgatggtctattccttaagtgggaaattgcaaaacgacgcttcatggagcatataatagaagataaccaaggcttacatacattagatactgagaacgcagatgatttgcgtttgtctaagcgtacattcggtcaattatattgtatatacatattaatgcacaatgaaaccataaggaacaaagagtagccaaatgcatgatatcgaaggagtcgtattctaaagagtatggctccttttttatgaagaaacctctctttcgtggaggctctctcttttgctaaagaattgaacgataaggaaaagatcaaccttgtacggtatatagtgcttatgagcaagaactcttagagacaagcgatgaagaacttaataatgaaagtaaactttttggacgattatttagaagaatctttagtcgtaccgataaaagtttaaaatggattgataagtatgatgacagaaagcatttttatagaagaggtggtgcttgtggtccttgggtttgcggatatatcctttatgtaaatcaaggcaaagataaatatgatttcttttataataatgcttcttcatttggagagtttggtattctaaattttgctttgcgtcttttcggaagaccgatgactccgggagaaatggggaggacaatgcccattgcttccaatgggaaaatatggattaatccagctctgtgctttgctgatctttttgcatatgaccaaataaagcattataagaaacccgcaatcagattgtgtggttctggtgggcaattgcattggactttagcttatggtgcaaaacagactggttcttggttgtggagaaactattatttccttcagatagataatggcgcaaaagtaggcgtgccaggagacaagaagaatggcggcaactatacaaaggttgattggtggaatccttggttaatggtttgggattaatttaaagatgcaacaaaatgaagaagatcttctctttacaattgtgtgtttggctttttcttacaatattgttttcccaatgtacaaaggttgatttagaggaaggagtacgcaaaacaactattcttcggcataattatattgcaataaccacaaaagatgatattcccggagaagtggaagtgcattatagtatactgggcaataatggtcaaaatgaagtcaaaacaccctttcatactaatattgccgcgaatcgaaaatatatacacgtatgaaactattgaaatacggcttttacttacttgctatcgcagcatcggcagtatcgtgtacacgcaaggacggcgattgggatccgatcaagacggactgtcgggaaataaccgttccgccgcagggaggctcggccgtcgtgacgatgaaaaattacaaaggctggtggatttccaccgtccaatacgaagcgaagggcgaaaacctgatgattcacggcgaggatttcggatttatgaagttcgaaaacgagtggtgcgaaatcgtcgtgccgtccgaaagtccgaacaaattgtatatcgccctgaaagagaacgatggacgggagccgaggaaaatcggtataggaatgacggtcggcgatgctttcacaagtatcgatattacacagggaagtgcacttctgaccactccgaacgaatgattctggcgtgcattctctgcatcttcctgtcgtatcggcggcgaaggcggctgttcggaagcaagtgaacggatacctccgaaattgtttcgaaggcggattcgggcgattgcgaagccgatttctccgtttcggtaagattctgattgtatagccgttttatgccagatatttttgcgacaaaaaatatgagcaagatgattatcgaaacgatcgaacggctgtctatcgatgtattcgttacagccatggcgattacggcggttgtcattgcgacaatcgctctttcgcttttggcgagtccgttttgccaataatcccaacagtcatggaacgaaaagaaacatatatcgaaatcctgcgattgaatatatattatgtggaaacaaaaattgaaaatctgcggcatcaatctgacagcatatagtgtggctcttgtcatcatgctgctgttgtctgtttgctcaaaatcatacgggcaggaaaaacgtgtactttcctttgaccgtacaaaacagaccgtgacgggcatagacacgaccaaactgtcggtttatgaacatgagaaggcatttttgtttccacattttgatgccattccccaaatgcccggaacgcttttggactttcgtcctgattatacacggagttttcccgttgaccgttcatccctgcataaaggtgaatacaatgtcggcgggattatccatcggtttaacaaagtggatgtttgggggcgtggcaggcaggaaaacatcataggagtcggcgtatcgaactatgccgaagtcaaaacggtgtattctccaaacgagaaatggaaattggggctgtgcctctatgcgcataaactgagcattccccgttcgagtagcaatacattcggaatcggcaccgatgtttcctgtcaattcctcccccaaacatcgctccatctcttcggcacctattattgcacctactttccgggagtaaaaccgatgaagaggatagacggctaccattatggcggttacctctcattcgatttggcagagcggtgggcaatggacgtgggcatgagaagctatggcggcaatgggtctcaccagcaatggactgtaccgataatacgtccgtcgtataagcacaacgggcgcgaaataaacgcggattttggtggaatgttccagcaaatcgtgaaaggtctattctttaatcattgataatatgaaacagaaaaaaagcaaaataacgactgttgctatatggattctgctatgcggatggataatgtgcatgagttcatgcgggagtctgctttataatccatccaacaaagcggaacaagtgacagtgactattaaacagcctatcaaataggcttaaaccataagaaaaaggatgagaaatattgtaacaataattttaatctgctttctctcttttcctgcctttgggcaagagattgagaattcgcacaaagataaaacgtacaagaacatttatttggaactattgggcgcttcaaatatgattggtgtttcttatgacacaagaataaagcccggttcagctttcggctatcgtgccggaatatcctatttttatgggacgaactacaattccaatgaaggacatggtttttccgtgccattggagtttaattgcattttaggtaaacggcgcagcaagtttgaagccggaactggcatcaatatggggctgtattccataaaggaaacttattgggttaacagcgagggaaatgtcagcattatcgaaccggttactcagatagttgaatcacggaatactttcggatactatatctttttaaatatcggataccgctatcaacgggaaagtggttttatgttccgtgccggcatcagtccttcattcaattttggagacaaatacggattgcgtaaaaccccgctattgtatccttatctgagttttggctatactttcaaataacgccaatagttcaaaatggagaatccgctttctttgagacttataaaagaagaacaagagtcatcagaaaaactgttggaactactggtgtcatcaacgcattctcccaaaggcagattttcaaaagaggacagttacattatgctgaaaagaaagatggaaacaacaaaaaaagaaaacaccgtgaaactggtattgccatttccccatttcttgtggatgattggcactaaccccggcatctccaaagagaaagcagtgctgcatgagccgcaaacggaacaagaaaatatgaacagagaacatataaattatgaagaagacaaatgatgcagatatgctggccgctatagtccgggcatcgaaccgtcatgccatgcgcccggcactggttattgacgaccggacttatacctatcaggaattgtttggattggcaggaagcatttgtgaaacgctgaggaatctcaaagaagacatcatcggcatcacggctgaaaaccgtatggaaacctacgcatccattttggcggtgctgctttccggaaaaacatacgtcatgttgcatcccgattatccggcagaacgcaactgccggatagcccggcaatccggcattggcctgttgctctacagtggagagaacggcgatatacttccccctgacatcagtgccggacgggtgtgtatctcctcacaccggcaaacctcgaattccggcgtggtgacgtatgacgttaatcccgacgtgccggcttacatcatcttcacgtcaggaagtacaggcgaacccaaaggcgttcctatatcccgaaggaacttgaatgctttctacaaggcttatcgcgctttaggatgggagttggacgaaaacgaccgtatgcttcagatgttcgaactgacattcgatgtctctgtcgtgtcgtttctttatcccctcactctcggggcatgtgtctatgctgttccgcagaaaggaatgaaatacctgaacgtactggatattatggaacgccatcgccttacgtttgcggcagtggcaccttccgtacttcggttatcacgtccttatttcggggaaatcagttttccggacttacgctatctcatcgtcacagccgaagccactgacgtgaatctgctcgatgaatttcgcccttgcatacccaatgccacggtaatcaacctctacggaccgaccgaagccaccatctactgcacttcgtatgtaatcccggctgaaggagccaaacaccataacggcatggcggcaatcgggaagcctttcccgggtatggactacatgattgcatccccgtcgggcaagcagcttcctgccggagagaccggcgaactgtggattgccggaccgcaactcatgtgcggatactggcgtactcccgaaaaggcggccggatgttttgttacgactccctttggaaaactctattaccgtaccggagacctctgtcaagttgatgctgacggagatattatttattgcggccgtaaagacacgcaggtaaagatacaaggtttcagaatagaattgggtgagattgaataccacgttaaagcgttttacaagcatggctgtaacgctgtggtattgccggtttatgctacggacggaagttgtgaactgcaccttgccgtagaaaaggaggcggaggatacggaaagcctcgaacggtatatgcaaagccatctgccgccttatatgttgccccggcgcatccacttcattccttgtttcccacaaaacaacagcaacaaaattgaccggaaccaactattaaagtacatcactcaataaataaacaatcaagtatatggatacaacagaattattggagatactgaacggaatattcagaaaagtgttaaagagagacgacattacattgaccgaaagcactactgcccacgatgtggacggatgggattcgctgaccaatatggtactaatcacagaaatagagaataagttcggcgtgcgtttctcgttccgcgagatagtgaaactgaaaaatgtgggcgacctttgccataccatcaagaataaagccaaataggaataggaggaaaaagtaatgtcattcatttcccttgaatttgtcctgctgttcctgctctgtttcacattataccattttatcagtgataaaggacggaagttagttctgcttgcggcaagcggagttttcatcggatacttcaatcccgcattccttgtcacggcactggtcgtaagcctttttacatacggcgccgcgatacttattgagcaagcccgtgaaaaaggaagaggtttccgtttgatttactggggcggcatatcctgtcttgtcctctgctggattggtttcaggtatgccaaccggctaaccggagacttaggttttattttcccattgggaatgtctttctatacattccaggccatcggttacttgacggaagtctattgggaggaggaaaaggcggaacgccgtccgatagatttcctgctttatatgcttctgttcatgaagttcttgtcaggtcccattgagcggtctgccgatttgcttccgcaagtccggaaactctctccggcatcctattccatgatgacttatggtttgaaactgattgtggtgggattggtgaaaaaattggtacttgccgaccatatagcaccctatattgacggtgtgttcagttcgatgcacaccgcatcgggtgtacaactgcttatggcctgccttctctatcccatcgaactttatgccgatttctccggctacacggatatggcgattggaataggaatgttgttcggattgaaactgtcatccaactttgcgcatcccttcgccgcccaaaccacggctgagttctggcgccgctggcacatctccctttcctcctgggtacgggattacctttttctgcccctgtcatcgttcacacgccgttggggacagtggggtgtggcggcaagcctcatggtgacatttatcgctttgggcgtatggcacggtgcaggatggacatttgccgtctatggatttatacagggacttgtgattgtatgggaactaaggactgaaagaatacggaacaaggtaaggaaacatatcgggagacggctgttcgccacgctctcggtcatccgcacctaccttatttttgccgtatcgttggtgttcttcaaagcgcagtctgtttccgacgcattctatttcctgcggaatatctcttttcagacccatgcgagctggaaagaaatcaatatcggtatgtcagaccacatctgcatcgtggcaggtgccgcattattactgatgctgctttacgactatctgatgtccaaacgtaaccagcaccgccgtcttgaaaggcagcctattctgttacgctggactatctactatttaatcgtgttcgcgctgttcgcctatggcaagttcggcacggagaacttcatatatctgcaattctgatggaaaatatacaggaaactattactgacgaaagccttcgcaaacgacaggctttccttcgccttgtccgaaaatcggtactgttcgccatgccgttttgggctttgattgccctttatgtttacgatgaccctttcatggtacttcgcaaatatgaaatatatgattcggatgtcatgctcaacgaacagcaggtaggttggcagatataccgaaaccataaagatagtgtgcatttcaattcttttatcttgggcaattcatgtgcgatggcattccgatgtggagaatgggaaaaatatcttgctcccggcgaccgtgccatccgccttttcggcaatgcagagagtatgaaagcgataagcctcaaactccgtgcccttgaccgtgaaggcgcggagataaagaatgtgctgatgattctcgaccggacttccctttcacgttttgaactcctgacgggagccggccatatacttccggctgctgtatcggggcgtaatccttttaccgtgcaactggagttcttacaggcattcgcaacgcccgatttcttgttcccctacttgaaataccgcataacaggaaatgtagaaccggacatgaagcggatgaatcctcatggaaggatacgtgattcgaagaacaatgatgcgttcaatccccgtgagaagcagataaaacaggaaggcgaggcgtattgggaaaaccgcaaaaaagagtttcccgaacgggacggtactgctacgatagctgaacctgccatattccacaggcaacggatggtgttggatgaaatcatggaagtcctgcgccgtcatggcacctcaatacgtgtcctaatcagtccggattataaccagaaaaagctgcacccggatgacagagaaatcttgcaaggcattttcggaaaagagaatgtgtatgatttcagcggcattaacgaatttacagaagattaccacaactattacgaagcgggacattatcgtcccttgttgggcaataaactgttggagagaatatacaaacgtcaatgacagccgatagacaagaaaagaagaatgaaacgggtagcaggatgctatctgaatagaaagaaaaaaaatgaaacctacatttagggtaaaatgtacataaacacctaattttttttgttattttattcaaaacgatagcagcggcattgtcaaaagtattacatttgttctccgaaccatataaagacaaaaaacatgcctgctccctcgccatcacctttacatgatattttgcgttacgatgatgtggcggtgaagtttttgtttgagcattactatgtacctctggtgatttttgctaaaaactatcttccggatatagaagactgcaaggatgtcgtgcagggaatatttctccatatcgttgaaaacagggagaaatttacttccatagacaacctgaaagcctatctctaccagactactcaaaaccgttgcctgaaacaactacggcatgaaggggtgaagcaacggtatattttcgaatcgcaggcgatgggggaagaagctttttatttggaccatatcttagaggaagaagtgtatacacaactcatccgggccatcgatgctttgccggggcaatgccggaaggttttccggttggtactcgaaaataaaagcaatcaggaaattgccgaaatcctttcccttagtgtggaaacggtcaaatcctataaaaaacaaggaaaagctttattatacaagcgtttgaaagacgttattcctttggccctgctgacttccatcctacaattttaatttttttccgcatttgtataccctcttttcgtttccttaagggtcattatattgatttgataaaattatggaaacgaaagaaattgaaatattccggctatcggaaataattgcccgttcgatgcgggaagaactctctgacgatgaacgccgggtattggacgaatggttggcccaggatgaacgccatcggacgatgtatgccgcttttggccgggaagaggtattggcggaacaggtgcggttgcgtcaaacgattgactggcagggagattgccggatgtttatgtcgagacggaaatcttggcgtcgccgtaagctgttgtatcgctctttgcgttatgcggccctgtttattttgttgctttccggagcgacagtgtggtgggtgaattcgtcccgcacagatgacctggaacaggggagtcgattgacagatacccgccaccgggcattcttgactttagcgggtggcgagcagattgtgttatcgcaaaacgatacgctaaccgttcccgtgctttcccaaaagggtgcgaatattgaaatccgggaaaaccagattacttattccacagtatcggctgtcaacgacaacattccctgtaatacactgactacaccgcggggcagagagtatctgctgaccctctcggacggtaccagggtgtggcttaataccgaatcacagctgcgctatccggtgcaatttaccggggaacgacgcacggtttacttagtcggggaagcctatttcgatgtacatcccgacgcctcacacccgttcaccgttatttccggtcctgccgaagtcacggtgttgggcacgagtttcaacctgcgggcttatccggaagaggatattgtcacgacattggtttccggggccgtgcagatgtccgaaaaggtcggcggacaaagtgtgcgcctgacacccggcgaacaggggtgtttggagaagacaaacggttacatgaccaaacgggaggtcgacacttatctgcataccgcctggaaagacgggcggattgttttccgcaatatgcggttggaagacctttttaccacccttgcccgttggtacgacttggaggtgttttatctgaatccggaggtgaaggacatccggtttacgggtgatatggacaaaaccgaacgtttcggggatatcctccgcatcatcgaacaaaaccggcgtgtgcattttcacgtcaaaggccggacggtctccgtttcatggcaataaatcatcagtcaaaataaaagtctaaatcaaattcaatggaaaacagaactgaaaacagccgtcgctatggtgggcgatggcgcaaaacacaaaagattatgaaactttgtatgttgtttctgtgtgctgcttttttacaagtctcggccaacacatactcgcaggaggcgaaattagacctgaaagtgaacaatgcttcattagagcaggtgatgaacaacatccgccggcaatcggagttcagtttcttcttcgacgatgctgccgtaaaaaatatctccaacatcacgttggacgtgcggaatgcccgcatcgaagaagtgctcgctgcttgcctgaaaggaacgggtttctctttccgcattttagacaaaaccatcattctgtttcgtgaacaaccgcaaacggtggaacaacagaagttttataaagtacagggaaaggtggtggacgaaaagaacctgccgatgccgggtgttaccgttctgttagacggtacgcaaatgggggtgtccacgaatgtggacggagatttcaccttatcggtaccgcaggaaaaaggaaaattggtcttttcgttcgtaggctacaaaaccgtaacggttaattataccgatggaaaggccgtttccgtaaagatggaactcgaaacggccagcctggaagaagtgcaggtagtggcctacggtgcacaaaaaaaacgtaccgtcgtcagtgcaatctcttccgtgaaagccgacgaactcaaggaattgcctacccatagcctcgaaaacctcttgcagggacacatggcgggtgtggaaatcagcaacatttccggttcgccgggcggtggcggttcattggtagccattcggggatataactctttgtttgtggaaggagagggcgatgaccgcaattacggcaccccgctttacgtcatcgacggcgtacccatgcagtcgtttacttcaccggtcaccggttcgaatacgttgtccgacttagacccgtcgatgattgaatccatcgaagtactgaaagatgccgcttctgctgctatttacgggtcgcgtgcaggaaacggtgtcattctcatcacgacgaagaaaggacaggctggaaaggcccgcttctccgccaatttttcctattcggcctcctggttgcccgcagctcccgaccaatggggcggtaactatgaacgcaggtaccatttagaagcgttgtacaacacgctggccccttataaaacggccgacggcacctggaaattgccggagtcgtatgaagaggtatacgaaaaccgccaggacaagggccccatgtacaactggttttggggtactacccgcccgcagaatgccattgctttgcaggacagtctgaattcgttttacaacaactccacccattggtggaaacaaaattatcaggtagctaaggtgctcaatgccaatcttcaagcttccggcggaaatgaaaacgtacgctatatgattggtgccggatattacgacgaggaaggaatcgccgtcaatacggggtttacccgcttcaatgtattgacgaacctgacggccatgccggctaaaaaattgcggatggacggccaattttcactgacctacagcgaccggagtcgtggaagcaatgccggaagcaatgccagcaagatggaaagcattacttccgacccgacggatacgccgacgctgcttcccggtggcggggaggtggggcggatgatgctccaacagttgaatgaaacttcggaaaagaatcagagctattccgcccggttcaatttggtgttggactacgaaattatccgcaacctgcacctgaaactatcggcaggcgtggatttcaaccagcagaatcaaaacattttcaaaccgaaggcgttggacccgacctaccatttttcgacctcggaaggaaccattgcgcgggatatttcgctgataaacgaaaacctgctgagctataatttctctatcaaaaaccggcacaatttcgatgtgctgctgggactttctttccagaaagaccagagtttcaacaataaaggttcgggttccaacggaccgaacgatcacgttcactacgtcggcgcgcagggctggggtggcgataacggtttgaataatgtgggcgacggcacggaggacttgtttatctccgctttcacttacctgtccaatttcgacgaagaacgcctcaacagttatttcggtcgtgtgacctacaatttcaaggaaaaatacatgttggaagccacgttgcgtcgtgacggttcctcggtgttcggcgaaaatgtacgctgggccaccttcccctccgttgctttgggctgggccttttcggaagagccgtttatgaaacgcttttattggctgagctttgctaaaatacgcggtagctggggtgtctccggacagaaattccaccaaccttacttagctcacggactgttgtcgcccggccattacacttttcacggcaatgcgggtatgttgccgaatgcgagtgccggcgttatcaacaaaaacctgagttgggaagaaaccaaccaatacgacgtcggattggatatcagtttgttagactatcgctttaaagtcaatctggactattattaccgctacaccaaaggccagttgaaccgcatcaccctgccgggaaacacacaatacctcaatttccagtggcaaaacggtatggccatttccaatcagggaattgaactggagctcatagccgatattttccgcgaaacagccgtgcagtggcgtatgaaattcaatctttcgcgcaactggaaccgttttgagaagagcgcggacggcttcgatttcaacagccagattatcggccggccgctccaccagttgatggtgttcaaaaccgacggcttctacaacagtatggacgaagtgcccaaatattatacggccaacaaggaagtgcaattgatttacgacaacgacacccggatggtatacctgccgggtgcgcgtaaactcgtggacctcaacggtgacggacgcatcactgccgccgataaatatgcggctgccagtccgctgcccaaagcacacggaggattcatcaatgaaatccgctggaagaatttagacctgaacatcttcttcaattattccatcggtcgccatgcgctgaaaatctacgatgatttcagcctcaaacccgatgcctcttccgttcccctctttgccgacgtaaccaaactgaacgcctggagcagtgcggcaagtacacaggcggcctacccgaaaccccagaattacgggttgcattaccaatactccggtctgttcgactgcgacatcgaaaaagtacatttcctgcgtttgaaacaattgacgttaggttacaacttagaagaggagattgtcaggaaaatcggcatcagtagtgcgcgtttcttcgtgacggccgaaaacctcttcctgctgaccaattattccggtatcgacccggagttgatagacccgaccaacggtatggacaaccttgcttcctatccgttgccccgtaagtttaccgtaggattgaccgttaatttttaatatgccgacgagatgaaaaagatatatctgtttttgttattcctgccgcttctgtcttgtaacgactggctggatatctctcccgaaaattctgtgacgctgacaaattactttcagagtgaagccgatttggagtctcttcacacttccatgatggcctgcatgaagtcggcttgcaagggcaaacaaccctattattatatgtctgtcgatgccgacgagttgaaacccaacatttccggtttccgcgaattggatgtggcgacgcataccacccagacccttatcggcggaatactgaaaagcacatggcgtgaccattattccctgataagcctggccgacctgatgattgacaacgagtaccgctttcagaatattccggcggaacgggcggccttttggctccgacaagcccattttgtcaaagcgataacctatttccggatagcccagatttggggggatgcgcccatttctccgggctcggagtcgctcattgccttagctaaaaaaccggctctcgaagtgttgcaatacgctgccggagaagcggaacaagccctcggtttaccggcacacgataaaatgacggatgccgacggccgtaccattacgtcccggcaatacgccagccgagggtcggtcaatacccttctcgccaatatctatgcctggatgggcggactgacgcaagacgccaaatactgggaacaggcggaacactatgcctcacaggttatcgacgaatttgccggagactacgaactcgaaaacatgacggacttaatcggtaatgtgttcggcaaaaaccgccacagcaaggaaaccatcctcagcatcgacaacgacatattggatgatgcccatatctacgatacccgttttacgggtgaactgccgggacaggaattgatcgattacccttataccaatgtcagtccgcaatccctgtccaccgataaaaatcaggaatacaaccggatttcagtgaaaacggtgaaagaaatctatcccgaagagaatgatttgaggcggaaagagttctggtacgatttgggccatgtcagctatacggtggaaggagaagaggtgacctctccgtatgcttttatccacaaatggcgtgattaccattatcaaaccaattcggagatgttggaaggtcaggggaaagtacctgtagccaccgactgcgattatgttttctggcggttggccgacgtcgtgttgctgcgtgccgaatgccgcgcgcggctccaaaagacgacggcgaaagacgacctcgaccggattcggaagagggccggattggaagcatacgccgggagtaccgaaccggaagcgctgcgccgggagattttcaacgaacgccggcgtgaattgttcggcgaggggcagtactatttcgacattgtgcgcaacggttactaccgggagatgctgcgcggtaaattcaaaaccctcaccgacgaagaggtccgcaacggtgcactctatacctgggttagctccgacgcttttgaaaagaatacattaatgactcaaaatacatattggttatggcaaaaataaaatcttacatacatatagctcttcttttgtgtatcggtctggctttaggctcctgcacaaaatggaattatcacgacggtggcgttgcttacggcgtacacgactgttccatgtgggactatttcaaaaaacagccccgtgactgggattccacccgggtgatgattcaacatgccgggttacaggatttgttcgagggcaaaggcgaatacggtcagattacgtttctggctcccagcaatctggccatcatgacttatatgttcaataacaatttcaggcgggtaaatgaaattcccgccgcagagtgccggcgtctgttggaaaaactcatcattccgcaacgcatcctgacgagcgacgtaccccgtggttcccgttccgaggctaccggcgagaagacaggcggcaagacctacaccctgatggacggaagtgaagccttcttgtggacgtttcaggagtcctacttgggtgttgggaatgcaggggccgtgcatctgtggttctttatcgaaaagtttgccacctcccggagaatctactccagcaacattcagaccgaaaacggggtggtgcaggctttaggacatgatttcttatttgaataacccttaatttatcggacatgaataaatataccctatatctccctctctttttcgccctgttcgctttggcaggatgcgaaaaggaacacacgggctacctgtttacggaaaatgcccgctatcccatagacagtctgaaaattatccgctatgaggattataaccaagaagtaatccgcttagaagagcaactcaacagctattccggggagattctcgattccctgaacgcttaccgcaccatcgaagcggaagaggagaaaatcatcgaagaactcgaccgtttggagggtattatgaataaacacggagaaaagttgaacgcctatttagaccagtttgaggatgaatccgacgccgacccggaccgggtgcaggaattgacggacaattgcgaaaaagcatacgaggcttgggtgacatacgagttagaggtgtacgagcctgtataccagattagggaccggatagagagaaaaatcaaagccctctgccaggaagccggtttggaaactcctttcaccattgcccgggaattagagaaattgcagaaacagcaagctttggatattccctggaccacctcgtgtatcgagcagttgttgggaacggaaccgattacctataccttggtaagcatccggagcgaccggggagaggcggcagcagccgatttcggccgttacctctccgttatcggaggcggacggatgtatgtggatgccaaagtcaactctccggccgggaaatacatggtttctctgcgggtcagcaacgaaggctatagcgtagtgctccccgatatattcacctttatcctgcaataaatcattcctgaaaatatgaaacagttgaaactcttgtttgttggtctgctgcttgtggcggccaacggtttgtttgcccaaatcacgtttaccgagggtacttttgaagaggctttggccaaagccaaggcggaaaagaagaaccttttcattgatttttatgccaattggtgcggtccctgcaaggtgatggccgcccaggtgttcaccattcccccggtgggagactacttcaacgaacatttcatcaattgcaaattagactgcgatgcggccgccaataaagaggtggtgaaacgctacaaagtggaatccctgcccaccctgatgttcctcgacagtaagggggaagtattgaggacccttgtgggtgccgtcactcccgatgtgctgatgcttgaagcgcagattgcgacaggcgaggaactcccttttgagaaactgtacgaaaaatcgcgcaaagaaaagaaaaacaccgaactgcaacaaaagttgctgattcgtgccccccattttatcggcacccagaacgggtataatcaggaaaaatggaaagtgcgcatcgatgcccttttcccggagtacctcaaaaccaagaaattggagaacatgattaacccgaccgattttaccatcctttcgctttatcatcccgaaatggaaaaacaagacgggatattcgatttcgtggtcaaaaattacgaccgttacggcgaagcggtagacaaggaaacggtgcaaaattaccttatcggactttacaacacgtatatcctgcggctttgcagtaccggcaagaccgactacaggcaggccctcggacgcatcggcggtgacctccgggccatttatgccggcatgccgttcggcgacctgacggcggttgaagcggtgaccctgctggcagacagttatttcaacctgttccgccacaacctgcctctcttttttgagaacatggacaaatatttcgcaggagccggaaaggcgttgagtattaacgattacactcagcccatcgaagacctctacggcatttaccaaggcaatccgccggacaatacccgtcccatgctgattcaatggttggaccgtgcgctgacgtttgacatgaccgcccaactgcgcgcccgcctgttgatgttattagcggaaaaccagcagaaaaccggcgattcggccaaggcgaaacaaagcctcaaccaggcctttatcgtttgtgccggcattccggaagaagccgtaaaagtgcagttgcagaatatgattcgtgaaaaactgaacgacctatgagaatattccttctgacatttctgaccgtctgcgtcttccgcgtgtcggcagccccggaaacgccgttccgtcacgggcggttggataacggactgacttattacatccgtgccacgggtgcatccgcagggaaagccgacttctatttggtgcagaacgtgggtgccctgatggaagaggaacatcaaaacggactggcccacgtgctggagcacatggctttccatgctacggagcatttcccggaaggcgtacccgctttcctgaaacgccggggcattcaggatttgaatgcctatacgggtgcggatgaaaccgtgtatcacatcgacggcgttcccacgacggacggcgggctggtagattcctgcctgcttatcctgcacgattggtcgggcttcctgcaactgcgcgccgacgaaatggaaatcgagcgcaaagtcatcctcgaagaacgccgtcagggaatggacctttcgcaacggatgcagagccaactcaacgcttatctctacaaccacagcaagtacgccacccacgacgttatcggtactccggaagtcctgaaccacttcactgccgacgaagtgcgcgcctattatcacgatttttaccgtcccgaccagcaggcggtcattgtcctcggcgacatcgaccccgatgccgtggaggccggagtgaaacgcctctttgccggcattccgaagcgcgtgaatgccaaaccgcgggtgacatatgccattccggacaacgaagagccccagtattgccggcttatcgacgaagatattccccagaacgccgtcgtactgatgaaacgtttccgcaagccggaattccgtacactcggcgaacaggtgaaagaccagttgtgccgggagttttacaatcaaatcgtcggcgagcgcctcaatgattttattcaggaagaggatgccttgttccttagtgcacaggccggtgtacacgaccttgtgcgtcattacgaggggcagaatatcgccattacccctctgcccggcatggaaaaggaagcggttcggcaagtgctggaacagcttgaacgcattcatcgttacgccatcacggaccagaagctaaaggagttgacggacaactatcgtctcgggttgaaacagtctgcggctatgctccgtcgtatgcccaacagtgtctacctgaaagtctatcaggaccattttctgctcggttatccgctggccgaagtggctgagaaattagacgccgcctggcacctgctcgattccattgacagccgcgccgtacatgcctggctcgaccgttggaatgccggagacctcaaccgcatttatgccgtacagggcaataatccggattatccgttcccggacagcgaaaccttgacacgactgctccgcgaagcccggcaatcctcgccggcaccttacgtgcaggctgttgccgatacgctgccgtccctgatggatttcactcctgttgccggccgcattgtcaagaccaaaaggctgaaaggtcccggtgcggaggaatggaccctgagcaacggcgccaaggtctactacaaacacaacgattatgaaagcggtgctttcaatctcttagctggaagtcccggaggccgctccctgctgccggcggaagacctgccctcggccgatgcgttgaataccctgttcctgcaatacgggctgtacaaataccccgcccggctgctcaacgctatcatgcgcggacacaatatcgacatcaatatcgacctcggcgaacggtcggaaagtatcagttgcagcagtacacgcgacgatgcggagattgctttccagttttttcacctgaccgttgtacatccccggttcagccgtccggatttcgacaaatatgtgcgtgccaacaaaattcagcgcacctacgccaaaccgacgaccgacgactcgatagcctccgtcatgcaagagctgcacaccctgccgtcgccccgcatccgcaaaacggatacggcttactatgcggcgatggattacgaccggatggtggaaatttacgacgagcgtttccgcaacgctgccgatttcgctttctatctcgtcggtgacctcccccgtgaagaggcccgcaggttagtggagctttacatcgcttccctgccggcgcgcaacgtccgcgagacgccggtgcaccaccggtatgccagcacggcatccgctacacgcgacatccgtttaggattgcccgaagagaagtacatggtcagtatcgaatacaaaaaccacctgaaaaccaaggcgtcggataaaatctgtttccacgtcctgcagaagcatttcgacaacctcttccggcaaatcatccgcgaggacgagggtggttcctacggggtacaactccacacggaagcggaggattacccgttctacgaccagacctttgccgtgcagttcgaaagctcgcaggccaaaggtccccggatgcgccagattgtccacgaccaaatccggcagttcatagaggaaggtatctccgaagatgacgccgaatactatctgttggtgcttaaacaagaacaccaaaaggcgtttgccgaaaagaatgtggcctactggacggaaaacctgcaattttacaaccgcacccatacccagctcgatgacccccgctatttcgacggtatcatcgaccaaatccgtgcgaaagacattgtggcatttgcccgcaaatttttcgacacggcacaatgtatcgatgtggtaatttattaaccttttaaaatttaaagttatgaagaacatttagattatgctgctgatggtatgcagcgcatgtgctttcaccgcctgctcggacaatgacgacgaaccgacgcctcccgttgctccgaccgcaaccctgccggaaaccttcaccgccggtgaggaagtcaccgttaacggcaaagactttgtcacagctgccaaactcattctcaaaaacagtgcggatgctaccaaaaccttagacatcgaaggggcagcgttcacggctacaagcgtgacctttaccgtgcctgccgacgcagaagccggtaactagaaggtcatcgtgcgccaaaacaatgaggagtatgaattggggacggtggaagtgattgtgaacaaagtggagaaaacgctcaccaaagtcatcttttcggattatttgggcacgatagaatataccctgacttatggagaaggcggacaaattgagaaaatcggatataccgtagaagcagagggcgaaacgcaagaaatgatttacaatgtaaaacgggaaggtgaacagattcttatcgctgatgaagaagaagccgaaacattcacttatgtcctgaaagacggtaaaatagccagttatgtggatgcttacggcacgtcgttcagattggagtataccgataactaccttacttctgtgatcggagtatatgagggagagaatgaagatggagaaatagaaaaggaggagtatccggtagaatacaaatataccgataacaacttggttgccatcgacggaggcggacttaaattcggagaacaaaagaatatcacgaatggcgtagaccccgttatttgtatttacaaatttatccttacggccattacggaaaatagtgattttttcccgcaccttttagggctttgcggaaactcctctgccaatcttcctacctcttcggatgtaatctacggtaatttaccgttcacctatacatacgaagaatggggtggcataaagtcgattacctgtacggatgaagaggatgtatccaccatcagtttcgaatacaaggattaatcgataacaattcaaacgttctttccttaaaaaatcaggatatcgaaaaatatttgcctgcacatcctcccgaagtgagataaaaactttggggggatgttttgaataaaataataactttgctttccattaatcaagcaactttataactatggacataacgacgatattctttgatttcgacggtgtagtggcggatacggagccgctctacgatattttctggagacaagtggcggaaaaatatcatatcggtattccggattttccggcaaaaataaaagggacgactttacaacggatttatgaactttatttttcggattattcttccgaagaactcgggaagattacccgggcctgtgatgaatacgaagagacgatggattttccggaagtaaaaggagccgttcggtttttgcatatgcttaaaacaaagggatatcgggtgggcctggtaaccagttcttatcggattaaaatagagcgtgctttaaagctcatggacatagagaaggttttcgatacgattgtaacggccgatcggataacgtccggcaaacccgatccgatgtgctatttgctggctgcccgggatttgcaggtggatcccggagaatgtgtcgttttcgaggactccttttccggaatacaagcgggtacggttgccgggatgcgggtgatcggattggcgacgacgaatcctgaagaggccattggcgataaagtttcagctgtcattcctgattttagccggccggaaaaggttttagagttgttgtcttgaaatttgctttaagtttatttaaaaaccaaactttttgctttctcctttcgttgagtatgtacaatacgataaaaacaaaagattatgaaaagcgagaattcaaaactattgttaggtttggggattggagcacttgtcggagccgctgtcggctacctgatgacaggtgaacatcgccggaaactggaggaagagctgcgggaagtgggacatgggatcaaagacggtgcccggtcggtattctcaaaagtaaaagcaaaagctgaacatgccggttcgaagtttgccggtaaggccggggaatggtccgaagaggctggcgataaagcacgccagtgggccggtaaagccggggataaagccgaagaatgggctgaggccgccggtaataaggctagtgctaccgccgacgacctttctcagaaagcaaatgatttccggcaaacgatggacaacagggctgaggctgatgaacaaaaacaagcccaatatgccgaaagttaccggaaagacgtgaataacctgaaagatcgggtaaagaactctgaaaagtcggttaactgaccagggaggtgatggagaatactgcagggaaaatatttactgaattgaaggaagatatttcaacttatgccaggttgaaactccgtctactgaaattaatggctatcgagaggactgctatcgttcttgcagttctctcacatagccttatcttgttattactgtccttttttacggttctgtttctgtttgtcgccttagggtgctatctgggggaattattggatagtccggcgctcggttttctgattgtcggaggtttttacctattgttcactttgatagtctggggaatgaaacatggaatccggatcgggataatgaatatggttatcgaagctttgcaagcgaatgacgatgaagacgacaaaggtcaatcccaaaacccctctcggccaggttatcctggagaagcgggagatccgacggctgtgtcaggaaacggaggagaaaatttccgctgactggcaatatatccgctctaatgccggacggttgatgtggtcagaaatttctgccgtccttatgccacaccggaggaataatggtgaaaagcagggtggcccgggctttgcgggtaatccatggatcaatatggcctggcaattgggaaaaccgattctttaccgttggatgggagaagtgggatggcaagtctttaaaagtatgttctgtcgtcgccgcgcagagtgaaaacactaaaaacggataaagcggatcagatttttttgtttttccagtttccttttttcatataccaataggttaatgaaaacatacaaaccaggtagatgtattcggttgtccagcaaatagcgacgtcggcttttaggtagatcaccagatagatcaccgacaggacataggccaccaaagcgatcagctcgataaaaagtgccgaacgggtatttcctgttccggatacggtattgaataaaatattagccggtacactgaccagatagacgaagatcatcacataataggccggtaccgcgctttggataagagcggagttatccgtatagatccgcatgacgctgttggggaataaagccatcacgaatatcagggggaggataaaaacataacatagccgggacacttttttgaaagtatccattaccctgccggaatctccggaccccatcaggttacttaccaatgaactggcggtagtggcgaaagcactgacgataataaagaaaagggaggagatattccttaacacattggtaatggctaaaggccgttctccgaggtgttcgacagcgataaaaaataaaaaccaggtgctgatagaaataaatgcctgcaccattgtccagatcgaaatacccaaaatccgtttgagtaagtggatttctatgcggtggaaacggtaaagacgatatttctgccggtcgatcttcaagccggtgtatacgataaaaaagagcaacgacgtgacttctgcaaggacggaagcaatcgctgcccctgcaattcctaaagcaggaaaacccagtttcccgaatatcaggatatagttgagcacaacattcgtaccgaccatcaccagggagttggcggttagtgtccgcgtatcggcaattccgacataaaaggcacgaaacatcaacgccgtaaacgaaaagaacaaaccgaaaattctccggttcatatactctaaagtagcttcgtatacctgtggcgagtcgatcagatgccggagtagcaaaggagagccgaaacgggtagcaaaaaagataaaagtagccagaagaaattggaatacgaatccctggttgaacagctcgccgatcgccgtataatttccttctccgtttcgccggccgatcataatctgtacccctgtactgaaaccgaaacccagcatgaaaatggccagataatacactcctgccagggctgaagctcccagttctacttctccgactcttcccaaaaaagcggtatctgtcattccgatcagatgttccataaggacactgacgagtatcggacctgcaatttttaagatttgacgatttgtaaaacgcatatggattctgtttatataaaaccaggcgtatttttaaagatcggaccggcaaagatagcagaaaattgtgtattttcgtctgaatctatctattcgttattttatgaaaaggcgtctggtgtttttggtactcttgctttttttggcggcaggcggaatttggtatctggttttccgtcaatccggtatgtatcgcgtcagggaagggattcctgaagatgcggtatttattgtcgagaccccttcttttaatcgaatacgtgacaaattataccggaatcggatttgggcatctctgaaagcatatccttacttcgaagaatatcatgccaatctgaatctggccgattcgttgagcgaggtatatcccggattgagaaaattactgacagaccgcccttttgcggtgtcctgccatttggtttctgcaaccgattatgacttattgtatgtctgcgatcttgggaaactgaatgttatccaggcattcgacggcttggtgggaggggggctgggcgacggacaaatgagcaggaagggagacgttaccgggatcaggatcggggagctgaaattatattatgcgattaaagccaatctgttgtttatctccttttctgaaaaattagtcacccgggcctggaagacttgtgggcgacatccggctttccaggaacaaagcaataccggggatatccgtctggaactcgaacatacccggttcgaaaaatggatgaagatgctttggggtgaagctgccaccaatgccgattcttctgctttcgagacgacagcgttagctttgcaactgcaggataaagcgcttgccttttcggggaaaacctatcccagcaggcataacttttcactatggagtgctttaaatctggtggagggtaataaatcgtcggtcagagagattatcggtaatcatgtggcggcatacgtatcggtatgttacagttcgttcgaagagcttgagaatatattgctggaagattataaggtaaataacctgaaagaatttcagggatatgaaaagaccgtaacccgcttgaataaatttctgggattggatctggccggattattcacttcgtggatggggaatgaaatagcgattgtcaaaccggcagtcgatcaggaaaaccggctggataacctgatactggccatccgggccaaagatatcgatctggctaaagatcagctggcttatctggctgaacaaatcgggcggaagacccctgtgcgtttccggaatatcgattataacggacatacaatcggttatctcagcctgaaaggttttttcaatatgtttctggggaaatggttcagtaagttcgacaagccctactatacctttatcggcgattatgtggtattcagtaattcgtcgtctaccctggctgctatgataaaagattattccttggggaataccctcgttcaggacgaaaaatacaatgatctgatgagtgaattgggtaaccggagtaatatatacggatatgtcagttcgcccgagacctacgaatatctctttcgttctttgccaccggaagatcgtgctgaatttgtaaagaataagggggcttttcagagtttcgaggccatcggtttcactttgaccaatgctggaagtgggtatgaaacgcatttggtggctattcacaatgtcgatgctgcccgggattacgagatccgcgaactcagtcggtcactcgaaaaacaggccgacttgatcgagtccgggtattatcatgtggtgattcccgatagcatcgccgtgagtacccggggagattatgcttatcggactgagcaactggactatgccggcaaactaagtaacggtgacccggaaggcatttggaagattaccgatcggcaggggcaggttgtcgcgcagttgctctaccgggaaggtaagctgcagggagaatcccgttttttctatccggatggggtagttgctgtacaggtgacatacgataatggtaagattacggcttataaagaatttttttccgatggaactttgaaaaccgagttggagtataatagggggctgaggcacggtgaggcccgtttctattattctaccggccatctcttcggagaaggaaaatataagaaaggacgacgcacaggaacctggaaatattataaagtaaccggggaaatagaaaaaaaattgaaattttaatccccgactaaataacgctctatgacacagacaaaaaatcctcatgtacttgaaacggaatccatcggcaagttgttgatacaatattcgatacctgccatcattgcgatgaccgttacgtctgtgtacaatatcgtagacagtatttttatcggacatggagtgggacctctggctatttcgggactggccctgacttttccgctgatgaatctgattatcgctttcagtacactcatcggtgtcggtggcgctgcgatcagttctatttacttgggacagaaggatgatctgaaggcgaccgaagtgttgcataatgttttgatattatgtatcctgacagggatatgtttcggaggaatcacctattatttcctggatgaaatattgatttttttcggagcaagtacttccaccttaccctatgcccgcgattttatgcaggtgttgctattgggaaatcctgtttcttttttatttatcggtttgaacaatgtgatgcgtgcaacggggtatcctaaaaaagcgatgttatcgtccctgctgacggtaggagtaaacatcattctggctccgatttttatcttccacctcgattggggaatccggggagctgcgacggctacgatcctggcgcagatgggagggctggcatgggtgttgaaccattttctacatagttccagctacatccattttcgaagagggttttaccgcttgagaaaacatgtcatcatgagtattttctcgatcggaatggctccctttctcctgaatgtgtgtgccagtgggatagtgatcgttctgaatcataacttcaagatttatggaggagatttggccatcggtgcttatggcattgtcaaccgggtggctactttatttgtaatggtggtgatcggattgacgcaaggaatgcaaccggtcgtcggatataatttcggtgcgaggcattttgaacgggttcagaaaacgttgaagaaagtgatccggatagctgtgactattatgggattaggttgggtgtgcagtgagctgttgcccgggcatatcgtggcgatgttttcggacgatgcggaactgaataaattagcggaagtcggcctgcgtatcaccatcttgtctttcccgatggtaggggcacagattgtgataactaattttttccagtctatcgggaaagcaaagatttctattcttttgtctttggcccggcagttactgttcttaatccccttgctttatacgctgccccatatggccggtttggatatttacggagtttggggaagtatgccgctagccgatacattggcttttatagctgctattctgacattacgctggtatctgaagaaaacccatggtctgcagacgatagcttaattgcaggctgaaacaaagggacgggggtaatgtttcatataagtgtaaatatgtatataacagccatcttttttagtaacatggaaatcagataaaaattatttacttgtttaataattgtgtatcttgcaagcccggagcaaatttgcttcgggttaaaaactgacaggatagaaggatcttgccgataaggtaaaaagaaatgagactttttaaaagtaaagaaaaattatccgagagtgagtctgcgtatttggctgatatagaacaaaaaatcaaggcttacaaagcgaaggggtaccgggtccctacccgtaaaatgattaaaacggcggcccagataaaagggattcgccgcagtgccgctatcaatacggcggttttggatttggtggctgcccatatccatgaaggtatgacgacggaagaaatcgatacattagtctacaattttacgatcgctcacggagctattcctgctcccttgaattatgagggatttccgaagagtgtgtgtacctcggtgaacgatgaagtatgccacggtattccttccaaagacgttgtattgagaaatggggatattatcaatgtagatgtttctacgattctggatggttatttttcagatgcttcgcggatgtttatgatcggtaaagtaagtcctgaaatgcagcgtttggtgcaggtagcccgagaatgcctggaagccggtttgcaagccgcccgtccctggggcttcctgggggatatcggagctgccgttcaagaacatgctgaaggcaacgggtattctgtcgtacgggaattcggcgggcatggggtgggactcaaatttcatgaagatccttttgtcagccatgtcggacgccgcggtaccggtgttttgctggtaccgggaatggtatttactatcgaaccgatgatcaatatgggatcccgcaaaatttttatcgatgccgataacgactggacggtattgacagacgacggcatgccttctgcacaatgggagtatacggtgctgatcaccgataccggggcggagatcatcaccggatagatcagagataacggattatttcttccggacggtctacaatatgacaggctccgttttctgtcagttcctgacggggacggaagccccagctgacgccgatggaagtgatgccactgcgccgggctgtttgcatatctacccccgaatctccgatatacaacgcatccgcaggagttattccggttaggtgtaagatctcgtagacaattgccggatcgggttttgcaggtatgtgcccgcgttgtcccagtacaaccttgaaaagatccgtgccgaaataatgccggatcagctcgacggtcccctgatgatatttattggaagcaacagcaagctgtatgcctttggccgataagtgtgacaataattccgggatacccggataagggcgggtcaggtctgtcttgtgtcgctgataatagcctacaaattcttcccgtaactgcaggatagccggttcacagcgttccgcttcgggtaaagcccgttcgatcaattttgtaataccgtttccgacaaaatagcgataagccggcaagtcatgttccggatagccatgttgccggagagcatagttggcacttacagcgagatcgtcgatggtattcagtagcgtcccgtctaaatcgaatataaccagttttttattcatcttgttttcaattctttatacatcatttcataactaggtacaggaaggtggagggctttaccgttttcaaccacataaccggtcagcgtctctagttctgtcggtttgtgcttcctgaaatccgtatgcatcgaagtggtggcgtcataaggcattttctcctggtcggcaatgacttgccggatcatatcttgaggtagatgtatcccctgggcctgtgctactgcataaagttcttcgcccagcttttcataaccggaacgatgaaattcgagtacttctcctatgctttgatcgtagtatgaagtgagggtggcactcagagagatcagaaagaattttctccagatccggtcgtgtatgtctgcgggatttaaagctgagatacctgcccggctcatcaattgcagcaattcggcctgacgcagacggtcgccttccggatcaccgaaccaaagccggtcctgctctgtaaatttactgactgttcccggagccgaaagccgggctccgatatacacacaaccgtaccaaacctggtgtcccgggactagccgccggatttcttccgtaatattcgctccgtttaataaaggaataataacggtcgacggcccgataagaggacgtatttcttcaagatttccggctaaatcatagcttttggtggtacagaacagatagtcgaccgggccgatgtccttcggagaatgagtcgccagggtcggatgggcgatgatttcctcgtgcagagtctgaattttcagtcctttgcgtgaaatgatttccagattttcccccctcgaaataaagtaaattttaatgttttctgattgccggtaaaaatgagccagtttgcccccatagtaacccccgacaccgccgatccctgaaaatgcaattttaatctccatactactttctttccgattcgactccaaaagtatgttttttgtcagaaagatcaaaaatgagggggaattaaataattgtaacgaataagtgacagaatgattctatgataaaggatcctgagggcgctttgtttatggccctatgttggccgccggggactgtgtaagtcccgcggacaaggtgcccgcaggatccgaagactttataagctaaaacgttatgccgaagctgaacataccgatgtgttcgtaaattgtgctgagcaggcctaatatcagaatacctgccgtgcagacaatcaggctgagacgggtatagatatcggaacggacaggggcgatagcttcttcggttttgttgataaacatggctttgacaaccagcagatagtaatagagggaaatgatcgtattcagcagggcgatgaataccaatacataaaatccctgttcggctgcggcggcaaagatgaaaaatttactgaaaaaaccggcaaacggaggaatccctgctaaagagaataaagccagcatcatgacgatacttaacttcggattcgtggaatacagaccgttgtagtcgtcgatcgtgatcttgcctgtccggttttcgatgatggcgatcaccccgaaagcagccagattggagatcatatacaccagaatataatataccagtgacgtcatcccgatagcgcttccgctgatcactcccagcataatatatccggcttgtgaaaccgaagaataagccagaaagcgcttcaaattctgctggcggatggcaaacaggttggctacggtgatggtggcgataatgattacatacaggattgcctgccattctgtcaccagattaccgaatactttaaataatagagtcatcagtacgaaagctgccgaccctttggaaattaccgaaaaataagaagtcaccgtagtcggtgcaccttcataaacgtcgggtgtccattggtggaaaggcaccagtgaaatcttaaaaaacaatcccacgataaaaaatccgaaggccatatattggagcggattccctgaaatgcctgccggtatgtcggcaaaataaagtgtaccgaccgtcccgtagatcagggaaataccgtaaagcgacaatcccgaagcgaaagtggccgagagaatatatttagccccggcttctgccgactggtgtttgtatttgtcgaatgcagacaacacggccatcggtatagaggctgtctccaggccgatgaagaataacagaaaattgcccgcagaaatcatgaaatacatacccagcaaggaggagaacagaatcaggtaaaattctccccggcggatcaggaccgactcgctgtttacccaattataagcctggagcaggacaataagcgtacctgtgttcaggatagtttttacgatcgaaccgatgggggtgcacacatacatccctccgaaagcctctgccgtcccggcagggaaaagattcagcagtgtatgggccagaaacaatacacaggctaccggatgaaaatatttcaggcttttctgagagccgaacaagtcgtataccagcaggatcaacatgacggcgatcagtgaaagctcttcttttaggaacagaaaattagaatatcccatatttaataattttacgatttacgatatcttaaaacggccacaatccgtttaaactttcccggatcatatccgatatccacaacggagccagccctatccctgcaatggcgaggatcaggacgatggccgaaaaacgttcgtaccatacggcatcggtcagttgcaggtggtgttcgtcgaccactttaccatagagtagtttaccgacaacccgcaggatatagacggcagtgatcacaatcgaagtgcaggccaggatagtcatcacccggtggaatacatcggcatgctgaaaggaaccgacaaaaatagtcatctcggctacaaaaccgcttagaccgggaagtcctaatgaagccaaaccggcgatcacgtagcaggtccccaggaaggggatgattttcatcaggcctcccatttcccggatatcccgggtatgggtccgtccgtaaatcataccgatcaatgcgaagaacaatgctgtcatcagtccatggctcagcatctgcataatggctcctgtcacggccgtttgattaagcatcaggattgcgaataataccagaccgcaatggctgaccgaagaatacgcattgatgtatttcaggtcggtttggacgatagccgaataagcaccgtaaaccacactgatacccgtcaggataatgaatatccacgaaagttctttagctgcttcgggcataaggcaaatggccacccggaaacaaccgtagcctcccagtttcatcagcacgccggcatgaagcatcgacaccgctgtgggcgctgaagcatgaccgtcgggactccaggtgtggaaaggaaagagagctcccagtacaccaaaaccgataaaggtaagcgggaagaaccaccgttgcaattcgtccggaatatgctgacgcgcaatgtcaagaatgttcatgcttgtcgctcccgaattgaaatagatacccaatatcccgacgagcagcagggccgaaccacccatcagcatcagggtcagcttcatggctgcatattcttttttaccggtgccccaaactccgatcaacaggtacatcgggatgagggcgatctcataaaacataaacatggtgaagaggtcggtggagatgaaaaaaccgaagacaccgatactcaacagacaaaaccacataaagtattcccggggcaagagttccatcttccacgaagtgaatatgccggtgaatacgataatggaagataataataacatagcgaccgaaatgccgtcgacccccaccgaataatgaatatgaaacggggcataccacacgctgctggcggtgaaaagcatttctgccgtatttccgctgttcctttctcccagaaacaataccgtcagtgctacggcaagaagcagcaggagggaagctcctgtcgcacaaactgcacgaatttgtttgatgtccgatgccaaaagtaaacctcctaacatcaaaaccgggatcagaacgaataaggataagaaattcataatgttcaattttataatttacgatcctatatcaacaccactaataaaacaagcaataaagtgcccaccaggaaaacaaaagcatattgctggatttgtcccgactgtaatccgcggatagcgtacgacacccgttgggtaatataggccattccgttcatggtaccgtcgatgatgtggcggtcgaaccaggcgatcgggcgggatacaccgttgaaaatgattcgtttggtgataaacaggtaaaactcgtcgatgtaaaaacggtgataggctgctttatagaaatgggcatacatatgttgcagccggtcgggaatgtcgcacttcgatttgtaaaagaaagtggcgataccgatggcgattaaagcgattataatgctgggaatggcgacactccaatccaggtggatgtggtaaaccaatccgtcgctgctcacaaaatgcccgaacgggatgaaacctgcaaaaagtgtgatcgcggcaaggatcatcaggggaatggtcatcgagcggggagcttcgtggggagtatgtgcgtactgtgacggagtgccccagaagatattgtagtagagccggaacatgtaaaaggctgtcagaccggcaataaaactcatcaggataccgaaattcgggttgaaatcgaaaacggctgtcagaatctcgtctttactgaaaaatccggaaaaaggaggaattcccgatatggccagacaagcgacgaggaaggtcagatgcgtaaaaggcatatatttacgcagaccacccatgcggctcatttcattgctgccgatggtatggatgatggctcctgcgcaaaggaagagcagggctttgaacatggcatgtgtgaaaaggtggaacatcgaagccatatagccgagtccctgatggcctcccatacccgagactccgagcgcaaccatcatgaaaccgatctgagagatggtagaaaaagccagtacccgtttgatatcggtttgtacgcaggctactacggctgcatacaacgaagtaaaagcccccacataaccgatgccgaccaacacatccggggctgcactgacgtatacagggaacagacgggccacgagaaaaacgccggcaaccaccatcgttgctgcatgaatcagagccgataccggggtaggaccttccatcgcgtccggtaaccagatgtgtaatgggaacattgccgattttccggcaccaccgatgaatatcagagccaaggcccagctcatcacggaagctcccatgaaagtgacacctgcagctcctgcaaaaacggaagcatcaccggaagtcaataattcgaagctgaatgtcttggtgaaatacgacagcaacagaatgcccagtaaaaagcccaggtcggcaaaacgggtgacgataaacgcttttttcgaagctgcgatggcttcgggttttgtatagtagaatccgatcagcaggtaggaagaaacacccaccagctcccagaaaatatacatctggaaaatattgggagctactaccagacctaacatagaaaaggtgaacaaggatagaaaagcgtagtaacgctgaaaaccgcgttcgcctttcatatagcccatactataaatatgtaccatcagcgatactgttgtgatgaccaccagcatcatgacagaaatcggatccagcaatatacccagatcgatgtggagggcttctgtgaaacgcagccattcgaaatcgacaggcattatccgggcaaatactccgtctacccggggagctgaaaaataaagtcctgcagtgatataggccaggcctgttgtgacagccagagagaggctgccgatatagccggctgtgttcggacggagtttcatcccgaataatccgagcaccaggaaagtgagcatcggaagcaggaggatcgatattgtatattccataatctgaagtttagtctttcaatttatttaaattcttcacctgaatattccggatgttccggtatatattgataatgattgctatggccactgctgtttcacaggccgatattccgatagcgaacagggtgaagaaaaaaccttccagttggtccgggaataaaaaacggttgaaagccacaaaattgatatctacagaattcagaatcaattcaatagaaatcaataccgctaacatattcctgcgggtcataaatccgtagattccggcgaaaaacatgatcgtgctgatcaccagataatattccatcgttatttccatactattcaattttcatgtttaacgtttccgggcgatcaggatacccccgataatacaagccaacaacaaaacactgattacctcgaaaggtaacagatactggtatttctccgtccccatcaaagcggttccgatcactttctggttgatctcaccgggtacgaaatgcgataccgggaacgagtgggtaagtgtgatgaagatacagagggctgcacctcctaccgcagccagtatgccggcaaaaaatttgctgtttttgatcttgtcggctttcttattgtcggaactggtcagaagaatcgagaatacgtataatacaatgatacctccggcatatacagtcagctgtacagctcccaaaaaggaatagttcaactcgaaatatatacctgccgtagcaaataacacgaacagcagataagtcgccgaacgcaatatccgcttcgtggtgacggtcagtatggagcagacgacgatcactgctgccaaaaataaaaagaccgcttgggggagagttatattcataagatttcttttataatatacttaattcaatcttttgccggtcaggcttcatttttggtttccaacctggaaccttcgtggtttagttggagtaccagtttctcacgggtaaaaacggcgtgttcgtaggtcgggataaaagtaatggcctgatggggacagctccgcacacatagctggcaatacagacagctaccgtggtcatacagataccgcaccagtacctttttcttttttccgtcttcggtagttaccatttccgattcgacacggatggtatcgttcggacaattcatttcacagataccacaggcgacgcaatggtgttcgttgcgttcgttgtggggcatcgtcagctcaccccggaaacggtcgaacattttcagggtagcccggttctccggatatttttcagtagtcttgggggtgaaaaattcccggagggtaatgctcattcctttcagtaatgaacctaaaccattgaaaaatgaactgaaatattcttgtgtacttctcataaatcttgctaaaaatgtaatttgaataccaccacaaagaccatcaggaacaggttacacaaattaatgggcaacaggtatttccattccagtgtcagcaactggtcgatacgcaggcgggggaatgtccatttaaaccacatgatgataaataccataacggcactttttcccagaaaccaaaagatcgaagggatgtagtccatcacggtgttgaaattttcccaacccggtatatgtaaaggcatccagccgccccagaataaggtagtcgctacggctgccacaataaacatattgacgaattcggccacgtagaagaaaccgaagtgcatgcccgaatattcggtatggtaacctgccgtcagttccgattcggcttcgggtaagtcgaagggaccgcggttggtttctgccgtacctgcgatcagatagacgataaaagcgattaaagccgggagatggcctttaaagataaaccagccgtctgcctggctttcgacaatcgtcgagagctgcatgctgccggtaagcactaccatcgtcaggatcgataacccgatcgataactcgtagctgatcatctgggctccgcttcgcatggccccgatcagggagaatttgttgttactggcccaacctgccagcaaaataccgacaataccgatggaggatactgcgatcaggaaaaatatcccgacattgaaatcgataatctccagccctttggcaaaaggtatacagctaaaagccaataaagaggctatgatgacaatgtaaggagccaggttgaacagaaaacggtctacatgattgatctcgatgatctccttgatcagcatcttgatcatatcggtgacagtttgtatcattccgaaaggacctacccggttcggacccagacggcattggaagaaagcacagactttccgctctgcataaatcaggccgagtgccatgactgcataagcgaccaataaacagacaccgaccaggacaaattcagtggtggtgaccagcgaggcgggcagatattggtgtagggtggcgtcgacccattgtgttactactctaaaatcaaacatatcttattctcatttatctttcatctatcatctttcttttcttatcggtcgatgtccggaacgacatagtccagtgagccgccgatagcgatcaggtcggcaattttgttgttgctggcgagcagatcgactaccgataccagcggaagacccggcgaacggaatttcacccggtacgggaatttatctccgtggctttcgatatatacaccgaattctccccgggcggcttcgacacttttgtagtattggccttccggaagtttgatgatcggtttggtcttaacggcgaaatctccctccggaatattgtcgaccagctgctccaggatgtgaagcgattcgacgatttcatccatacgcaccatgtagcggttgaatgtatctccatggttgtaagtgatttctttgaaatcgactttatcgtataccccgtaaggatgaattttacggatatcgcatttccagcctgaggcacgtcctgaaggaccggttactccataggaaatagcatcttccagagaaagaataccgatgtctttcatccgctgccgggcgataatattaccggtgaaaacaccatgatattcttttagcatagggggcaggtatcggatgaaatctttgatccttgtgatcagattcggatggatgtcggccatgactcctccgatgcagttgtaattctgaatcaagcggcccccacaggtttcttcgaacatgtccaggatcttttcccggtcgcggaatccatagaagaaagcggtcagggctcccaggtccatacagaaggtggaccagaacagaagatgggaagcgatacgggtcagttcgtccataatcgtccggatatatttggcccgttccgggatttccagccccatcgcctcttcgatacacatacacaaggcgtgacggttcatatgggccgaaaggtaatccagccggtcggtcagtgccagagtctggggataggtgagggtttcacacattttttcgattccccggtggatatatccacagttgacatccactttttttacgatttctccttccagggatacccggaaacggagcactccatgtgtggcagggtgttgggggccgatgtttacgacgtattcgtcatcttcgaaaataacgttttccctttcttcgatcgtcccttcttttgtcaattccagggtaggggttgcatccgggctgctttcactttccagacggatggggttgatcttttcgtccgcatcgtaatctttacgcaacggataaccgatccagtcgttccgcaggaataaccggcgcatgtcgggatggttgataaaccggataccataaaaatcgaatacttcacgttcgttgaggttggctgtagcccaaatgtccgagacactcggcaattcgggattctcccggttttcggtttcaacccgtaaggccaggtcgtgaccgtatttgctggatctcagatggtacatgacgcccagggtttcgccccagtccataccggtcatacataccagaaaatcgaacgaagtatcctcgtcattgcgcaaacgaagggccagatcatgaaaagaggtacgtggaacgctaacgaaccatattccatgtttttcttccaggatagcttccggtacaatacttaatatcttctctttcataaattgttcggattacattggggggtagcttcgtcattactgttcctggggtcttgctgtttgttggctcctccgaggaatttctcgactttgattttccgttgcagctgcatcatgccgtaaagcagcgattcaggacggggaggacaaccgggaacatagacatctaccggtaatatttgatttacaccttttacgacatggtaggatttcttgaacggtccgcccgatatggcacatccccccatagcgatgacatatttgggttcggccatctgatcgtacaaccgccgtaataccggagccattttgtaaacgatagtaccggcaacgatgattacatccgcttgccggggactggcccgggtgacttcaaacccgaaacgggcaaaatcataacgtgccgcacccactgccataaattcaataccacagcagctggtggcaaaagtaagaggccataccgaattcgaacgcccccagttgatgagatcgtccaggcatcccacaatgatgtcggtgccgttggccctaagttgttcgaggtactcattatctttaaagtcctcatatttcattgattttatcttgggttgtttcatcgtttttccgttattttttgttctgactttccccttctcttcctctccagctttttgcttttagccttttacttttacctttttttacttccattccagtgccccttttctccaggcataggctaatccgaggatcaggataaccatgaaaaacaaaatgttgatcaatccgtcgatacctgcgtcctgtacggtgacggcccagggaaatagaaataccgcttctacatcgaacatcaggaacaggatcgcaaacaaataataaccggctttgaactgcatccacgaacggccacgggttggaataccgcattcataagcttctcccttttgccggttataagaacggggagatacgatgcgggcgacgccaagggcaatccccactaaagcaatagccgtaagaattacgacaattaataaggtcaaattcataacagaatatgtttaaaaaatacctaaaatactgaactatcgccgtccgtttccagacgacacttttttatttgaacgaatcggcgatttaaataataactttttgtagtgtatagatgtagtagtcggtgtgatccggtccggtgaaaactgcttgccggggaatgaatttattcaagggatcttctgccggtgattgtattttattatgcctggcctgagtaaataacctgatgaaagcttttttatccggcattttttttgtgtgttcttccgtaaggtcacctgcattgaaatgcaggaaagatacgagcgaggccagcatattatccgcttgattaataatcgtagtgcaggactggacaggaagacataccttggaggcatcgttggctttacaggtctctgacaaacagttacctgttacgaataataatatgatccatttaataatttgcacactcatttttttgaacgtgcgaatatacgatttaatttttaggtttgggatacaatttatattaaaaaaaactgaattaattcggcaatattcctttacctttgccggtgattactgagtgggaggcctatcttcaatcctctgtttaactaaatcgctatggataaattactttctccgatgcaggatttacaacaacaatcggccatgctgcaaaaagaatacgaatatgaaaaagagttgtatcgtcagcagacccgtgaggccggtattccgaagcgaatccagcagggagtgtgttggtttccggtgaagctgggggccgatcggtataattcactcaaccagctgacagtcgaagtaacgcgtacagagacggaagagactgaacatagctttgaatacggatgtcctgtttgtttttttaggatttcggctgataggcagatccgttatttcaacttttctgccgtgatcagttatgtacaggataataaaatggtagttgtacttcccggaccgcaggtattgccggaattagtcgttacgggtgagttgggggtacagttgtactttgacgatacttcgtataagacgatgttcgctgccctgcgtgaggtggcagaggcaaaggggaatcgtacggctcgtttgcgggaggtattgctgggtaaagcacctgcacttcggcgggagaccggtccggtgcgtttcccctggctgaatgcttcgcaggagaaggcagtgaatcaggtgttgtgtgcaaaagaggtggctgtcgtacacggacctcctggaaccggtaagacgacgacattggtggaggctgtttatgaaacccttcaccgtgaaaatcaggtgatggtgtctgcccagagtaatacggcggtggattggattgcagaaaaactggtcgatcggggtatccccgtgcttcgtatcggaaatcctacccgggtaaacgataagatgctcgcttttacttacgaacgtcgtttcgaggcacatagcgactatccggaattgtggcaaattagaaagactatacgggagatgaccggccgtttacgtaaaagcgggcgtgaagaccgggagcgtttgcataatcagctgactaaattgcgggtaagggcgaccggcttggagatacgtatcgatacggagttgtttaccgaagccagggttatcgcctgtaccttggtgggtgcggctagccgggtattggagcgcaaacgcttttcttctttgtttatcgatgaggctgcccaggcgatcgaagcggcttgttggatcgcgatctcccgggccgaccgggtgattctggccggcgatcattgccagctaccgccgacgatcaaatgtatagaggctgcccggggagggctcggccgtactttgctggagaaggtggtgctgcacaaaccggagaccgtgtctttgttgaaaatccaataccggatgcatgaagatattatgcgcttcccttcccgctggttttatcatgatgagttggaagcggcaccggaagtgaaataccggggtatcctcgatttcgatacgcctgtcagctggatcgatacttcagaactggatttacaggaaaaagcagtggcagaaggaaccggacgtctgaataccggagaagccgaattgttagtccgggaactgaaaaattatatggaacggatcggaatccggcgtattttggaggagcatatcgatttcggggtgatatcaccttatcgggcacaagtccactatttaaggcatctgttgaaaaaagagccgttctttcgtccttgccgtcgcctgatcaccgtgcatacggttgatggttttcaagggcaagagcgggatgtgattatgatcagtctggtcagggccaacgaaaaagggcagatcggtttcttgcgggatctgcggcgtatgaatgtagccattacccgggcccggatgaaattactgattttgggcgaagcggtgacgttgaccagacatcctttttaccgcgagttgtatgaatatatcggtgggctccggtgagatcagaataattcttgccggatatgttcgatatctgcttcgtcgatggtgtcgatgatgttatcgaatatcatgtgaaagccgaaaataccttcaaccatttcatcgatggcatgttgtttgggaacatgctgaaaaaccattcggtacatggctgctacggctcctgtccggtcgctgccatgccagcaatggaagagtaggggacctttccggtcgcggatgatctgcatggcagtgaccagatcgtccagcctgagcaatgtggcccgggtggggaggtgatgcaggatcagcgaggtgccctgtgcttctttggtgtcggtgtggtagcaacggagattcagtatttcccgcataccgaatttttccaattcccggaagcaagctgcggacggctggtccgaacgatatactccgtctccgatccggtagaagtttttcaaccggcatttattacccagggtgattttctctgtcttcaggtccggtaggtgaatggtgtatggatacatggttggtttggatttcatttgtttttttattgatcagaataaatccggtcacgatcagggccaaagcaatcggatcgtgccacgaaaatttctgtagtcccatcaggatggaaacagcagcaccggtgaccggcaggacgtatttataagcactttctacgaagggggtgatgtagtttagggcgtaaacacttaaaaaatagccgatcacggtggcaacgaaaagtatataacaaatttcgagccagatgtgaaggggagcctgggcggaaaataaaggtgatctgaccagatctgacagcccgaaaggtaagctgatgatcatcgaagataagctcatccatttcatgacggtgaccgaatcgaatttttgggtataaggtttgatcaggatcagaaagaaggagtaagaaaccgaagagcagaaaaccaggacatcgcctccgaacgagtctttcaccaggcttccggtgtggggcataatggaggcataaagggcgcctgcaataccgagtagaataccgaaggctttgtatttggtaaatacggtatgcagaaaaataaccgccagggcaatgacgatgatcggttgggtggtgcggatgacaaaagcatcgataggcccggtcagtgaaagtccattgatataaaacaataagttacctcctaagccgagtataccgcccagtatcatcatcccgatttcttttttttgggggtgcggacgatcggaagaagtcgggaaataaaggccgattagccagaaaaccagggtgctggcagagcaacggagtaacaccaacccgttgggaccgatccattcgggaatgatgactttcataaaattggtgttgaaactataaatgaaagtggtggccagaatcatcagatgaccgatataagctttggatttgggcatatgttctttttaagttactcagcgattcggtaactttttaaacgttggaaactttactttgttacagaacgtttaataagcaatatacgattttataaatgataaaaataaaacatatgaagacagtgattgatagggcgaatacacggggacatgctgattacggctggctgaatacctggcatacttttagttttgcagactattataacccacagcggattcatttcggggctttacgggtgctgaacgacgataccgttacccccggaatggggttcgatacccatccccacaaaaatatggaagtgatctcgattcctttgaaaggttacctgaggcatggagatagtctggagcacagtgaggtgattagtcccggggatattcaggtgatgagtacagg

SEQ ID NO: 6278 - DNA, 137 bp, Unknown
  gut microbiota DNA sequence
caaggtcttacaatccggtgtctgaatggaacctaaagtcatgcattcatggttgtcgatgtcaatgataccgatgcccatgatttccagtccacgcttgtactctcctgcacaaccggaccagaagtaacctatcc

SEQ ID NO: 6279 - DNA, 155 bp, Unknown
  gut microbiota DNA sequence
cgtaacctttttgagcatgaaactttcgactggtttgcgttcaacggctctatcatcagcaagcatctcacaggcaaaagaaaagccatcgccatcgatccttcctatatccccaaatcaggcaagaagacaccttggataggttacttctggtc

SEQ ID NO: 6280 - DNA, 114696 bp, Unknown
  gut microbiota DNA sequence
agaatcagaagtggctcaaatctatcagtccgaagttcgggtctttttccggttgccatgtgcggacgtggatcactggttctttagggttgttcaggtctaccatcaggaacaaataccctgtatcaccgtagctggacgagaaataatcctgcttgatctggataccgtaaatttcacctcctacacccgacttgcgaacttggttgtcggcaaagcggaggttgatgaattccgagctacggaagatgtgctgtaatttcttcatgtattccgacttcgtctgacgggtgtattttacagcttgcttgctcatggcctgtccttcgttgctggcagtgtgtttcagtactgaaccggtgataatcagggcatcatcagagaaaatgctgttgatataatcgtagcgcttcaaagcataagccgtcttataactttcaaggaagttgataagtacgttgcgtacggtatcattccaggatgtttggttcatgatatcgtctacggcaggtttgttgaggccgaaggagaggcaatctatcttaccttctttattcagggtgaacactacatcttctacaaacgtgcgttggttgctgaacttgaaactcatgggaagactgcggcaagttacttccccattgcactctaagaatctgaattccggttcgttgatgattttgccttgtccgtatttgatgaggcggttgaacatttcatatccgctttcggtacataaggattggatatcggtgaaattgcgcgtacgaatagctttttctactttcttcatggtatcgtcgtaggcagcggattccatggtggacaaataatgcataccgctgtttgtggtggtggcactgtctgattctgccattaaggcttcttcggtcttttcttcaccaggtttcggctcctccccttccagtttcaaggcgcagttgcgcatggctatggggttgacggttcccatcacttctgacagttcgttgtcgatattggcttcaccttcaaacatatactcggtgcgtagttgcagattgcggacattggcaagcacaggaagttccacgatgcctgtaccgtctttggctgagaatatattggaccagtcgcgaccgtcgaaatacgtgtaatcgtagttgcgggcgggctgtcctttgtaaagtaccttgaggttgatcgtcttcagatcaccgtccagatgggtgctttccatacttattttcagattggagaagatctcgttcatctgtttgggaatccaagtggtgagcaagaggtctttgccgtcctcatccttcatggtgaggaagttgccgtcggggtagctctggagtagaacgagcgcccagtagtaataacgcagggcatcggccacctgggctttcttttcggcacggacggcttcttgggcaaagtccagtatctttgtcttccgtccgtcaaagatacgttgtatttcggctactttgatatagcgcatgacgacggcttccggttcgttttgtatcacgatacggcgggtattgtttagtgtagcacgcgagtaggtgttgatgacggacttgaatgtctcgtccacagttgcttgatcatccttcattccgccttcggtcagttgctcgaatttggaagatacgtttgtggagatctggctgatgagtgctgcaagtgcttcattatcggctttcttcaaggtagccgcgtttcccgtaccccagatgtagtctttgctggtttgtatttcttcaatggattgtccttttgcggcaagggcaataaataagaatgtaacgatgataaatgcgctccttttcatgttgttgcttttcatgttgtttcaattctttgcaaaagtagaaacttttttctataaagcggcatttcagtaagttattttttatgcctgtcaaaggatgcttgtaattgtattctctaattgcattcgatccatacccgatccgtacctgctccgtaccttcttcggtcagaggtacctttatacggagaaactacggagttgatacggagcagatacggctcagatacggcccggatggatttagaaagtgtttaggagttatgcgggtgaatgaagtatgggggtgatatcgtcgaatatacggaacagttcctctttggtctccgccctcagcatggcaatacgcgtctcccggaagtttggtattcctttaaatagcgggcttgctgccaaatggcgacgtacatgcagaataccccttctttcatccagcaaattgacgctgtccactacctcctggcgcagcacactcagtttccaatcggcactcagcggtggcaactcttcacccgtttccagataatgcttcacctccttgaatatccacgggcggccaaagctggcacgacctatcatgatggcatccactccataaagatcgaaacactcctttgccctttggggactggtgatatcaccgttgccaatgatgggaatatgcatacgcggatttttctttacttcaccgataagtgtccagtcagcctcaccggtatacatttgtgcacgggtacggccgtgtatggtgagtgcggcaatgccacaatcctgtaattgctctgccagctccacgataatcttgttgttcgcatcccagcccaggcgggtttttacggtaaccggtatctttacggcatctaccacggcacgggtaatctccagcatcttgggaatattctgcaacatacctgcaccggctcccttgcccgttacgcgcttcacggggcagccgaagttaatatcgagaatatccggacgcgcctcctctacgatgcgggcggcttccaccatggtttcggtatctttgccgtatatctgtatggctaccggccgttcctcatcactgatattcagcttctgttcggtcttgctgacggagcgtatcagggcatcggcagatacgaattccgtgtacaccatgtcggcaccgaacttcttgcacatcaaccggaatgcagggtcggtgacgtcttccatcggagctaaaaatatggggcgttcgcccaagtctatgtggcctatcttcatgaatcgattgaactaaatgattatttcgctgcaaaaatacggaaaaaagcctacctttgtatcattcatttatttaactaatatggaattatgaaaaaaggtttggttttagttgtgatgtgtgtagcaatgttgtttgctgccgcatcttcggcttcggcacaagcaccgagtgatgagtacaaggctacattagaaaaaatgctggaactatccggttctatggcgtcggcaaaggctatggtgccacagatgatttctatgttgaaacaacaatcatcggcatcggtttctttttgggatggctttcagaagaagtgggaaggaaagtttggcagtaagctggcggaactttacgctcctgtttatcagaaatatctgacactggatgatttgaagaaaattgttgctttctatgaatcgcctgtaggaaagaaactgggcgcttctactcctgccatgatggctgagggcatgcaaataggacaaaagttgggaatggagattgccactgaacttcaacaggaattgcaggcacagggaaaatagttacaagttacgagctacaagctacaaggggctacgctatactccgaaaggtactcgtagcttgtaactcgtagcttattaaatatatgattttatggatttaaaggactttgaaatcatggcccctgtcggctcgcgcgaatcacttgcggcggccatccaggcaggtgccgattccatctatttcggtattgaaaacctgaatatgcgggcccgttcggctaatacattcactattgaagaccttcgggaaatagcgcagacgtgcgatgagcatggtatgaagagttatcttaccgttaacactattatttacgatcaggatctggcattgatgcgcaccatcgtagatgcggccaagtcggcgggtatctctgcggtgattgcggcggacgtagctgtgatgagctatgcgcggcagatcggtcaggaggtacatctcagtacgcaactgaatatctcgaatgtggaggccctgcgcttctacgcacaatttgccgatgttgtggtactggcacgcgagttgaatctggaacaggtagcggagatttatcgtcatatctgcgaggagaatatctgtggtcccggcggaaagcctattcgtatcgaaatgttctgtcacggtgctctctgtatggcagtgtcgggaaaatgctatctttctctgcacgagatgaaccactctgccaaccggggtgcctgcatgcaggtgtgccgtcgctcttacacggtgcgtgataaggagacggatgtggaactggatgtggacaaccaatatatcatgtctcccaaagacctgaaaaccatccattttatgaataaaatgctggatgcaggtgtacgcgtgttcaagatagaaggacgtgcccgtggcccggagtatgtacgcacggtggcggaatgttacaaagaagccatccgttcttacctggacggcacctttaccgatgaaaaaatagccgcgtgggatgaacgtctgaagactgtattcaaccgtggcttctgggatgggtattatctcggacaacgcctcggcgagtggacgaagaactacggatcggccgctacggaacggaaaatatatgtaggtaagggtatcagatacttttctaatatcggtgttgccgagttcctggtagaagctgccgaactgaatgtgggagacaagttgctgattacaggtcccactacaggagcagtattcactacgctcgatgaagctcgtgtagacttgaaaccggtgcaaaccgtgaagaaaggacagcatttctcgatgaaagcggacaaaatacgtcccagtgacaaactctataagctggtttctacagaagaactgaagaagttcaagggactggatattgagaaaacacgtggatgatacacttttgatacagttatattgaatatggaaaagtatatctatgagttagagatgaaggtgcgcgattacgagtgtgatctgcaaggcatcgtgaataatgcaaattaccagcactatttggagcatacccgtcatgagtttctgctatctaccggtgtcagttttgcgggattgcacgaacagggagtcgatcccgtagtggcacgtatcaacatggcgtttaaaactcctctgaagagcggtgatgagtttatttccaaactctatatgaagaaagaaggcatcaagtatgttttctatcaggatatttttcggaagagtgatgataaagtagtcataaaagcaacagtcgaaacggtgtgtctggtgaatggacgactgagtgacagtaagctttttgatgagatatttgaggcatacctctaaaatatcaccacagagtagcactgagtttcacagagttttattttttttatgtgaataattacctctgtgatactcagtgttactctgtggtgaattgaatttgtacaaccatgaacaacgacgaacgaatttgcagtatagccctcacgctttgccccggtataggacatatcggggcaaagcgtttaatagacggtataggaagtgctgccggagtcttttctcaacgtaaagaactgcctgaattgctacccggtgtgagtcctactatagttactgccctcgataatcctgccgctttcctgcgtgccgaacacgaaatggagttcgtggagaagaatcgcctcacttgtctgactctcaaagatgaagcttatccgtctcgtttgcgcgaatgtgaagacgctccgatagtcctcttcttcaaagggcataccgatttcaattgtcttcgtgtcatcaatatggtcggtactcgcaatgccacagagtatggcaagcaattctgtgtagatttcctgcgtgatctttcctctcattatcctgatgtgctggtagtcagcggtctggcttatggtattgatattcatgcccatcgcgctgccctggccaacaacctttccaccgtggctgtccttgctcacggactggaccgtatctatccttatgttcaccgtaaaactgccattgatatgctggacaacggtggactccttaccgaattcctcaccgaaaccaatcctgaccggcataactttgtcagtcgtaaccgtattgtggcaggtatgactgacgcaaccatcgttgtggagtctgcctctaaaggtggttcgctgattacggcagaccttgctgtagactatcatcgcgattgtttcgccgttccgggacgcatttctgacgcttcttcgagagggtgcaatctactgatacaagataataaggccgctctcattcagtctgccgaagattttataaaagccatgggctggactcatgaagagaagcttgccaaaccggagggcatccagcgcaatttcttccttgaactgacagaagaggaagaatttgtcattcgtattcttacccgtcaaggggatttacatattaatgcactggttgtagaaacagatatccccataaatcgtatgatcagcttgctctttgagctggaaatgaaaggtgttgtaaaggcattagtaggtggagtgtatcatttgttgggatattgattcaaatttcaggggctttttagccattgttggacgtgaatagataccacccgttttttggggaaatatccttcttcaaaagcaaaaaaatgcacatatatttgcagatgaagtagaatcctaaattgaaagattatgaaaacagaaaaacatgttgttatcctttggctaatcatatcattattgctgcctacacttgcctgtgcgcagtataagtttgataatgtactgtatggggcggcttattatcatgaatacatgccgacagatcgattggataaagatatccaaatgatgaaagattgtggactttcagttgttcgtgtcggagaatcatcgtggggcttgtttgaacctcgtgaaggcgagtttgaattcgcatggatggaccggataatagataagatgcatcaggcaggtataaaagtaattttgggaactcccacttatgctataccagcctggatggcagaaaagcatccggatgtgttaactgcttacgaacgaggcaataaggcatattatggaacccgccagaatatggatatatcgaatcctgcctatttgttctacagtgagcgtatcattcgcaaaatgatggagcactatgccaatcatcctgccattatcggatatcaggtggataatgaagctactgcacgtggaactaataatcatgacttttttgttggattcagaagctatattaaagagaagtttgataatgatctggattctttaaacaaagcctggggcctgaattattggagtatgaacattcatagttgggaagagttctataccagagatggtgttactaatccctcgtacaaaaatgagtgggaacgttatggccgtaaaaggattgctgattttctgaattggcaggtagatattgtcaatgaatacaaacggaaagatcaatttgtaacacattgttttatgcctgcttttcatgaaatagatcaggtggaaagttttcgtcagatggagtatcctgcgattaatccatatcatagtgtgcaagatggccagaatggcaggttaatatcatattcgggcgaccacatgaggactgttgctaaaggcaattatctgataactgaaacgaatgctcaaaccaccggttgggatgcgaggtatcaatatccgccttatgataatcagctcagacaaaatgtatattcacatctggcatctggggcaaacatggtagaatattggcactggcactctatacattatggtcaagagacctactggaagggaattttgggacatgatcttgaaccaaaccgcatttatcatgagtttactaccgtggcaaaagaattgaagaatataggtagtaaattggttaatcttaaaaagaagaatgacgtagctattctttacagtcatgattcgtattatggattaagattcatgccttatactcatggagataattatccggttgaaatgttgcactcttcgctttataatatgaatatagaaacggatattgttcattgcgataaagtgagtgatttctcggaatataaaatgttgattatacctcctctctatattgctaccgatgaactgttggaaaagatagatgctttcgtgaaaaatggtggtaaggttatcatgatgtataagagcggttactgtaatgaacattctgcggttagagctatgttggctcccggtcctttacgtaaagcatgtggattttattatcaggagagttctacaattggatggatggagctgaaagataatccgttcggactagataataagaaggccattggtgaaattatagaattcattatacccgaaacagcccaacctttggcttatgctgatcatcctttcttcgggaagtggcccgtaataactgagaatagttatggtaaaggatcactggtatatattgcttcatatccttcgcaagagttgtttgagaagatagttcgtacagaggcagaaaaggctggcattgtttccgatgatgaatataaattccctataatagtgaagaaaggaacgaatgataaaggtcgtactattcgctatatatttaattattcaccgacttctcaagaggtggaatacaattatgcatccaagggaaaggaactgctgaagaacaggacattgagcaaaggcgattcgatgacgattgctccatgggatttgttgattgttgaagagtgatatcttttcaagataaaatgagttcttgctttatgaaaatagatcaggaattcattttatctaaggacatatctcatttggaactatctttttcctacctttgctttcgcaactatattattatgctatgaaatacctgtccttttttatacttctgtttattggagaactgtccgtaagcgcacagcacatgttctccagacaatttccattcttcaaccaactctcttccaatgagattttcagtattcaccaggatagggaaggatacttctggataggtaccacgaatggtctggcacgctatgacggctatcagttaaatacattccgtacagactataaaaatcagaatctgctgactgacaatggaattactgctattaatgacaatgatctgtatgtatggattggtacgtggaaagggctgaacctgtataataagcagacctgtcagattactcctttctcagatgtacggctcctggataaggtggtggatgctataacagtcgacaaggatgggaatgtttgggtaagcgccggtggaatgatataccgatgcgattctaccgcgcatattataaaggagtatgaagttggaaatattcaggagggatatgctattagcaatatctatgtagatcagcaaaagcaactttgggcagtgggatcacgaggtatattcagatatgagcccgaaactgattcttttttccgttatccgccattgggtaacggacataccgcatatattatgcatcaggataattccggtaattactggatcggtacatggggggaaggtttatggcaattctttccctatgcacagaaaggaggacactataagaaacataatatagctgcttcgaacaataaagaaaccggtattgaatccattcttttcagtatagagcaggatgatacgtttggttatctctggatgctttcgtatgccgggctccatgcatttaaatacacagatgagggaacactggaaaaggtggatatcaaccatctggttgatacgcacatgatgtacacccggatatgcaaggacagggagggtaatctgtggttgccttcgtatgatatggcgtacactatctttttcgataattcgaacatagacaattaccttcttcctcaactgaaggaagagatgggatgggatgccaatgttatgaatctttgtcagggaagtgatagtactatgtggttcaggcaggacagatacgaattgtgtatgtacgattattcacgggatacatttgctggtacaggtgtgggtgagattaatgccattatcagatctcttcataaacccggtgtctgggttaattcaagtcggactcctcatgtcatgagattgacacaacggaacatgaaggtgcagatagaagaagacatcaatataggaggagttacagggttacttgaggataaagttggtaatctgtggatatccagatggacggatataaatgtgaaacgtcctgataaagatgacttggtagtttcgggtagtgacgttccggtaatgacttccctgttcaatgatgtaaagggagaagttttagggttgtctcacgagagcaaaatctatcggctgagttgtgccgacgggcggattacctgtgaattaaaaggcagtgtttcttctcttctggaaaaggaagaagtgaacagtgtctgcattgaccgggaaggacggttgtggctgaacactactttgggaagaatactgcggtctgacgaaacgatgcataagtttgaaaatgtatcactggataatgagatagatgactgtactgtattaggattactttccgataagaacagtgtgtggattatcaccaataagaaagtacttcaatataatattgattcgcagacttttcagcactattctactgctgatgataatattatggtagatgttttcaggtataaggctatcagcctggacggttggggcgggctctatgtgggcggacaccgtggattcatacatattcgtcccgttaatgcatcggtggtgaacagggctcctacgagcttgcatatcacagatgtcaaagttgaagacaaaagtatcttcttcggcaatgcggaagcctcgggagagaatacgatacataagattttccttggtccggatgatcggaatattgagattttcttttcttcgcttttgtattcgctgaatgcgggatgtcgcatagcgtatcagttggagggggtggatcattattggatctattcggataacaacagaaattccgccttctataaccacctgccgaagggaacgtataaactccgtttgaagttggaatatgagcggggtaagtggactgaaggcgaagtattgctgaccattgtgaaagagcctgccttctatgaaacctggtttgcatatcttgtttatgtcattttcatcggattgtgcttttatgtggtaatccggctttatatgcgtcgtattaaactgaagagtgaagtgagattgcaggaagaactgacgcgtaccaagctgacttacttcaccaatgtttcccatgagttgctgacaccgcttaccgtcatatcctgcatatcggattatctggatcagaaggttcctgccgtgcggcaacagtccgtcatgctcaaggctaatgcggagaagttgaagcgactgatacagcaagtgcttgatttccgcaagatggatgtggggaaactgaaactgaacgtttcggaaggagatatccgtgagtttgtcctgaacatctgccaggtaaacttccaaccgcttgcattgaagaagaacatcacgctggatactcgttttgaagcggaggaagcacatggttatgtggattttgataagctggataagatattgcataatttgctgtccaatgccatgaagtatactcctgagaacaggcgtattactgttgatgtacgagtagtgaatgaagcggaacatcggatattggtgttgaaagtggaagatgagggcgttggtatctctgagaaagaactggaacagatattcatccgtttctataacagtaagaagaaccggggaatcgagtcgaatggaatcggtctctcgctaacgaaagatttgataaccttgcatcatggccttatcaccgtggaaagtgttttaggacaaggttcctgtttcactgtaaagctgcctattgacaaagaaagctactctccggatgaattgcttgacgagacgatggtgttgcagaccagtacggatgatgtgcccatggaagattatgcctcgtctgatgaggtggataaaccggctatcttgttgattgatgacaatacggaattgctgttcgttatgaaagagatgttcagggaacgatatactgtactgacagccgcagacgggcaacaggcctgggataagttgaagaataatgaggtggatgtcgtcatttgtgatgtcatgttgcccgatgccaatggttgggaactttgtgcgcgtatgaaaggtgatttgcgtttcaatcatatacctgttatcatacttacggctaagaatggtattgaggaccgtgttgccagctatgaagcgggcgccgacggatatatagccaagccttttgagttgaagatactttttgcccgggtggataaccttatccgatcttcgaagatgcgtcaggcggctttccgtaaggaggagaacctggatctggaaagtctggcctatccctcggcggataagcagttcctgcaatccattatagatagcatcgaacagcatttggaagagtctgaattcgacttggaacaattggctgcggagaagaatatgtctaagtctaccctttaccgtaagataaaatcgatgacgggaatgactcctttggactttatacggaatattaagatgaagcgtgcctgcatgatgttgttcaaccgctcgcatactatatccgaggttgcgtatgctgtaggattcaatagccccaaatacttcacccggtgcttcaaggatgaattcggtgtgacgccgagtgaatatcttcagaaaaacaccccttaattttagtatatagatgctacatacaggggtaaaatcctgttatcaaggggtaaattcgggtcatgacagaatctctccccttctataaatgatttctgtacctcctttttcataagatatgagttgatttgttgtcagatacccaaacttaaatcaaagcatagttatgaagaacctcagtatccgtcatggaaaatcatccggaaacaaatcagtactattacttactgtattagcattaggcaccggattctcttctttgtctgcccagacaaatgccgcaagtgaccagataacggcacaacctgctgctgaccgcattgtacctttccgccttagtgaacaaggagtagtccaccctgtggaatggggattggatacggcttgggaagatgagggaaatatccgccgtggccagggatttatggaaacggtagatatagtgcgcgtttcttttcgccccaccgatcccattgtggatggagatttgggagctgatcagaaagaacatatacaaacacgacttggtttactgggttttgtctctcctaaacccaagttagctataaatagcgatcaccccaagattgacgattcttataaaggtaacgcccaggcttgggctcagatgatggatttgcatactcgttattttcaggatgcaggatacgaggtgatttcagtggctccattcaatgaaccggattatacctatacaggacaaggtacccgggaggatttccacaaaattgctgtggagttgagagcgaatccccgtttcaagaatattcggatttgtgggggaaatactctgaattgtgatgaagcactgccttggtataactatctcaaagaacaacttgatgagggaaatacccatcagcttgccggtgaattcaatggttacgctgctttctacgagacggttcgcaaggatggaaaaatggccatgaatgatgagatgcacaacgtgatggaggcgatggtgggtctggagtatgggttgcagaccggtatctggtggggaagtgcagagtatgcccgtggtgaattctgcaagattagccggggtggagaacgactggcatatactgaacatcgtcctaattggacggcagcttctgtctatcggtctaaagatggcagtaaggttcaggcttttggaggcgtttcggaacgtcaggctaaaacgacaacttatcgttttgtatccaaagagaaggatgtgttctatgatggttatggtccgcagcgtgagttctacttggagatgcccggaggaaattcttatcaggacgatgaacagcggaatgccgaacgggtggtcaatattacttggggagaagatattcagccggtgatagacggacagtatgtgctgataaaccggagtactcagcgggcagttgaaataacccagggcaacacggcggagggcaccaacgtgaagaccggaaagtttgacgcttccaaggcttatcagcgttggtatgtccgtccggtttccagccgtatcggtggagatttcagctatttctgtattacgtctcccataaatgggatgtcattcgacatctggaattggtcgttggaggacggcgggaatatcgccatctatggtgccagtaatggcagcaatcagcaatgggcattggaatatgccggggatggatggttttatatccgcagtcgccatagtgccttgtatttggaagagggagaggaagctttcaatgtgcagcaaggtacgaaaaagggaagtaatgatgaacggctgcaatggcgtctgatacctgctccggcttctaaaattgaaattaaatctttagctactccaaccggactgacgacggaagggcaatctgcatccgttttgttgaagtggaacaagcaatccgatgctacagaatacactgtgctacgttccgaaacatccggtggagcttacgagattattgcgcgtaatgtaaaagaaaccagttttgtcgatcataaggccttagcgggtaagagttattattatacggtgaaagctaatgataattgtctgaacagttcgccgaagtcacaggaagtaactgccactattactgatgtgcatgccctagtagcacattatacttttgatggagatttactggacgagacggaaaatttgaatcatggtgcatccttgaaaaaagcaatgtttaccgatggaaaaataaacaaagctgtacaacttaacggctcaacggaatttctgcaattacctacggatattgccaatcatcagaatctgactgtttctacttgggtgaagtgggatggtggtgcagactggcaacgtgtcttcgactttggtagtggtgaagatctatatatgttccttacttatagttccaatatacagtcactccgctttgcaatgaaaaacggagcggaagaacaggccctggaaaccgccttaccctctcccatacgcattgacaattgggtacatctggcattgactatcggagatgcggaggtacggatttatgtgaatggagaactggctgtttcatccggggatattactatccgtccgatggatatccgtccctgtctgaactatatcggtcgtagtcagtttgtagctgatccgatgtttaaaggaagtatcgatgatttcagagcttataattatgagttatcagcagaggatataaagaaagtagcccaggggggatcggtaggtatcattactccgcagatttccgatgatgaattgtttatcggccctttacctgccgatcagaaactacaggttacttatacacctgcccagtcatcgggtagagtatctctcagtatttataatatgcagggagttccggtactttctcatgagacggctggttccggtgttactacgctggatgtatccggactccctaccggtctatatctgttgaggcttgttgataacaaccggtcagttacacgtaagtttgcagtgaggcattaataagtagggtataaaatcctttcatcagggtataaaaacgtttcatgaaaggattttgccccttcgataacctgtttttgtgcctatcttctaattaaatatcacttgctttgcccttggataattaaacttagatcatattagtattatgagaacagtaagcaaattacttctttcttgtgtgatgttattcacattattgccggacgctgtgcttcatgcatccgaccggaagactctttttgacagtaactggaaatttcatttaggcatcgtagccaatgccgaacaaccggaatataatgatagtcattggagagttcttgatcttccccatgactggagcgttgaaccattgtcttttcaaaaacaaggcattactaccggtcctttctctcgcatgagcgaaggtgacatcgatacgggacagaccgttggtggtgaaggttggtacagaaaagaactcactcttgcaggaagcgatgccgataaacgtattgttctctattttgaaggagtatacaatcagtccgagctatggatcaatggtaagaaagctaattataatgtttatggatatacctcttatcgtgtagacatcactccttatctgaatgcacccggtactccgaacgtgattgccatgaaagtggtgaacgccggacgtaacagtcgttggtatgccggttcgggtatcttccgccatgtatggctgatcaagacaaataaactctatctggataaatgggatacttttgtcaacgcttccgaacttcagaagaaggaagctgtgattcagttctctactattgtacataacgagggcctgcaaaatcaatcaggtaaaataggtattaaaatatattcacctgccggaaacgaagtgttttctacttcacaggacgtgatactttctgaaggaacgccggtggcaacatctttctctcttaaaaagcccgagttatggtcagtggatacccctgtgctttatacagcggaagtatccctttcctcagacggaaaggagtatgataagatatctgttccttttggtatccgcaccctttctttttctgctgagaaaggctttctgctgaatggtaagtcgatgaagctgaaagggggttgcgtacatcacgataacggacttttgggagccgccgccatcgaccgtgccgaagaacggaaagtggaactgatgaaagctaacggctacaatgccgtcagatgtgcccacaatcaagtgtccgagtatttccttgatgcttgcgacagattgggtatgctggtgattcatgaaaccttcgaccagtggcagaaagctaaacgcgagcaggactatcatcagttctttgatgaatggagcgactgggatttggctgcgtctgtccgccgtgaccggaatcatccctctatcattatgtggagtatcggtaacgaggtggagcaacgtgctgatgaacctgagggagacttgatttccaaaagactggtgaataccgtccgcaagtacgatacatcccgtttcacaaccatcggttccaatgacttctgggacagacgccagtttagttgggacaaagattcctaccggatcttcaagaatctggatgtggcaggctacaattatatctggtggaaatatgagagcgatcatgctgcctatcccgatcgcgtgatctatggtagtgagtcttatccgaaagaagctgcccagaactggaacttggtagaaaagcatccttatgtaataggtgatttcgtgtggaccgctattgactatctgggtgaagccggattagctcatgccttgtatctgaaagagggcgagcatgatacgcagtttatgggttggccttggtataatggttggtgcggtgatattgacctttgtggcgacaagaagcctcaatcttattatcgtgatgtgttgtggcgcgagcgtcccattactatggcagtccatgcccctgttcccgaaggcaagaaagaagtggtgaacggttggggctggcccaatgagttggtgagttggaattggacgagttgcgaaggaaaagtgatgaaagtaaacgtatacagccgttctccgaaagtgaaactctatctgaacgacaagcttatcggagaaaaagaaacgggtaaagaaaactacacagctaccttcgatgtgccctatgaaccgggaactttgaaagcggtgaactcaaaaggtaaggaggaattcgtattaaagactgccggagcacctgcggctatccgtttgattgccgaccgcagtaaaataaaagcttgcaagaacgatctttcctacgtcaagattgagctggtggacaaaaatggaaacgtagttcccgaaacctctctgcctgtcaaaatcgaatgtacgggtaaaggaactgtcatagcaggtggaaatgcagcctatgccgatatggaaagtttccgttcacttactcccaatacattccggggaaaggctattgccattgttcagcctgatggagaaaaaggcgacatacaggtgaaagtctctgcaaaagggttggaagatgcttccatagtaataacaacctactaaaaagcgatagtaagataagttttgcgaagaaactggcataaacctgcataagtacttaggtatacattttcttgtatgttatctttgcagggtttatgcgattttttctgacgcagatattattatatacaggtgctataaaacaagataaatatcagaaaagataataaaagaagctaacttaattttttaactttaatctagtaagatgatgaaatcagtattagtaagaaacaatcggagagtccttgccggcctgctcgtttgcactggttttatttgcaattatccctcttctgcctttgcggaatcggataattcttcagtgcaaataacgactcaaagtacaacaccgcagaaacgtactttggtaggaactgtagttgactcctctaccggagagactttgattggtgtaaatgtgaaagtgcaaggtgaagatggaggtaccattaccgacattgatggtaagttccagatttctgtaaccagcaaaacagagctgatattctcttatatcggctacaaaacacagacactgatggtaggtgacttgggtgtaatgaccgtgaagcttgcatcggacaatgaaatgttggatgaagtagtgattgtaggtcagggtacacagaagaaagtatctgtgacaggtgccattgctacagtgaagggagctacattaaaagcaccttcctcttcattgaccagttcacttgccggaaaacttgccggtgtggtatccatggtgaacagtggtgaaccgggttctacttccgaattttatatccgcggtatcaatacgttcggtggtgtggctactccgttgattttgttggatggcatcgaaatttcatctgccgacctgaaccgtatcccggcagaatccatcgaaagcttttctttattgaaagacgcttcggcaactgctatctacggtaaccgcggtgcaaacggtgtaatgctggtaaccaccaagaaggggcaggagaatacgaaagctactatcaatgtttcattggaagcttcttacttccgtccgataaatgtaccgaaatttgctgatggtgctacctatatgcgggcttacaatgaagcggaacaggccagaagtttgaccccgatcacttctcctaagtatagtgaagaccagatcctgaatacagaattgggtactaatccttatgtatatcccgatgtggactggtttgaccagatattccgttcgggcaattataaccaacgtgccaatgtgaatgtatcgggtggtggttcgcgtgtaacttactatatgagccttcaggctaaccatgatacaggtctcctcgatgcaccggactacttctataatcccaatattaaccagtggcaatataattttcagaataacatctcctataaactgaccaataccactaccattgatttgcgcatgatggcacagatcggtaatatgcaaggtcctaactataatataggcaatgacttgtacaagagggttatgcgtaccaatccggtggaattccccgcttattttccacagcaggatggggacgacggtttcattcgctttggcggtgcagagattaaaccgggcgttttgggaaccaatccgtatgaatatatgatgagttctttcaaggaagtaaacttcaataccctgaatacttcattggctttgaatcaggacttgagtgttattaccaaaggattgagcctgaaagcactggtgaattttaaaaactggtcggaaacttcatatacccgtagtataaagtctaatatatataaggtgaaagatggttcctataatcctgaaaccggcgaatatgattatcagttgttgcaaaccggagatcagttcctgagccaatccggcattggtcgtaattcggaccagactttctacttcgatgcccgtctggactggaaacgtagtttcggtgatcacaacctgacagcaatggcaatgtatatgatgcgtgaatatcgtagtgatgtattgccgaaccgtaatcaaggttactccggacgtgtgacttacgattacgccagtaaatatttggttgaattcaactttggttataatggttccgaacgcttggctgccggtcatcgttttgagttcttcccggctgtgtcagcaggttgggtagcaagttctgaaaagttctgggagccgataagcaagtatatcaatcacttcaagatcagaggttcttacggtttggtaggtagtgatgcctttgccagtggagctccacacttcctctatcagaataatattggtattggctcagcacacaacttctggaccggacttcctacgagtgaaatcagcaagaaaggccccggattctatgtattagcggtgcaggatgcaggttgggaacatgtgaagaagttcgatatcggtttcgacatgatgttgtttaaccaactgaatattacatttgactatttccatgacaaacgtgagcgcatcctgatgtcacgtgcttcctggccttctatgttgggatattggggatcaaaaccctggagtaatattggtgaagtagaaaaccaaggtttcgagttaagcctgaactggacgaaacagtttggaaaagacctgacgttagatcttcgcggtaactttacctacaaccagaatgaatataaatatgtggatgaacccagttatccgtatgtttggcaaaccaataccggcaaaccgttgaacactgttaaaggttatattgccgagggattgttcacaagcgaagaagaaattgccaattcgccggaccaatcacaactgggtgccaacatcatgccgggtgatatcaaataccgtgatataaacggtgacggacagattactactgaagaccaggtgatgatttcatcttatgactggcatccccgtatccagtatggcttcggtttgaatattgtctataagaactttgacttaggtgtgttcttcaatggttctgctaaacgtaagactatgattaatagtggaatcgctcccttcctttctggcggtggagatggtgaggaaggtgaaacactggcccgaaatctgatgcagtggattgcagatgaccattggtcggtagacaatccgaatccgaatgcggcatatccccgtttgggtttgaccaaagccgatgtaactaataacattcagcccagtacattctggctgcgcaatggaaacttccttcgcttcaagacgttggaaatcggctatcgcttaccttattgccgtatctatctcagtggcgataatttggcggtattcagccccttcaaattgtgggatcctgaactggcatggaatgcttatccgttgtcacgcacgttcaatctgggcgttcaatttacattctaagaaacaatctaatacattattgaagtatgaaactaacatataaaatatcccgaatggcgcaggtattgatagcttcctgttgcttggtatcatgcaattatctggatgtcattccgcctgcacaggctgattttaaagacaccatgaaagatgaagaagctacattgtctttcttgtatacttgctatggcggtactccgcgttctactccttatcattatcatgcttttgagcagtcagctgatgagattattcagccttatgcttactccaactggcagcaacaagtggcgtggggaactatttctccggcatattccaacagttggggaggtgatgatatgaatatctggattcccagttataactggttggggtatgtacaccatttcctgagcctgattgatgacttgcaaccggtgggagttacggcagaagataaggaagagtacaaaggtgaatgttatttcctggaggcttattatcatttccgtgtgcttcaggctttcggtccctgtcctattattcctgagaaagtggacccgaatgttactagttcagaccttcccggacgctcacacttcgactactgtgtgaattttatcgtgggcaagctggatgatgcagcccgtgcgcttcctgcaacacgtcctaacaatgaattgggccgtgctacttctactatggctaaggctttgaaagcccgtatattattgtatgccgcttctccgttgtggaacggttcgttccccaatccggaatggaagaataagaattatgagacagacggttatggtaacgaactggtaagttccagctacgaccgcgagaaatggacacgtgcccttactgcttgtcaggaagccttgactgctgccaaggaagccggttatcaactctttgacattgaaacggcaaacaagaaagctgaccgtgacggaatagctcttcctttcatcccgggacgtgaagaagacactgaggaaaaccgtgagttcaaagaacgtgtacgcatgttccaatatatggttactgccaacgaaggcgataataacaaggaactgatttgggcacaacgtattgaactggatgcccagaatggtggagaaggtacggattgtcgtttgccgaacaaagtggtgaagagaagtaacggtgtttatgtaggaggttgggcagctatggcaccgacgttgtattctgtacagcatttctatactgagaacggtaagttgccggcacaggaccccaatttctatcctgaggaagaatggtatacccgtttctatgaaggcgctcaaagccctgctctggcaaccaataatctggacggtgaagatgtgaagaatgacattatcaagatgcacgctaagcgtgaagcccgtttctatgcatggattgtatttgacggcactcaatacagctcgaagattaataatggcaatccgttgtggattaacctgaaaaataccaatacaaacggatataacacaagtaatacccgtaactgtgctggaagcggttatctgtcgaagaagttcatcgatcccaacatctattttggcgccgatggtacccgtcagcacacagctccccgtcgtccgttgattcgtatggccgaactttacctgaatctggcagagtgctatgcagcgttggataatgaaagtgaagcccttgctaatctgaatgagattcgtcgtcgtgccggtatttccgaactgactggaagtgatgtaacaggcagcatgactctgactgactgggtgcgcaacgaacggttcgttgaactctttgaagagggacaccgctactatgacctgcgtcgttgggcaattgctcctcagatgttgaaagccggtatgcgttatggcctggatggtcttcgtgtgaatccgagttttgaggaattcaacaaacctaccttggttaaccaaccgttcaagtgggatgacaaactgtatctgatgcccgtttggtcaagaagtgacatggatgagctttacagtaaccctcagttagtacaggcccccggatattaatcaatctctaataacaaagctttatgaaaataagaacaatattgttgatgggcggcctggtgctactgggtgcctgcagcgaatcaaaatatgatttggaccaactggtaccggaagagtaccataaaatactgtatgtgaataatagcggtaagcaggatcttacgttgtatgatacggatgaagataataagtatactctttccgtagttaagtccgggagtgatcccagtctgactgccagtgtcaaagtcagtgtgctgacacaagcggaacttgacgaggaatatagcgaaccggaaggaacgaactataagctgataggtgagaactgttattcgctggatgcaaccacgttggacttttcatctgccgaccggtataaactggtaaatatcttcctgaaacctcagagtgtaaaagcattcatggaaactgatccggaagccgtatgggtattacctttacaggttaccagtgaaacagactccatcaatgccgaaaagaatgaattgttcctgaaactgacaggagtgattacgcctgccattggctttgccaattcggatgtagaagtgaaactgttggattatggttctgtctctacatttacggagaaagtaaaattcggtcttgatacagataataaatgggatttggagtgtaaatttgtagttgataaggaatatattgccgagtacaatgcagacaatggaactaacttcaaggttctgcctgaaggaacttatactgttccggagatggtaacccttcccaatggcgctacgaatatggaactggaagtcacgataaatggtgaccaattggtaccgggtgattatatgctgcccgttaagattgcagaagtttctcaatttgagatttctgcggcgaaggtggtatctccgttggctttccgtgtgatgggacataaactggatcgcgcaggctggacggcagaagccaataccgaagaactgacaggtgaaggtgcaagcggcaaagccggatgtgcattggatgataatcttgcgacttactggcactcaacatggcagacaggaaactgggttagcttcccgtttgaaataatcgtagatacaaaaacagaacatactttcacccagtttgctttgatgcaaaggcagaatgaaagctatacggacaccaagtctggtaagttctatgtaagctctgacaaggagaactggacagaagtaggacgattctctatggagaaaatacttgatagacaggtgttcggcgttactccgacgaagggacgttacttcaaggtatccatcgaagagagttatagaggtaccaatgcttctttgtccgaaatatatgcttatgctttggaataagcagattgcaataactgatttgtaacaatagtgaaagagagatagggactcttttccctcgaaagagagaaagacgaactatctcttttttattcagtaaaatagaaaaggatgagatacaaagtgttattactggtctttacagtagtatgtgcttcgtgtgcacagcgtgcggacataaattacaggattgttaccggacaacccttgcaggtgatggaacatttcggtgcttcggatgcctggagtatgcatgttttgggaaaatggcccgaagagaaacaaaaacagatagccgactggttattcagtactgaaaacgacgcgaacgggaagcccaaaggtatcggtctttccctgtggcggttcaatctgggtgcagggagtacggagcagggcgacgccagccagattggttctccttggatgcgtaccgaatgtttcttgcagccggacgggagttataactgggataaacaggaaggtcaacgtaacttccttcggttggcgaaggaacgcggagtcaataaattcctcgctttcctgaattcccctcccgtttatttcactcaaaacggacttgccactaataccggacgcgatggtacactgaatctgaaggatgaacactatgaagactttgcccgcttcctggcaaacgtgataaagggagttgagaagaaagatggcatcaagttcgattatctttctcccttcaatgaaccggatggacactggaactggatcggtcccaagcaggaaggtactccggctacaaagaaagagatagcccgggccgtacgtcttatcagtaaagagttcgtaaaggaaggtatccatacgggaatcaccatttgtgaagcatcagattaccgctgtatgttcgctacccatatgaccgaccatgaacgcggatatgagatacaatctttcttctgccccgatagtgtggatacttatctgggcgataccccgaatgtgctccctcttatttcaggacatagctactggactactaccccgctgaacatgttgcgtgattatcgcctccgcttgcggaatacgttggatacatacggtgtggacttctggcagtccgaaacctgcattatgggtaatgacgaggaaatcggcggtggacatggatttgaccgaaccatgaagaccgcactttatgtggcgcgtatcattcaccacgacattgtttatgcaggcgctcgcagctggcaatggtggcgtgccattggcggtgattacaaagacggactgatccgtgagtatacagaccccgatttacaagacggtagggtggaagactccaagctgatgtggatattagggaactacagccgcttcatacgtccgggtgctgtacgtatgtctgttgaaactactgataaagaaggaaaagctatccgggatggcgataccgatcagcagggattgatgtgttctgcctatcggaataccgacggacagtgggcgatggtcgtcatcaactatgccgaccgggaacaggaattcactgtcgatgtaaacgatccgaaggtgaagtcatggcaaggttaccgtacgtcggatgtagccggagaagaccttttgcctgttggaaagttgaagaataaaaaggtagcggtgatccctgcccgttcggtgacaacatttgtttccggaaactgatgcgtaataaaactttagttatcagtcccgaaattagctgagaattgcgattatgaactgaaaagtccacctatttgatgcttttatataccctgttcttggaagatatagtttatttttgcatgtggaacattatatatatatctaataccgataaataaacaggcttatgaaaaagatttttttacccttcgccgcagttgcccttttgttgagttcctgtaaggacgctgagccgaaggaagaacttgtaatcaacctacaagagaaaggtgctgaagtagcgccatccatgtatggcatcttcttcgaagagattaaccatgcgggcgacggcggcttgtatgccgaactggtgaagaaccgtagtttcgaggaactggaaatgcccgaaggttactatgccgagggcgatgtgctgcatccgaagaaagtgtgcaatcacatttcgggtgaagtgagagaaggaagttttcgctggactaccgaaccggtgccgggctggactctgagcacaaaggatgctgcggaaatgaaactgaccaaggaacaacccaagttctctacggctccgaacaatctgaaggtaaccattaaaaatgcttcaactcctgttcgcttgataaacgaaggatactgggggatgaatctggtgaaagacaactcttatcagttgcgtaccattatccgccctgcttccgattacaagggaaaagtgactgccctgttgctgtccgagcaaggcgaagtgctggcttccgctcctgttgatataactgctgccggacaatggaacgacctgagcctggcaatgcaacctacggcaacttctgccaaaggaaagcttgctttggaatttgatgctccgggtacagtctatgtagattatgtttctctcttccccgaaaaaactttccacgaccgtccgaatggactgcggaaagatgtagctgaaatcttggagggattgcaccccgcctttgtacgctggcccggtggctgtgtggtagaaggtatctcgttggagaaccgtttcgaatggaagaagtctctgggcgatcctgccgcacggtcgggagaatacagtacctggggctaccgttgctcgtatggtttcggttatcacgaaatgttgcagttctgcgaagatatcgatgcaaaggcaatgttcgtctgcaacgtcggtctgggttgccagtatcgcatgggagacgcttcaccggagagtaagatagcttactatctggacgattgcatggatgccatagagtatgccatcggcgacgtgactaccgaatggggtgccaagcgtgccgaacagggccatcccgaacctttcccgttgcaatacgtagagattggtaatgagaactggggcgatgagtatgacaagcgtttcgatatcttctatacagctatcaaagcgaaatatcccgagttgatcctgatttccaatcacggtttgggtggaacgggtaagattgccaaaacggatatgattgacccgcactggtacgtgaatccggaattcttcttccagaacacgactatctttgataaccatccgcgtggaaaatacgatgtctatgtaggtgaatatgcttgtaacgccaatgtaggcggtggaaacatgcgtgccgccctctcggaagccgcctttatctccggtatggagcgcaacggcgacctggtgaagatgacttcgtatgccccgcttctggagaaccggaacgaccgttcgtgggctgtcaacctcatttggctggatacggaccaggtacttggacgcagttcttactatgtgcaacagatggcggctgaaaaccgtccgacgtacaatgtgaagagtaatatgactatgagcactccacggatagccgattataatgaaggacgtttcggcttcggctcctggcatacacaagttgaatttaaggatgtgaaactgaccggagcagatggagcgcccattgatcttgatcttaacaaggcggtgaagaaagaaggcgaatggagtctggataacggtctgttgaagcaaacatctctgagagaaccggcgaaatacattgttgatggcttcaatggcaaccagtttacactggagttcaaggttcgcaaagaaggcggtaacgaaggtttcttcctctatttcggcttgtcggaggacagtaacaaaggctttgtatataacgttgccggatggaacaatggtacgacggctgtagaaggagttataggtggacgtacttccggtgtggcaggtgaccgggtatctcacagtctcgaaactgataaatggtacgacgcgaaactggtggttactcctcagaagagcgaactcttcatggatggcaaactgatattggcccatgccccggagacgactccgcttcagttcttctcttccggttatgatgaggcaaccggtgaggtgatcgtgaaagttgtgaactcagaggctcagtcctatccgttacggatcaaactggatggagtggatagcgtggagaagaccggtaaagtgatttctctgtccgcagccagtgacatggatgagaactcgtttgaagaaccaatgaagatctctccgaaggaaagcgaatacaaaggctttggaaagaacttcgattataccttcccgccattctcatatactatattgagagtgaaggcgaaatgataagcatagaggcgcttttgatgcaatacgtcatcaaaagcgccttttttttgacttatgccgtttgctgaaagtctgaaataggattgtaccgcagaatggaatgcatatacatgcggcagatttgcatgatttcttatccttatgcaagctttatgcaatgaatataggttttgaacagatcatacaggtattccggatgaacggaacaagtattcttgttgagtataacaagcattccggacgagcggaacatgcattcttgttgaacggaacatctattcttctgaaacggagcatctattccgggcaaaacggacctactttcaacataacaggattgtccgtatttttatatcattctattagttaagcagatgcgaattttcttttgtatatttccgatgtacctgtgcttcggggctaaagaaatgattctcgatggcttaggaatgcaaaatgtcacaatgtaacttcgtattccagacggttcatctcctggacaggctttgttttttaagcccggctttgtccggttatgaatgaaaaggcttatatttgcattaccgtaccttttttaatttaatatacttgacggtcaatgacaatagatctgaatttttttaataagttctttattgactatcagcagcgcttcgttcactttgcctgtacctatgtgcacgatgaagccgttgctgaagactttgtcattgagtccatgatgtattactgggaaaataaagaccgcctgcctgccgataccaatattccggcttatgtactgaccactatcaaacataaatgcattgaccatctgcggcaccagcaaatccggcaggacgtttcggatgaaatctcccaaatctatgcctgggaactgtccggtagaatcgttacattggaggactttgaaccttatgaggtctttacggcagagatacaggagattgttgataagactctggatagcctgcccgaacaaactagacgtatttttaggatgagccgttatgagaataagtctcataaagaaatcgcagctttactggaaatgacaaccaaaggcgtagagtttcatatatccaagtctaccagggagttacgcttggccctgaaagattacctgcccgtctctttactctttttctacctcaactgaaaaaagtttgtttttctactagggaatatttcccgtggttcgctattactatagatacacaaataaaagtatgtatggataaagacttattatatcgttttttcgaaggtcgtgcttccgtagaagaaatgagattggtgaaagaatggtcggaagcctccgaggaaaacagcaagctgttacgtcgggagcgcaagctgttcaatgccatcattctttcggggcgcctcgaatcatctgacggccaaactacactcaggaagaaaagaaaccatttcgtcagagagtttctgaagatagcttctgttgtcgcgataacggtaggcataacggctgcattgttttcaataggagaagataaggaggatatgaatgtagccatgcaaactattaccgtgccggccggccagcgtgtgaacctcgatttacccgatggttcaaacgtttggctgaacgccggaacgacgatgaaatatcctgtctcgttcatgaaaggcaaacgcgaagtgatactggacggagaggcttattttgaggtggcacacaatgagaaatcccctttcgtggtgcggacgcatgcaatggatgtggaagtactgggcacaaagttcaatgtggaggcctattcggcagggcgcacttttgaggcttctctgatgcagggaaaggtgagggtgaagtctcctgctaatgaaaagcttgccgtagtgcttcttccccattataaaacgactctgaaggatggcaaactggtggtgagcaagattgatgattataatgtgtaccgctggaaagaaggtttgtattgcttcaagaataaaccctttgcccggatcatggaagatctggaaagatattatgatctgaagattcagttggataagaagagcatagaaggcgtggcgctgaccggtaagttccgtatatccgacgggctggactatgcattgcgtgttttgcagaaggatgtagcctttacttaccggagagataaagataatgacgtcatttatataaagtaaatcgtagtattaaccggattaaaacaaaagattagcctatggaacaatactgatggaaaacaagaaagccgatagatgtttgccccatccaccggccctgattaacacaattcaatttataaatcgtattaataactcatttacaaagatatgaaaaacattcctttgtcggatatttattgccctaaaaatccgcaattaacattattatttagaattatgagaatatcaatattctttttgttcttctgtgcttttagcctgatggcgaagaatagtcactcacaaaatgcacgggtgacaatcaatcgaaccaatgtacaacttgaatctatactgaatgaaatagagtctcagacggattatctgttcatctataaagaagatgtaaacgtagaggcgcgcaaaagtatccgggcggataatgcaaaggtatcggaagtactgaatacattgttggcaaactctcctatccgctataagatggagggaaaccatatcattctgaccagacaggcagtgactgatgtacgtcaggctggcgtaacgggtgtggttaccgatgaatcgggagaacctttgatcggggttaccgttctggtgaaaggtggcagccaaggcagtgtgacagaccttgaaggtaagtttacgctggttgccaatgtgggcgatgtacttcagtttagctatataggatatgtttcacaggaagtgaagctgaaggatctgaaactgttgcgtgtggttctgcgtgaagatgccaatttactggacgaagtcgttgtaatcggctatggcagtatgaagaagaaagacctgacaggtgccattacccatgtgcaggctgaaaagatggcgaaagagaaaccggctaccatgcaggatttattgcgtagcgcggcaccgggactgaacgtggatctgtccaacgatgccaaaggcggtggtaatatgttagtgcgtggacgtcgctctctgaaaggtggaaccgggccattgattgttctgaacggtatgatctttcagggtgatctttctgaaataaatccggtggatatagagtctgtagacgtcttaaaagacgcatcatcggcagccgtttacggagcaaagtcggctaacggcgtagtacttgttactaccaagaaaggaacggaggagaaaccgactatccggttcgatgcaagcgtgggttttgtgaccatgggggctaaccgggaggtgtatagtgcggatgagtatttgcaatatcgtgcagattatgcggcaagcagcaacgggttcgggaatcaaggctattacgttaagcccacgaccgaaaacctgaataagtataaccttaccgaagcgcaatggcgtaactatgatgccataggacagggttccacgaatatggaagacatctggttgcaacgcatcggtctgggagagatagagcgcgaaaactattatgcgggtagaacatacgactggtatgatgcctctttccaaaccggattgagacaggactataatgtaagtctgtccggtaagacgtccaacctgaattattactggtctttaggttatctggacagcgaaggattggtggtaggagaccggtttaagaattatcgtaccaatttgcgactggatggaaagataggtaacttcatggaggcaggtgtcaatctgaatttgcagagtcgggaagaaggtttccagacggtgagttgggaaggacagatcgctaattctccttactctactccatattatagcgacggcacgctgaatccctggcctatgggagaaaagaatcaggtaacgggtgtgaatagcctttacaataactccatgtcatccaaagatgcaggtacccagaatgtgacggcgaatttctatgctaaattaaaactgcctttcaacatttcatatcagttcaactttgcaccccggtatagttggaaccattcaagatactggaacagttcgcaaagcgtctttgacaaagacaacggagttgcaggcagatcgacggcccgttccgtagattggacactggacaatatggtgaagtggaactatactttcgccaagaaacataatatagacttgaccttgcttcagagtgccgagaaatatgaagtatgggaagagtcaatggtagcttccgactttactccttcggatgtactggaatggcataacatgaagactgcgggcaacaaagaaatcagtgccaatgatacgaaacatacgggtgccgcattgatggcccgtttattctactcttatgacaaccgctatatgctgaccgcatctgttcgtcgcgacggtttctctgctttcggtgcttccaatccctgggctacattccccgccatagccgtggcatggagtttcacgaatgaaaagttcttcaagtgggcgccaatgagtagcggtaagctgcgtttgtcctggggtaagaatggaaaccgggatatcggtatttaccaagccttgtcccaattgcatggaggtacggccggcaaatatacttatgtcactccacaagggagtctgtatgaagtgtcttcattgcagattgaaagaatgtccaatacggatttgaaatgggaaactaccacatcctggaatgtcggtctggacttcggtttcctgaatgaccgtatcaatggtagcattgaatggtaccatatgcctacaacggacttgttggtagacagaagcttgccgaatttcacaggttatgcaaatatcgtaaccaatctgggacaggttaataatgaagggtttgaattctcattgaatacggttaatatccgcaataagaactttacctggtcttctacattcgggctttcacacaacaagaatacgattaagcatttgtattaccgttacgaagatatattgaacgaggccggagaagtggtaggaagtaaagaagtggacgatgtgaacaggggctggtttgtagggaaagatatttcggccatttgggatcatgaattcatcggcatctggcaggaagatgaagcggaagaagccgcaaagtacgggcagcaaccgggtgatgcaaaagtcagggatgtgaatggagattataagattacccaggaggataaggtcttcttaggtcaggaaacacctaagttcagatggtcgttcagaaatgaatttactttgttccggaattgggatatttctctcaatctttattctcagatgggacataagcaaagtacaacggaatatctgaacttctttgataatctgggtgattattcgaatacctataagcgtgaatactggactcctgagaacaaatcaaattcgtatgcccgtctgaagtcgacacgtccttcgaatatcaaccccaagaaggtgataaacaaaggctttatccgcctggagaatatttctgtttcttacagggtgcctcaacagtttgcacggaaactgatggctaaagagatcagtatatacggaactgtcaggaatgtggctgtctgggcctttgacaaagagtgggattattgggacccggaaacaaagggacttctccccagaacatttactttcggtgcaagtataacattttaattaaataactatcatgaaaacaaatctaataaaagcgatatatctgaccttcgggttatcttcattagcattaacgggatgttcggacagttggctgaaaccggaaccattatcattttatgaacccagtgtgacgttatccaccaaagaagggttggaagctgcgctcactacctgccacagacagatgcgttattattatatggaggataacgggcctgcattggctacggaaatgatattctcggatgtggctgtaacggctgtatccgactttagcgggtgccaggacatcctttcgaatgtgactcctatttctgagaacaattggttcggtacgaatatgattaattggttctggaatatgggtacacaaggtattagctttgccaatgtggtgatttcgcgcatttccgagttggatttggaccagaccaccaaagaacagatgctatccagtgcttatttccagcgtgcctggcgttactatcatctgattttccagtttggtgatatccccttcctgtcgaaagaagtcacgactccgaagctcgactttcgttccacaaagatggaagtggttatcgagcaaatgattaaagacctggaatatgccgtagggcatatcccagatcaggttgactatggtaaagaaaacaagggagcctgccggatgctgcttattaagtattacatggcagccggggattttgacaaggcgcttgaacaggccaatgcccttattgacgcttccggatatgaactgatggaaaatacatttggcaagtgggagaatccttatccggaacatcatccggtgacacgcaatgtgatctgggatttgcatagaccggtaaataaggcggatgcttccaataaggagaccatcatgctcatggtgaacagatatgataattcagaaagccggctcaatacgaattacctgtataatatgactccgttctggtcgcaaacagatgtgaacagaggtatcctggtgcccagtaagtcgcagtccggtatgacgagacagtctgctacggcgggtatgctggcacaatatcctgactttttagattgcagggcgatctatggacgtggtgaagcgttttcaagacctacttatcatgcggaaaaatccatgtggggtgataaaaatgatctccgacacagccgggaagccggtaactggttcgtgatggaggatctgaaatataatgatcctaaattattgggtacggatgatgctgtctattatctgaaacctatacagaagtatgcggatgacggcacgctattgtgcaaggataccattcgttgctggttcgattatccgtattataaattatgggtagaagatacggcgagggaagtagccaatggatattcgggtacggactacgttggaggttcgggcgactggtatgtatatcgtcttgcggaagcttatctgctgagggcggaggcttactactggaagaaggaatatgcgaaagctgccgctgatgtaaataagatcagagaacgtgccggatgtacggatttgttcgatgccggcgaacttaatggattggacgggctggacgtgattatggatgaaagggcccgtgagctgatgtatgaagagttcaggcatgtggaacttgtacgtgtttcgtttataaaagagaatcaggaagggaattacacctctccgaaagatcttgcagacgaaagtagtaacagttattggtggcacagaatcacggaatataataactattacaataagggtgtgaaaacgcttcataatgatgaatacaaaatagggaagtacaatatattctggcctataccgcagaccgccattgatgcgaacttgtatggccgggtaaatcagaactatggatattccggttatgagctgaatgaaacccctattgcttcacaagaagagcaaatagcatccggccagtaataaaatgagtgtctcataatgaagagattgggcaagtttattatctttgcttgcctaatctcctttataaccccaaaaacatcacgtatgaaaagatgtagaattcacattttatctgttttgcttatctgtctttcctgccctgctctgttgtatgcggctacggaacatgctgtatctattgaaaagctcaaagtggaatatgccgaaatgccattgggtatagatgtggaaaagccccgcttcagttggcagatggtaatgcagaataccgaaagggggtattcgcagaaagcctatcagataacggtgactgacgaagctggacaaacggtatgggacagcggaagagtgtcgagtgacctgtcgctgaacattgaatatgccggtgctcccctgcaacccactacctgctatttctggacggtaaacatatggaaccagaagggtgagcaatcttcctcgacctcctggtttgaaacgggactgatgagtaaagccaatccgtatgagggatggagtgatgcgaagtggataggtggcggagatgaagacatggtgctctattcccactatcttccggtgttcaggctgaacgttgcactccggttggataaggagacaaagagtacccgtgcaggttttgtctacggagcgaatgataaacgcctgatggataagaataagaacttgtatcagttgcagaatgggaaagatgagtcttacataaaaatagaactggacttggattcgcttgcttcgggtaaaaaggcgatgttgaatgtatatcgtgtaggataccacccggatgatcggaaagatgttcctttcaagagctttcccatccccctgacattgattaatgaaagtaataagtatgaccggcatacggtgagccttacttctgatctgggttttacaagattctatgtggataatgctgaagaacttggttggataaatctgaatccgctggggcagggaggtgatttcatcgctttcccggtagtgggcgacatcggctttgatgttcccgccgggcaatccgctactttcccggaaatggagattgccaacttcagaagcccttcgaacgtgattgctacttgccgggaaggaaatagccggatagccggcggcacttccggtgttcttactatattcactcccgaaggaaactccgcaccgatgcttcgtacggtcttctcttctcccgatgcggagattgtaaaagcccgcctgtatgttacttcacgtggcatttatgaggtctatctcaatggtaagcgtgtaggggatgattattttaatcctggagttacccagtataacaaaactcatctgtaccagacgtttgatgtgacaaagtacgtccattccggcagaaatgctttgggtgctttgctggcagaaggctggtggagcggtggtgctacttttacgggagataactggaacttcttcggtgaccgccagtctttattggcaaagctggttatcacgtatgcggacggtcggaccaatgttgtggtgaccgatcctttgtcctggcagtatttcggcaaaggccccgtcgcttacggaagtttctttcagggcgaagtgtatgatgctttaagagaaccggcggtggaaggatggagcacggcatcttatgatgcatctgcctggaaaccggcccatgaggttgctttggaaggacatatcagtaaggcgggaaacccgaatatgccgtgggtgaacgattattcaggttttgaacttatcgggcaattcggccagacggtgaaacaaatcaatgaactgacggctctttcagtagaagaagtccgccccggcgtgtttgtgtacgacatggggcagaatatggtaggagtcccccgtatcagtttgtcgggtatgcagcccggaacggaaatcactctgcgctttgcggaagtgaaatatcccgatttgccggaatacgaggggaatatcggcatgattatgctggagaatatccgtgccgctatggctcaggatatttatatcgctaaaggcgggcaggaaaccatctctccccgtttcacctatcatggctaccgctttatagagataacgggtattgacaaacccttgcctgtggaatctgtgaaagggatagtgctaagctctatacacgaactggcttctcactacgaaacttccaatgcacgggtgaaccagctgtggaagaatatcacctggtcttcttacggcaatttcctctccattcctacggactgtccgcaacgcaatgagcgcttgggatggagtggggatatctctgtcttctcccgtaccgccacttatctggcggatgtaccgcagttcctgcgccgtcacatgcgtgccatgcgcgatgtgcagcggacggacgggcgcttcccggatatcgccccgctgggtggtggtttcggtggtatgctgtggggcagtgccggaattacggttccctgggagtgctaccagcaatacggagataccgcactgctgagcgagcactacacagccatgaagcgttatattcaatatatcattgaccaaacgattgagacggaaaccaacctgatcgtgcagacccgttcatggggggacctgtgcgactggctgggattggaggatgagaagaatgataagtccctggtatgggaagcctatttcatccacgacctggatttgatgacgaagatggcggcggctttgggcaagacatccgatgccgcatggttccgcgacttgcatgccgcccgaagggatttcttcaataagacctatatagagccggaaagcggaaaaacgatattctccgctttcatccctgacaagaaggggcaacctgtcgatatacagacttcgtatgtgcttccattggctttcggcattattaatgaagagaaccgtaataaggtgattgctaatcttgcggagacagtcagacgggagaatactactgatagaggccgcctgtgtccttcttactctcttatgaccggtttcatcggtacggcatggatcagtaaggctttatcggattacgggctgaacgatctggcttacaggctgcttcaacagacagattatccttcatggctttactccgtggaacagggcgcgactaccatttgggaacgtctgaactcttacactcacacggatggtttcggtggtaacaatcgcatgaactctttcaatcattattcttttggtgccgtgggtgcctggatgtacaattattctttaggaatacaacgtgatgaggcttatcccggtttcaaacagttcattctgaaaccgatgcccgatccgaccggaaagatgaagtatgcccggggatattatgattcgatgtacggacgtattgagagtagttggagagaggaaagaggcatgatccattacgcttttacggtacctggaaatactacggctacgctgtatttgccggctgcatcgttgagagatgtccgcgaaggggagaaacttatccgaaaatgcaagggaatagaatatattggtgaaggaagcgggcaggtagtcttgaagcttcttcccggtagctattcgtttgaggtgaagaaggaacacccgatggcggggaagaagaggaagaaaggtgagatagccagatctaaaggaactcattgaaaaaacaaactgaagattgtgggcaacttttaaccgcacggacaaaaaagtgctgataggtttaaatatgaatcttggttctcctaccagtttgtcttttctcaggaatcagggaattgagtcttcgagtaccgctttcagtagtttgaaacgattgagtaaattgggttatgtcatttaaagttaacttcttgcgaacaaggaacagacttttttcatcaagcaattgcataaatgaagtatattatacgggaatcctgcatatacatgccgctgtatatgcaggatttttctatttccacttttagagataaaggcgtatgttgctgaaatgttttaaaggcttactttcctaatttgttgtagcagtatccgctttcgcgttccacaccagtaacgcaagcaaagtagatagcagtgcagccccaatccagaaccaattgatatatgtgaaatcatacacatccgttccgtttactacagtcttttgcccttctatcaatacaccgctcatcacatcctgtaaccccgcaccgatgtaacttgcaattcctaccacacccaaagctgcacccgaagcattgcgcggagcaatatcaacagccatcagtccacccagaaagcaaatcagtactccgatgccaataccgaaaagtaccattgccagagcatccagccagaagtgaacaccgggaaccaacaaaaacaggcagagagccagtgtatttgtcaatccgaatatcagtgcgggaacatttcggcgccctttgaataacctgtcggataccaccccggaaagcatggttcctacaatgccgcataccgaactgatagagataatgaaactggcatccagcgtagagtaacctttctgtgcttccagataaaaaatcccccagctatttaccgcataacgactgatatacataaatgcactgctcaatgctaatatccagatggcagggattctcagtacagctttttgggcacggttgaactccgttgtttccaatgcactcatcactttcttttctttcggggcattgaccggaggaagccctttgctctgtggtgtgtcgtgaaagaaacgccagattatcaatgtacccagcaaccccactaaccctgcacccagaaatccgtaccgccagcccaatgcactcacaacggaagcgataatgataaatgtcatcgcttctccgatgttatgactggcactccagaaaccatagaacgagcctcggtctttatccgtaaaccaacgcgatagccctactacacaagatgccgctcccatagattgaaaccaaccgctgataccccataagatggcaaacagtatgaatgagtttataaaacccaggcaaaggtttatcaatgccgtcaccaacaaacctgttgacataaaccggttgatgttgctcctgtccgcaaggaaaccgttggagaacttgcctatggcatacgtgaagaatagtacagagcctataatacctaattccgtttcagagaaaataccttcgtctacaatcggctttttgacgacgttcaggctcagccggcatacatagtacatgctgtatccaagggttgctgccagaaaggtagaccattgcaatcgttttaaccgttgcttctgttcgggcaaaaaatccccgttacaaggtgccggagccgacaccttgtaaaaatcaatgatatgtttcaacatgcttttcttcttattcgtgcagtttcttttctttcaggtattgaagcagtagggcgggacgatccgtctgaatcagctttgctccctggtcaatgatccatccccaactttcatccggttgatgcagttctacggcacggtcatcatcgtgtccgccacagagttcgggccagagggagttgatgaaaatctttgcaccgctgtcacgtactttttttatcagttgttgtacctcgggactgtcattgttgaataccagttcaaaagcctgcggtttcatgtgttccaagtatccgtcgatggtagcttccgcactttctttatgcagttggaccacgggcatgaagatcatcttatccagcacttctccgttttcggctttcacccgttcgtagggcaggctggctttcatgatacattggtctaccgtacctgtctttttgagtacctcgtacgcatccttgaagtaatcatagcctttgtctacatttaccatgattttgcctttgcacagattcatgacttcttcaaaagtcggtatctgatgtcgggttttaatcccggcaccgtttcttaatctcatggctttcagttcagccaaagtatactcatccggacttcctgtaccagtcatggtgcggtttatggtcttgtcatgcattaaaaccagatgcccgtcttttgtcttttttaagtcgatttctaccatgtctgcgcccatatcgatgcagttctgaatggcttgcaaagagttctcgggtgcattgcgccagtcggcacgatgggaaacaatgagtattgaccggcttgcaggttcattgaagcacttttctatttctttgaagcgcccttgtgcaaatgctgccagaaagacggtcagcagtattgaaagtgatattattcttttcatcttatcttttctttttgaagtttaaatgattcgttgttattgtttgcgtgcgcttctccggtagtctccgctgcgcatagaccagccttgttgcgctccggttgcatgagttctcaatgcgtatactttgcccggttccgaggactttgtaacatctgcacagatgtagattataccattcttatcaatgaccggagaagaccagatatttgctcctaactgaatttccttataactcagtttaccttttgaactcagcacgtagaaatagcctttaccgtcaccgaagtatatgtttccgtcattgtcgatggcaggtaccgaacgaatttgtccctgagtcctgaatttccagatcaaatcaccgctttcctgagagtagcagagcatatcgccgtcagagttacccacatataattgtccgtctatactcaatgagataccggaatttgggaaagtggcagccgacttttgttgccatctcacggtaccatccggatttacagccattactattccaccgtcggccgtttcaccgcataaatagatggtgccgtcttctccgatagcgggaacggaagtgcaagtttttccatattcaagagtccactttttcgctccgtcagttttagcaagagcatatagtttgccactgttggaacacatatataccgcatcgttgccaatcacgggagtagattgtgtaacaccttcacagtcgacattccatttttcagtcatgccgggtgcggcatggatggcaaataactttctattggcagagaagtatactgtaccgtctttgtctatagccggacaactgaacttggccgttgcacccaggtcgaacttacccaacggatcggaggaatgagcggcgaatgcatacaagttcttgtcgtaactgcctatataggcggtaccattatcagctattgccgccgaagaacggattacatcaccggaagagtaatgccagacctctatccccccgttaatcacccagatattttgtccgccccgggcattgttcgcatcacagccgacgaaaacatttccattatcatcaatggccggagaaacatcctgaaaaccgcatggtgtctggaactcccatactatttcaggtgccatgtcagccgttgatttctcttttacagtgattgttttgttgaaagtatttgcattctgaactcccaggttatcccagacggataaagtcactgtatattctccggctgtggtatactccacagtgggtgattgttcttcagaagagactccattgccaaagtcccaggcccatttggtcacctgtccgtcttcatcaaaagacaagtctgtaaaggctacatgttgtccttcttctattgtgacttcactcgtcttgaaagcagccaccggctttatatttactttctcgtcatcgctgcacgatatccataaaagggcggtcagcattattatgattgtatttttcatctgtgtatctttttaattgtttttcaaatactctttcaattccaccgggtaatcggtttgtatgatacttccctgcttggcaagaaatgcctttacctgtttgtaattgtccgaggtaggggtgatactcgtatttatatagatattcttgaacagggagactccgtttccggatgccttagccagtatatcctctgtaaaggctgcactattgaactgtgccaccggaagtggtttgcagactgccaggtaattctccatatcctgcatttcataaatcaccggcagcagaatggcattcctgtcaagattgatcacttttctggctgtagacacatcatagaccgtgaacagtacctgagagagcattccatagcgcttcaccagattgtatacggctttatagtcggagatcttcacgtctatatctatatagattttgcctctggcagctaacaatatatccttgaagagcggtattttttcttctgtcagtgctccgtcatggtaaaggttatatgaaagcaactccttgtagttcagttctgatactttaccggtaccattggtggtgcgttcgattgtggcatcgtgcatgagtaccatttctccgtctttcgatgttctgacgtccagctctatcatgtctatctggttttcgatagccaatgtgacggctttgacggagttctccggtgcatctttccaatatccccggtgggcgcatatttgtacatgatccttgttctgcaatgaagtggtgatggaaacccgctgatcttcgctgacttccggatactcaacctctgaaggttgaggtccgggcggagtagaaggttcactttcgtcgctgccacatcctgtgagcagaaacagagaaaagaatattccgattatgcagactttgtctgttttcatgattcgttccgctttaatcatttccaattcggattctgctccagattcttattcagcatgatgtcgcccgaaggtatcggatacaggtaatcacgcgtctcatcaaatttctttgtgatattcagaaagccgaccagataaccatggtctccctctgtgagctggataacaccgccaatcttaatcttttgtttggctttgctttccggagctttatcatcatagagcaaaagatcgattgttccatctccgtccagatcgaattcgcccaatgaggggaaatacataccggtgaagtggggttcaagcagttttcccattttccagcgcatcaggtcgtcatagcggaatccttccagtgccagttctacacggcgttcgcgtctgatttccagaattacccctttattgtttccacttacattgggatattcacttgccagtatcttatcggggttagagttggctatgttctgattcaggttaggcattccggctcttgtacgtatcggcctgatggatttgtctatatcgtcctgagtcaatatgtccagttccgctttggcttccgcatagttgagcaggacttctgcataacgtataatggctatatcctgataagaagctccgtctccgtcctgtgtttccttggagatgaatttggcaatctggtaacctgtcatggaggcttcgagatcaggtagcaacggcttgtcgctgtcaatccgggtatagccgacggaacggatggtttgcgccagacgtttgtccctgttcttcatttcatcgctgaacatcatggttgcataccctgtttgcgaggtgaatgccgtgccgttgtttagcaggtaggagtttacaaagtcttttgtcaaacctacatcctgttgggtttttgagaggaaatagtagttcgtattatgcattttgttcaatgtcagtgaataacgcctacccagaataacttctgtttccttcaagtcatcggaagcaaacaaatccctgtaatcaatatcggagttacccgtggaatataaagtgtatcccgattcgttcatgactctttctgccgccttatatgctttctccaatagtttaccggcatcaggcagattcagttccgtgtgatatttgcggtaggtaccttcatagaggcatacacgtgagaggaaggccagcgcagtccatttggaaatctggtcgggtttgcgggtagtgcctaaacggtctactgcaatctcaaggtcttcaatcactttgtccattataaattcgcgtgaatctctgggcttgtatagcaaatcttcatcatcggtctgaatctccgtatcataccagggtacaccaccgaaactctttaccttatcgaaatagaaccaggctctgaagaaacgtgccacgccttcgtacttcagtgcggctactttgtcttcgcagcgtgtatagttgtcgaagaagatatttattttccgaagagtactccaactccaaccgctactgccggcttccgatggaatgtctctttccggactccgttgttccataggtacattgctgtagagtacgttgtccgagatattgtctcctctgacgatatcattgattttaggcaggttctcatagaaaccatttgtgtacaattcaaggtcttgtgcagacttgaaggaattttcaggtgatatttccgcaatgggatatcgatccatgaacgagttgttgcatgaagcggcacttatgcctatcgcacacaccacacaaacttttaatatattgaatgtattcatagctgtttcctctttaaaatttaaaatcaaaaccaaaggcaaatgtcttgctgaacggataggcgttgccatcgcccaattgttcaggatctacggtgcgatcctcattatgcttgtacaacggggagaatgtcaggagattagtgcctgaaacataaacccggatgctggagaaaccgatcttgctgcaaagtgttttaggcaacgtatagcctaaagtgatatctttcaaacggacgtaagccgcgttttgcagatatttatccgaataaacccttagctgggctccttcgtagtcaccgccttcgttggctgcatacacggccaggcgagggaaatatgcattcggattctccggtgtccaggagttctgttcgatgctcttcggataaaaattctcatactgacgggtaaacggtccccagaagaaactgttgtcttttcccggccaccagtctcttttcattattccctggaagaaggcggaaaaatcgaaaccactgtaattgaatcccaggttcagagaacaggagtatctgggagatgtgttaccgatgatgcgtaagtcgccgggattggacaaggtcttgtcgcccggagatatttcttcatttccatccaagtctttgaatttgatatctcccgctaccgggtgattaatcagatagttgcgctggattcttctgtttactttcgtctggtctgcatgatccaggtattccgtatctgtctggaagaagccctcaactgtatatccccagatttcacccaggcgtttgcctttatagaactggtctatctggccgtcggggttatcgaatttggtaatctcagtgatgttgtcggcaagagtgaaccctaccctgtattcgaatggcctgtgtgccaacaggaatttgtcttgccatttcacagagagttcaaagccccgtgtgcgcaggttggcggcattctcctgtggttcggaagttccgaatacggacggaagttttttgccttgtgtcagcatgtctttcgtatcacgttgataccagtcgaaagaggtagagaaacgtccgttgaacagagagaagtcaattccgaaatcaatggtctgtgacttctcccaggtgaaatttgaggaaatggcatcaggagcagtcagataactcaggtacgagccgtctaccagataatctccctgtgtaactttcattttagctatatagtcgtagggacctacattctggttacccaatgtaccataagatacacgcagtttcagattgtctatggcagacttcaaaggcttgaagaaaggctcctcacttacacgccatgcgaaagagcccgatgggaagatgcccagacggttattgtgcgggaacttggaagagaggtcgaaacgaccgttgaattccagcaggtagcgtcccagatagtcatagttcagacgatagaaagctgcacggatggcccattcgtccgcatttccctgtacttgtacattctccccggttgccaggttgaaggaacccagttcttcggatgcaggcgaactgcgtcttgaaacggtacgttcccaatgcctccattcctggttgaaaccgatcatagcttttaagtcatgtttcttggcaaacagatggctgtaggtaccgaaagcattgaatgcctgatagagggttgaccaatgcatttccttatacagtgatttgttaggcatgtagcggcttgttccttcaccgttcggctggttggtgtgtggagtggaaactagcagcagtttggatacggggctgcctttccgaaaactgtagtcagcattcagtatcacatctttaataggagtcacctgtagtgagatggtatttgaaacatcatgttcctgatccacacctttactctttccgtatgtcaggtcggcaaacgtaccgtctgctatgtcacgaccgggagtgtaagcaccgttaatcaggatggttccgtccggattgcgtggatggaataccggggaagcatggaaggtatattttctccagtcttcactgttgtcgctacctcctacattacggttgttggttgccggatagtcgtaatcactgaaatagatgttggtagagttggttatcttgatggcggaagtcaactgaaagtcaatcttactgcgtaaagtgtaactcttcaacttgtccgggttgatgcggtaaattccctctcttgaatagaaccttccggagaggtagaaacgtactttctcactacctccggagatattcaggttgtgctccatagacggctggttatcttggaagatgtagtgccaccagtccgtattcccatagtgtacatagcgttccacaccgtcaacggtctttatcagggtcgaagggagtgagggatctttcttgcgggcttccatataggcatagtcttcttcagtatatcccaaataagtactggtgttttccaaaagactcagtttatcgctcagacgcgcccattccagaccgtcggtaatgaagttatccgtgttgatggtagggttgctccagccgaagtgattggagtagttcacctgtatcttccctgcattcgggttctttgttgtaatcagcactacaccgaaagctgcacgggcaccatagatggcagcggaagaggcatctttcagaacagaaatggattcgatatctttaggattgatataattcatatctccttccactccgtcgataagtaccagagggctgccaccattgatagagcctaccccgcgtacgtcgaaagaagcttttgaattgatagagccgtcgctgaacgaaacatttaggttggggatcataccttgcagcacttgtcccgcattgccgctgacgcggtgttctatttctttagaggaaatttggtctacggcacccgagagatttgcctttttggtggtaccgtatccgacaacgattacttcatccagcatttcggcatcttcctttaatattactctggaaagttccttgctggatgccggatagctcaacggttgataacctatataagagatgctgacggtagagttctccgggacgtttgacaatgagtagtttccgtctacatcggtgatagtgccgttggtggttcctttcactacaatgctggcaccgataaccggttctccggacgaatcaactattgttccggtaatggttttggtcttctgactgacagcctctttgtgcagcaataccactacattgtcactctccatcttgtaagtcagttcttttcccgccagcactttctgcatggtctgggcgatggtggcattacttacgctgaaagtgactgcctgatccagtcctgccagtttttcattgtagaagaatttgtaatcactgacctgctcgatctttttcagtgcggcacgcagcggagtattttccacggtgacggtgatctgcgagaaaaggctcagtgatacactcaagaacaaagagaggcagagagcccgcatagttcttagatttttggttttcctgtctttcatatcaaataaattaaaagggtttgataggtatacaggttccctcatactgctgtccaagcgactctctgtttttaactcacattaacaaagagggacttatttctcttttaatacaatgacagagtcctttacttcgtaacggaacggagaggttaacattataatattcaaagcattctgtataccaccaccgggtattgttccggtaaaccgctcttctgcaattcgcggagagtcgatgtgtatcgtgacgtcataaacgcgtgaaagggttttcatgatattgtccagagattcattctggaaatacaggctgcctttggtccatgtcacgtaatcttcgggatagactttctcggtagtgaatttgtgggtggatttattatagttcattttctctccgggtttcatgatcagggaggaagaaggagtatgcacaccgacttttccttctagcaacaccacagttacatcctgttcatcttgataagcgcagacgttgaatacggtgcctaggacctttacttccagttcgcccacttggacaataaaagtatgacgggtatcgtgtgctactttaaagtagccttcaccgtccagttgcacccggcgttcgtttttgccgaaatctctcagatagctgagctgggaagcggagttgaggataacgtccgttccatcaggcaatactactgtggctttgtctcctttatcggctttcactataaagggtgattggatatcggtgtccgaaatactcaggatgttgtaagtaaagaaagcgatgaaaatggggatgcagatcatagctgcccatcttgcccaagcgggaacgagagcttttcgcggaggacgtccggcaggtttcgtatcagggatgcggacagattcattgaggacttccgtcttgatccgtgcgaacatcttgtcgcgcagggcgagagggatgttagtgtcggatttttcaaattcctcttcccaccagtcggacagttgtacgttgttgcgtatccatccggccagttcgctgatttccgcttctgtgatgtctcctgcgaaatatttctcggctaagttcttataatattctttctccatcttcttacttatttatatagtatacagttatccttgttttcgtatccaaacgtatcgggcattattgcatttcgttaacaaaaaaggtccataagacaagaatcagcttatcataatgctttgcaaattgctcgcgcatgaatttcacggcaagtgacagttgcgtggcgactgtactttctgaaatacccatcttctcagctatttctttattggtatagccctgacgtttgctgagcagaaagattttcttgcgcgaagggggcagttcttcggccagcgaatcgatatagtcgttcaggaagcgcaggtctgtgctttcttctgtctgatgatcccggtagggattgcttttcagcaggtattcggtatagatgtattccactgtctgatgctggtacatattcatcgacagattacgggctatggtgcagaggtaagaaacgaaattttcggtaggatccactttctcacgcacttcccacaggcggataaatgtctgctgcactacttcttcggccatatactgattgccggaagagagacgcatcataaagttatagagtttgccgctatacagattgtataacttctcgaatgcagaaaaagaacccttcttcagtgattgtagcaattcacttctattttcgtttgcaatcatatattattgatttaggcttcaaaggtatgccttgtgcttacgtaacaggttgcaatattattaataatttccggaattaccgaatagcgggatttctttttgatttgttggtggcttgtaaccgtatggcttggtatctaaatgctattttatacagctttattttttgtacacttttcctttgtaagatgctgattaatagagtttgtttgtagtaaaagtgtacaaaaatgaaataatctatttgtttggtttttgctgtccttgcttgtcagaaacacactgataagactcttatatagttttcaaatgactacggttaaggtatgggcataaaaaaaggagtaccgctgtactccaacctttgttaaccttaaatctaatactatgaaaaaaatcacatgacaaatataggggttcatcctattctctccaaatatctgttagtgtttgacattccttttataattctttcacggatattcactgttttcgcacacgaactgtctttttgagataatatagggatggatagtggctaaatgattatcgggcggaaaggggaataaccatagtacataggtgacatacatgtataagatacgtttattttgctatatggataatcgcatgttgattactgtcggtaagtcgtttgactattgtcagcaagcatgctgattactgtcagtaaacttactgacagtaatcaaacgctatggatgtcctatgcaaaataatataatgtattctagattagttgaatagctaataacccgttattgaaagatatccgttggcaatgttgcagaaagtatgtggatatacccttccactcgctaaggctgatgggtaaggaaatacgggggtgtggaagggtatgaaagaaaggaaaagttgcaaatctgtttcattcgtttcacagaacctttcaccccccgaaaagagttgtaaaacgtgtaatttcttcaattataataatatatatttgcctccatacaaagcaaagctatgaaggttcgcgtcggtttatatatacttttgatactctttcttttgatatcaggcaaagaagaggcgcgggctggaagatatgcggcgaaaggagatacttgtagagtatcggaccggatgaatcagccggaaacctggagcaaaatttaccaatgggtgatggacgacccgcaagtgccggataaagaagatgtgttgatgttgatccggtatcacttcgggaactttgaaaagctgagaaagctgttgcgctatttggatggtggcagaccttacgtttatttatcggaacatcagttccggaagatagaacggacagggaagatgaaagacagtttgccggtagctgcattaacattgcctgcgaatactttgccggaggagcaattggaaactatagctttcgctccttggcttgaagtggaaagtaagcgggaaaccccgcacagaacagtgcttgcattgaagaacaatatactttatgatttagctttggctccgaatgtggaggtggaattgcccgtagggcagcggtggtctttgaatatggaatataaatgtccctggtggtcgaacagcaagcatggcttttgttaccagcttctttcgggaggcgttgaggcacgttgctggcttggaaaacgcaagaatcgtgagcggctgacaggacattttctgggaatatatgccgaagggggagtgtacgattttcaatttgacaaagacaaaggatatcggggaaactactatgcagcttctggtctgacgtatggatatagtcatcagctggcacggcatctggctcttgaatttagtttgggtattggttatctggcaacagaataccgcaaatacaccacttacgaagacgatttgatatggacgagcagcggacgctatcattttatggggcctacaaaagccaaaatctctttggtgtggctcattaagggaaggaggcgatagctatgaggtgtacgcaatatgtgtttcttttacttctgttcgtgctgtcggtgctgttagcaggatgtgatttcagagacatactggatgattatcccgtcagcggagtaaagataaagtttaactggaagggagtggataagttgcccgaagggatgagggtgattttctacccgaagagtgaagaaggtagaaaggtagagagttatctctcggtggaagggggagaggtgaaagtgccgcccggacgttatgacatggtgatctacaattacaatacggagagtgtgttgattcgcaatgatgatgcgtatgagacgattgaggcttatactgattattgcaaagggcttgaaacaagtgagaagatggtgtggtcaccggaccctctatatgtagtaagtatgaatgatatgaggatagaaaagagtgaagatgtgcttttgatggagtttcaaccgaagctggtagtcaagaactattcttttgaaataaaggtgaaaggattgaagaacgtggcaagcattgtttgtaatgtggatggaatgaatggggcatattgcataagtaatggctcatgtacggcaagcattgcccctatctatgtggaagctcataagggagaggatgtgatacgtggtagtttctctgcttttttctcatcagagtctgcgaatacacgttttaccgagggggtggtgatgaagctattgctggttaaggtggataatacggttcaagaaaccaaggttgacatcacggcggctgtagttcctcccccacccgaggaagaagaagatccggtaacggatatcgagataccgattgaagaggaaattgaagtggaggatgtggaagttcctcccggtggaggcggaggtattggcggtgatgtaggagactgggacgacgaaacgaatgttgagttacctgtaaattgaaaagtaaaacgaacaaaatattaacttataaaacaaacgattatgaagaagattttattggcagcagttgctgcgttggcaatcgtaggttgctcacagaatgaagagattgagaaggctggtgaaaaggcggagattaactttagtacggtagtgaagggctctacaaaggcattgataatgaccactgataatttggaagattttactgtaaatgcctatagaacgaaagatgatttagctgctggcatggatctcacagagtttatggcgaatttgcaagtaaaaaagaataaaagtactagtgcttgggaacatagtggtactttttattggccaactgcggataaagttcatttctttgcaacttcaccagcgcaaacatttgaaggaactcaaggttatcctacattctcttatacagtaaaaacagttgctgctcaggaagatttgatcgctgcaagcctccctgaccaagtaaaaggtaatggagctgtatctcttacttttcagcatcttctaactcaagtgaatttctcaattaagggagacacgaaagattgtacgtattctgtaagtaaattggaactaacagaagtgaaagataaggcaacttttacatttgcaaaaacaggaacgggagcatgggataatcctacaagctcaacagatcctacaaatatgtcgtatgcatatactcctacttcaaatattgttgtagtacctggagaaaaacttgaagagacgacaaaatgtgaccctgataatacacatgctttatttatgctaatgccacaagatgcatctactataaagttaaagattacttatactgccactcttaaaggtgatactcagtctagttttagtggagagaaaacagtaactctttcgggtacttggggaatgggaaaaaacattcgctatactttgaaattaacgagtgatgctactgctgttacatttgatgctccgactgttgatgcatggggtaatgaagctccagaacctgatattactactcctaaaaactgaattctaatcctataacttctttccctgaagcctttcttcccacaaagtcttcggggatttttttgtttcttcccggaatattcttacttttgctgcacaaaacaaacaaaaaaacattcaatctgcaatgcaaacttactctgcatgtggtgcggctatatcgtgccagcagtgccctaaggctgtgggtaatgctatcatttatgcctctcattcaagaggcttccaccttccagctcaaaaatgcgaagaaaatataatgatttttttattagaaggagaagcacttgtcaatagccaggagtatgccggaaccatactgcgtgcgggggaatttattcttcaagccattggatcaaaatatgagatccttgctctgacggatgtggaatgtgtttgttatcgttttaatcagccagagtttttctgtgaggaacgttataaatacattatgaaagaaataactccaccgctgatattcaccccattaaagattattccggaattgcgtttctttctggacgcttccaaagcctatctggcgaaagagaagatttgccgggaactgctttcgttcaagcgaaaagaacttgcctttcttttaggagaatattactccgattatgatctctcgatactggtacatactctttcccgttatacgtccagctttgagtattttgtcctgcaaaatcatctgaaagtgaagacggtagaagaattagcccaattaggcggatacaccgttgttaccttccggcgtatcttcaattctgtattccataaacctgtttatgaatggatgatggagaagcgtaaagagaacattgtttatgaactccgctatacggatgccactatttctgagatctgttataaatatggtttcgagtctttgcctcacttctctaacttctgcaagaagaatttcgggacttcaccccgtggcctacgttcagtgcagtctgttcctccacaagaaacgcaaactatttgtgaagaggctggttgaagcgatacttcactgagacaatgaagtagctgcctatctgttgcgtatggttttcataaagtccgtcggccattgtgcctcggaaataattcttttgttggctgagtatatccacccagttggctgatatctcagcctgtttctttttcaggaatcgccatgtgatacttgcgttccagacaatctggtcgtcttctcccttttttatgtttgtaccgtttcggaaagaataatttgcgtctgttcttagttgtatacctcccggcaaatcggcaaaaccgttcaatccgaaggtataattgcgtgtgtatgtatccgtctctaaaagtgagttggaagaatgttggaagttccacctaccgtttaagtccagattaccccatttaggttggtaggataggcgcaggtcactgttgaggccggtgttatgcgtggcactgcgttcaggttgctcgctctggttttcgttgatgaggttgacatcctgtgcaaaggaacctccggcatttgcactcagattaaagtccttgatgcgcttctgataccggaacacaccgcttatgttccagttgccgttaatatttaccggataagtttcacgtccaccggtttgctggttgtagatcactgcacgggtctgactattgattctgttgttccagttcagtgtggcaaaaagtccttccttcgtattttgtgcttccaatcgtacagactgattgtaagtaggcttcagattaggattgctccgcgtgatgttgagcggatcactgttgttggttggtgagatcagatcgtataatgatggttgccaggtatttccataataattcagggttatcctgtttttctttttctgccatgagatgaaaagcataggctgaaagccgactgagtggagggtggtatcagctctatgcagacctgttttctggttcaggctgcgccgctcgggttgtacggatactccggcattgatgttccaaatggtgtcggaataattaaagtgcaggttgattccgtgttgcagggtactgctatggctccggttactcagactgtcgatgtagctcgcctcatatccttcgggcagatagccgggttgtactgcggtttcttccataaagccggacaggtcgtaggtattacgatcatttttctgcttactgtagttgaggttatatgaaatctgtgcgtgcagcttcttggaaaaaggatggctgaacatcagcccgatgccctgttgacggttgggggacaggttcgacgagtattggttacggtagagtatggagtcgtttcctgcactgtttttcagttgataatatgtagttgatgagatagagaagttattgttgtcattcttgctatcattgtattgcgcagtcaggccgatagaacttccttttttattgatccggcgcatgatatttgcatggaaggaatatcggtgttgctctccttgcattagtgatcccatggcgatgtcattgattctcagttcatcgggtacatcgttgatatgactgaaaggatcgaggatatccagatgaggattttcattgaatgtggcctggcggttattattggcattattattccggacaaggctgaaattaccgaagaaattgacaaaagtcagggtatcgacctgccagtttaagcccaatgatgaattcatattgcgattgcggttcgtattgttgccggcagaatactggtacttattgccacttgtcagatattgctcattgtaggatgtcgaaatattgccctgctcgttgtgatgataggatacatttccgttgagtgttagtttctgattgtacttttgggtgaaatttacagcaacgttctcctgtatgttgtccttgtagctggtccgcatatggaggttaccggaattggcgatgactgagaaattgtttccgttatttttgaagtagttgccttgcaggttgaaatcctttttgttgttattgccgtatccggcttttcccgatgcaagaagggtaccattgaattcttctttggtttgcaggtcgagcacatagttctctttccccgtgctgacacccgtcagcttttccagcttgcttttcttatcgtacacttttatcttgctaattaactccacaggaagattttccagcgccatcttgttgtcacctgagaagaaagcttcaccgtttacgttgatttcgttaataggcagtccgttgtatttcagtgttttggtttcgctgtcgtattccattccgggaatacgtttgacaagtgtctccagatacgaaccttccggtgttttgtaagctgctgcattgatgacggtggtatctcccacttggtctacgtcgcgcatccgggcgtttactgtcacttcgcccaattcgataccttcttccagtaaaatgctgcccaggttgattgttgaagcgttgctgtccagtttgcggaagacagactgcattcccgtataagaggctttcagtaaatattgcgttcctttttgaggagtgaactggagattgaaacgaccgtccgcatcgcttgcaactccttttacaaaggtggaatctttgccttccaggataacaagacttgcatagggaagaggttcttctccttttttggtctctgatgtagtgcacaccagtcctttgactgtccttgttttttgggcgaatagaatagtcggaatcagtaagaatagcaatagtaaccagattttgtgcacgttcatgtctgtctttttatggcagtcacaaaattagagagttttcgtcataaaatcttctttttttatagatattatgctacttttgctcaatataagtgatacaatgaaaaccgacaaactaaaatatgttttagcctttatctttttgctgtgtgctttttggtgcggagtcaattttaaacggtggtacactattaaccaccggatagaaaaaatgatttctcttgtttattcttcctctccccagtatgattgttacggaaactttgaagaactcttggtgaaggagttcagaaaacaaggcatagaaccgatatttgaaaagttctatctggatttcaatacggtcacgccggaagatgggataaaaaatatggaggtatatcttgaggtaattagagataaaccgatagcactgatgctcactgtgggcgatcaagctgcgtctgctttgttttctacccgccatcggctactttcttccattcctgtagtagcttgcaacgtacattttcccgatgagaaacttataaaagaatatgagcgtagaaaggtatatgtgctgcgtgatgcaccggattttaagcgcaacattgattttataagggctttacaaccacatgtagggatagatgtcatttataatattgatctgactcctcttggatataaatcgtttgacttgttaacccggtttgcagatagaaaggaaatcaggcttttaggctatgagtctgccttttctgtggaatctgaatacagaaaattgcaggaaatggttgagcattataatttgatgcctgctaaggtaaacaatcatattgaaaaggatgagttaaccattagtctttgccctttccgttataccaaagggacttctttgtttgtagacatggaaaaatcaaaaagcggacagaggagagagttttttctgttggataagtttgatcagatgtcgcttccgatcactaaagctttaaatattccctcttttagttgcatccgccagggatttggggaggatgccaagattgtgggcggctacatggctactgatgagatttctgcgcgtactgcggctgatttttctgttcgtctgatgaataaggagaaaattggtatgccgaaaatcagggatatggaaaaggagtatgtactggattggacctatttttcatcctatacggactttgatgtgaaaaatgtacctgaagatgtccgtattatcaattactccttctatgaccggtatcggaaggagctttattttctgccaggattgtttatacttacttttattctggtattgatcagtctgctacgtatgcgccgacgttcgcgtgtggaacgtaagaatatggagatgcttgaggaaactcataggcggttgatgctttctacagatggagggcggatttcactttgggatatacagggagagaatatcgagtttgatgagaattatacgcgtttggtgggaatggaacagagaacatttgtacgaaccgatttcttgaagtatgcatatcctgatgatgtacctcttctgaattcattgtacgaaacgctgcatcaatctacggatatgcaggttcggcgtgtacgtttctctttcagtgaagaagattatcgttggtatgaacttcggtgtcgcagtctgaaagatgcaaagggaaggataatgctggcgggcattatgcaggatattcagatacaggtagagcatgaagaacagcttattcaggctaagcagatggctgaaaatgctgagttgaaacaatctttcctgaataatatgagccatgaaatccgtactccgctgaatgccattgtcggtttcaccaatttgttggttggcgagggtggcgatgagattgaaccggatgagaagaaggccatgcttgagatcattaaccgtaacaacgaattactcttgaaattggtcaatgatgtggtggaaatatcacgtctggattccggcaacatggatctcgaaataaaagaatgggatatggcaacggttgtgaaagagatttatatggcttatcaggcattaatcaagccctcgttgcagtttcatctggctttggatgaaaatctctctttgcctgtcaatatagatcgtatgcgttttattcaggtcatttccaatttcctgggcaatgcggataagtttacccggagtggttctattacattaggatgcaaagtggataaaaaagaccggaaggtcagtgtgtatgtacaggataccgggaaaggtattgatgagaaagaactcatgatgatctttgaccgtttttataagactgacgagtttgaacaagggagcggacttggactttctatctgtaaagtcattattgagaagctttgcggacgtatagaggtacggtctgaagtaggaaaaggaagtcgttttacggttgttctatctttggcggatgaggtataagacttctgacgggttctttaaaataatagccgaaacatttgatatcgctctcagggtattgtatatttgtggcattaatctttaaatatgagaacatacaaaatcagaacgcaacgattcattctacttattctactcctatcctgcattacctccgttttttcttctgattttttccaccggatagcagaagatgacggtctgagtaatagaaggtgtttctctgtccagcaagataagcatggctttatgtggatttctaccaaactgggggtagaccggtttgatgggaaaaacttcaggcattatcctttgaatctatttcccgaccaggggtataaccggataggggtaaattatctgcgttgttcactggatagtacactctgggtatttagcgaagcagggcttctttttcaatatgacgaacggaaggatgagtttgaactgatatatgctgtacgtgacttcttcaataatcattctattattctgaatgatgttatgttcgattcccctgaaacagttttcttgtcaacctccaaaggggttttgaagttgaacttgccggacagaatggctttactgcttcccggaaccgaagagttgtctgtaaatcaagtgaacaagaatgatgaccgatattatatttctacccgtgacggactttatataagcatcttcccccaaactggtcctatggaagtacgcttccgttgtctggaagggaaaaatgtattatcgacctatgtggatatggaaaatcgcagaatactgatcggtaccctggatgcaggtctgtatagccgttccttagaaatggaggacttacagaaattgcctctgccaattacgaagcccatacgctccattgtttcctatacaccggataaaattgccgtaggagtggatttggaaggtgtctttgtcatagataaggctaacctgacaatagataaacaatatgcctacaatgaaacgtcttccacttctatctttacgaataatgtgcggggactttttgtcgataatcagttcaatctgtgggtggcaacttatcacgggggaatctcttttcaagactcttacaaattgaattttgactatttccagcatcggacaggtgattcgcaaagcatcggaaatgatgtggtgaatgcagtgctggaagattcttcaggtaatttctggtttggaacgaatagtggtgtcagtatgctctcagtgcacacgcacacctggacgcattactttaacaggaatatttccggtgaaaaaggaaacgcgatactcaccattgccgaagattcgcaaggacgtatatgggcgggaggatactctttcggtgttgcctgcatcgactggaaaaggggagatgtgaaaagatatcacgttgaggaccggaatcctattatctccaccaattatatttactccatttatccggatggtgatctgttgtggtttggaggaattatgggagatatcacttcactgaatataaagaccgggctggtaaataagtataacataagtaaggtgaatcagtttgaaagacagtcggaccgactgctggtgatgggattgtatagcggactttttattctcaacaaagaaaccagtgagataaaatcaacagctatcaccaaagaagtaacaactatctatcggatcagggatggagcctactgggtgggaacaagaaactatggactgtattattatgatatggaaaacgattccatacgccagtacacagtggacgaccatctttcatctaactatatttatgggatagctcccgatgcggaaggtcatttgtggattgccacggaaaatggtctgaataaactgtctcctgatacgggtgttatcgaagtattcgacaaacaggacggtttgccatccaatcagttcaataagtcggcttgttgggtttgccgtaacggagatatactgttgggaagtaccgacggggctattttgttcaagccggatgagataagaaagacgaagcttcccacagattacgagacaatcgtttatcagtttgatgtgttcaacgaaccggtatattgtacggatgcatcaaatctgttgcgtgaaccgatctataagacagaccggatagaattgccttacaacaggaatttcttctctttccattttgttacacctaattatcagacaccgcaaaagacacagtattcttattatctggaagggcatgatatttcgtggtcgcttccggcttcgactcatgtggctacgtattctaaggtggcaccgggcagttacgtcttccatgtaaaatcggtgatagatggagtggatcagaaggagcggataatttatgttacggtggctgaaccgtggtggaatacgatttgggcacgcctggtctatctagctttgttttccctgtttcttttttatatttacaggatgatcaaacagaagcaggagaagaggaatacagaagtcaaaatagatttctttgtcaccacggctcatgatctgttgacaccgctcaacctgatacaggctccattgaaggacttggagaatgagattccgccttcgggacaaggcgctcagttgttgcaaatggccttgaataattcatccaagttggcgcattatgtggagaaactactggactttcagcgtgtatcactgaatgcaagccgattggtcgtttccaaacaaatgcttgaggttttcctgcgtcatcgactggattcctttaaattagtagcaggaaacaagtatattcatatagaaaacaaactggaagattctacccggcaggaaatctggttcgataaggagaagataacgcgtatattggataatcttctatccaatgcaatcaaatatactccttatggaggaaagattagtattgaagcatcggtagacgagcataagtggtatttgcgcatcaaagataccggtatcggaatctccgcccgcgaacagaggcatatcttcaaacatatcttcagagcggataatgcaataaattccggtgaaataggcagtggtatcggattgaagttggtaggagcgcttgttaaactgcatcagggcaaaatctctttccgaagcaaagtggatgaaggtacggaattctttttgtcctttcctttgacatacgagaatgcagtggatcattcggaaaatagtgagaatgttccacttggtcatgacgtctctgttagcgatcctcacgtaaatcgcgttatggtggtggaagacgatcccgaaatgtcccgttacattgagatgtcgctgagtgatgtctatcatgtaaagaccttcaataatgccgttgaagctttggatggcatagatgctttctcacctcaacttattatttcggatgtgttgatgccgggaatgacggggtttgagttctgccagaaggtgaaaggtaatataaagacttctcatattccattcctgctgcttacgggagttacggataagaaaagcatattggaaggtatgcgtctgggagctatcgactatattgccaagcccttcgacaaagaagtattgcgaagcaaaatagccaatatctttgaattgcggcaagccgcccaaaggcaatgtctggaagaactgaaaaacaacaatgccgtggaattgtcgaacaaggcggacaatgaatttatggaaaagcttttgaagttgatagagactaatatagataatccggaattaaatattcagatgatgtgcagtgaactcgccatgagccgtacgttgctatataataagattacccaactgaccggtaagtctcccactgaatttatccggattttccggctcaagcaggcggctgcgcttctcctttcgggagagtactcggtgacggatgttgcttttaaggtgggaattgacaatccgaaatactttagtcgtattttcaaggaattttatggtgtatctcccaaagagtatctggcaaaaagagaataagtaacgctactgaataaaagaaataaaaatgcggtgtgattttaatggttacaccgctttttgtgtcatataagccttgtagaaggcaatatatgaacatctgtgcacctggaatgacgtataatgtacctcttttttttcccttcccgctacatttgcagctgtaaatcgaatggttttatgtaaggccggataaatttaatacctttattatatatgagaatttatttattagttatgatgcttccgattttcttttcagggtgctctgataaggataaagatccgctttatctggatgcttcccaacctgtggagaaaagggtgaatgatttgatgaatcgtatgacattgcaggagaaagtagcacagatgtcacaatacgttggtatagaacacatgaaagctgccgaaaaagacatgacggtggaggaaatgaagaaaagccatgccaaaggattttatcctgatctgcattctaccgaactgattgaaatgaccaaacaagggcttatcggatcttttctgcatgtaattaccagtgaagaagccaatcgattacaatcatatgccatgcaatcgcgccttaaaatccctttacttattggcattgatgccattcatggtaccggactctacagaggagctaccatttatcctactcccatcggacaggctgcaaccttcgaaccggaactggctgaaaaagcttctcgccagactgctcttgaaatgcgtgccaccggtacccattgggcatttactcccaatgtagaagtggctcgtgatgcccgttggggacgggtgggagagacctttggcgaagacccttttcttgtaggacagatgggagcagctaccgtcagaggacttcagacaagtgactttaccggacaggataaagtactggcctgtaccaaacactttattggtggaagccaacctgtcaatggtatcaatggtgctccttgcgatatctccgaccgtacattgcacgaggttttcatgcctccttttaaagattgtctggatgcgggcacatatactttcatgatggcacataatgaacttaacggagtgccctgtcataccagtaaatacctgatgaaggatatcctgagagatgcctggaaattcaacgggtttatagtgagtgactggatggatattgagcaagtgcacgaaaagcattgcaccgccgctacactgaaagacgcgtatctgcaaagcgtaaagaatggaatggatatgcacatgcatggtcctgagtttgcggatgccgttatagaactggttaatgaaaaggaactccccatgagccgcgtagatgatgccgtcagcaagatactgactgccaaattcaaactgggcttgtttgagaatccttatatagatgaaaagaaagtttcccaagttctgttcagtgccgaacatcgtgaaacagcactcgaaatggcgagaaaaagtattgtgcttctgaagaatgataataatctgcttcctttggatagcgaccgttataaaaaggtttttgtaaccggccccaatgctgacaaccagactattttgggtgactgggcttttgaacagccggactcctgcgtgactacagtcattgagggattgcgaatggtttctccccagactgactttgatttcttcccttttgccaccaatttgcgcactatggaaatgtctcgtgtgttgcaagcgaaagacagagcccgaaaagccgatctggctattgtagtggtgggtgagaactccatgcgttatatgtggaaagacaaaacttgcggtgagaatgtggaccgttatgaattgtcattggtaggtttgcaacaacagttggtagaggagatttatgctacgggagttcccactattgtcgtattggtcaacggtcgtccgttaggcactgagtggattgctgaaaatattcctgcattggttgaggcctgggagcccggttcatttggcggacaggctgttgcggaaattttatacgggaaagtgaaccctgaagcaaagcttcccatcactattccccgttctgccggtcaggttcagacttattataaccacaagcaaacgagcaaatggttcccgtacggtacgggaaaaagtactaatctgtttgagtttggatatggattgaattatgcttcttttgaattcagccctgtgaagttatctgccaggtcgatgaatgaacaggataccttgcgtgcttctgttgaagtccggaatataggtgaaagagccggaacggaagtggtacagatgtatatacgcgattgctacagttcggtagtacgtccattgaaagagctcaaaggctttcataaaattactttgcaacccggagaaagccagacagtcacttttaatatcaccgccaaagaacttagtttttacgatatcgatatgaactatggtgtggaaaaaggtgagttcgaggttatgattgggaattcttcccgtgatattgacctgcaaagggagttgtttaccataaaatgatgaatagtgcacctttttagatgaattgggggagtagcaagtccctctcccccatatctttgccgaaaataaaaacaataaataagtctatgagaacacctactgaaaaactgattataataagtatcgcttgttttctaagtgcctttgtatctcaaccggtactggcgcaaaagtctaaaacgatctatcataaagactggatagatctgaataaaaacgggaagaaagacatttacgaaactccgacagctcctatcgaagctcgcattgccgatttgctttcgcagatgaccgttgaggagaaaacctgtcaattagctaccttatatggatataagagagtcgctaaagacgaattgcccactcctgcctggaaacaggagttatggaaagatggcattgccaatatcgacgaacatctcaatgggcttgtaaagactcaatattcgtaccctttcagtaagcatgctgaagccattaatacagtgcaacgttggtttattgaagaaacacgccttggcattcctgttgatttcagcaacgaggggattcatggactcaatcacgaccgcgcgactccgcttcctgctcctattgccatcggttccacctggaatgctgctcttgtcagacaggcgggagagattgtaggccgtgaagctaaagctttgggttacaccaatgtatatgctcctattctggacttggcacgcgatccgcgctgggggcgcgtacttgaatgttacggtgaagaaccttttcatgtaaccacattgggcaaggaaatggtggcaggtatccagtcgcagggagttgctgcaacgttgaagcattttgctgtgtacagtgtccccaaaggtgggcgtgatgggcatgcacgtaccgacccgcatgtcgctccccgcgaaatgcatcagttgcatctttatccttataggaagattatacgtgaggttcatccgatgggagtgatgagcagttataatgattgggacggtattcccgtatccggcagttattatttcctgactgagttgctgagagaaaaatatggtttcgacggttatgtagtttccgacagtgaagcagttgagtttgtctatagcaagcaccgtgtggctcaggatatgaaaggagcagtgaagcaggtggtagaagcaggactcaacgtgaaaacgaattttacgcaaccttccgatttcgtattgcccttgcgtgaactggttgcagaaggaagtgtatccatgcagacactggatcggaatgtagcagatgtactgcgggttaaattccgcttagggctttttgatagtccgtatgtcacggatacgaaagcagctgacaagattgtcgcttcgtctgataccagggagtttgagaaacagatgggcagagaatcactggtgctattgaaaaatgaagccaatctcttgcctctccaattgagtaatcttcggaatattttggttacgggtcctttagctacggatactaccgcttacgttagtcgctatgggccgcagaatttgcaggtaacccacgtgttgcagggtgtcagagattacgtcggacaggcggcaactgtgcattatgccaaaggatgcgaagtagtggatgccacttggccggaaagtgaaattattccgactcctttgacggaggaagaacgcctggaaattcaggaagctgtggagaaagctcgccggagtgatgtggtaattgccgtattgggtgaggacgaacaccgggtaggtgaaagtaaatcgcgtacaggattggctttgcccggacgccagctgcaactcttgcaggctttgtacgaaaccgggaaacctattgttctggtgcttatcaatggacagccgcttaccattaattgggagaatcgctacatacctgctattcttgaagcctggttcccaaattccatcggtgggcagacgatagcggagactcttttcggagaatataatcccggaggaaagttgccggtaacgtttcctaagactttgggacagattgagttgaactttcccttcaagccgggttcacatgccggacaaccgggtgacggtcccaatggctatggtaaaacagcggtagtaggttctctttatcctttcggatatggattgagttataccactttcgaatataagaatttgcatattacccctgacaaacagggagtgcaggggaagatagaaatatctatggatctgacaaataccggacagcgggcgggtgatgaagtagtgcagttgtatgtgcgtgataagttaagttccgtgattacctatgattctcagttgagaggtttccaacgggtcaccttgcaaccgggggaaaccaggcgtattcatttcactcttcttcccgaggatctggaaatgcttgacaaagatatgcactggatcgtagaacccggtgagtttgaggtcctgattggtagcagttccgaagatatccgactgaaaggaaagtttgaaatgatgcaaccctgaaactgtataatgaacgttcaatacaataaattaatcccattatttatcttaaatttataaccatgagaaacaatgaaactgattaaaagagctcgtttgagtttatgagtagagaaactaatactgaaaatttgattaatacacaattaattatgaatacactttttacatttgtgaagagaacttatgttcatcttcttatgtgtgccgtgttggtcatcgttgcgatgccactctctgcacagaacatttcatccggaacagccaaccagcagatcaccggtctggtgaccgacgataaaggcgaaccactgattggcgcgaatgtagtactgaaaggatcctcgtctataggtgtgattacggatcttgacggtaaattctcattgaatgcacctttgcaaggaaccttacagatttcttacatcggctttcatgcacaagagattgcgataaacggaaagaatcatttcactgtaaagttgcaggaagattcaaatactcttgatgatgtggttgttgtgggatatggagtgatgaaaaagagtgatgtgatcagctctgtaaccacgataaagacagataaaatgacgaaagccgccaccctggatattggtgaaatgcttcgcggacgagctgccggcttgaaaattacaacctcagaaaatgccggccccggtggtagttcgaatatacagatacgtggtacaaactctatttcgggaggaactactcctattgttgtagctgacggagtggtgatcggttccattaatgatgtgaatccgaacgatattgcatctgtggaaattctgaaggatgctgccgctcaggctatctatggtgcacgtgcagcaaatggtgtcatattgcttaccaccaaaagaggagaagcgggaaaagctcgtgtaagttatcaggggtattatggtatccaaaacgtcgaccgtaactttgatgtttacacgcctgaagaatttatacagtataaacgtgaggcttaccgtaccaccaataataaccagtatggtgccgattctgatgtattcagccaattagaactcgaatctatccagaatggacagttcattgactggcagaaagagttgatgcgtaccggtactattcagaatcatgacctcacggtgaccggaggaggtgagaaaacaaaggtatttgtgagtggtaactttatgaagcaaaccggtgtggtgcctgctacggattttataaaggggcagcttcgctttaatctcgatcaggagattacccgttggcttaaagtcggtttaaataccagcctgagcatttcgaccaagaatgatccgggggtagccggcctgttgcgtgatgctgtaacttgttcacctttaggctcggtttatgatgctgaaggtaaccttaatatgcatcccaccggattgcaggagaattggaacccgctgattgacttgcaggaaaaaacatcgaccactaagagccgtaatgacttggtaaatcttttcttcgacttcaagatttttaagggactgacctatcgattgaatgtgagccgtcgtagctggaatgcaaaggtagaaacctatagtacagccaattcgaaggcaggaagttacacaggtatgggaagtggtactattaaaaatcaggatgagaatgaatggacgcttgataacatcctttcgtatgataatcagtttggcaaacatcacgtatccggtacgttgattcagagctggaatgagcgtaaccaacattccaatcagatggatggatcgctgattccgaatgacttattgggtgtctatggcattgaagcggctgggaaagtaatacctactttaagtgcgtctcaacgccgtcttgtgtctaccgctctgcgtatgcaatatgattttgcttcgaaatactatgtaaccataagcggacgtcgtgacggttcatctgtgttcggtgctaaaaataaatgggctgtttttcctgccatggcattgggatggaatgtgtatcaggaagagtttatgcaaaactttgagcaacttacgaacttgaagttacgtggtagctatggtagtgtaggaaatgaagctatacagccttatggtagtattgcatctgccgaccagtgggattattacaccacgaagaaactgacaggatatacgccgggagctgttctttcgaatcctaagttgaagtgggagacttctacaaccttaaacctggctgtggactttggattcttcaataatcgtttgtccggtactgtggaatggtataatactcgtacgaaggatttgctgatagaccggtctatcagttcggttaccggatattctaccatcaaggacaatatcggagagattcagaacagaggtcttgaaatacagttggaaggtgttgtggtaaagagtcaggattgggatgtacaattgggaatgacttttgcacgcaatcgcaataaaattataaaactgttcggtgacttggatggtgacggcaaagaagatgattatcctattaataattggtatatcgggcagcctatcaatgtatccaaaatatatgaagtagccggtatctggcaggaagatgagattgatgagattcctaattcagcacaacccaatgctcaacccggagatattaaaattgtagaccgtacgggcgatggcaagctggacgatgatgacaaaatactggtttcacaattccctaagtggaatggttctttcaatgcatcggtaagatataagaatgttgacttctccatggatatttatactgtacagggaataaccaaatacaatccgttcctggcagattataattatggtggtaatatgcgtgcagtgttcaacggtgtgaaggtgaattactggacaccggaaaatcctaccggtaacttcccgcggcccacaaccaatggtgccctcgaaatgggaagtatagcccgtcaggatgcctcttatgtgcgtttacagaatataacgataggatataccttgccgaagacatggcttgcaaaagtacacttgagcaatgtaaggttctactttaccggacaaaacctgttaacattgacagattatgagtcgtacagtcccgaacagcccgctgacaagtatcccgaagcccgtacgttgactttcggcttgcagcttggtttctgatcggaaggcagtcagagatataatttcatacattcaacattttaatgatataaccataatgaaaaattatatattatttcttatcatcggattactggtagtcaatacctcttgtgattcctggctggaagaaacacagttcgacaagattaatagttcaacgctctatgagagtgaagaaggattggaaatcggtctgaatggactatatggcctctctcgccgctttttccgttttaatgattcggatgcacgcggagcttactggttttattgtgctaccgacctggctatggtgcgtacgtggaatgaagcggaaatgtatcgttccaatatgcgtgcaaatgccatgccggctgagatgtggaaccgtccctatcagatgattgatcgtgcttccgccattattgatgccgcacccggtattagtatgcaaactgaaacccgtgagcgaatcgtttcggaagcccgtgtaattcgtgcttgggcgtacctcaggctgatttctacttatgacaatatcttgttggatagcataccgacaactccggacaatgcgtttgacgaagtagagtataaaccggctagccagaaagatgtatatgcctttattgaccgcgacctcgattatgccatcaaacacttgcaatataaagtagatccgggaattatcgggttgggcttggcccgtcagttgcgtgctgagtcggctatgtggcaggaagattacactacggcagcagcgcaggctgatgcgataattacaggaggacaccataaactggtaggtatcagcgaaatattcggtaataatgtaaaccatagcgagagtctgatggcgtggcagttcgatgaggtatctggaggtagccatacactggctggaggtgatggtcatgtgttgggagcttgtttccaagcccgtttctatgagatcaccattccgggagatcctgtagcgcctatcattgaggaagctaactatggaggaaatgcttacgggtggacgtatccgaatgagtatctccgttcattgtatgacaaggataaagataagcgtttacaattctatttctatccggatacgctgtacggaaacaatccagcttctgcctattatgaaaagaaattaccgggtgatcccccgtattctactcagctgcgccagtatacatggagcttgatgaagtatcgggatctgagtaaaccggccaaacgcgccttgtcttacaagccgtttatagcttatcgtctggcggatacttatattttgggtgccgaagcacattggagaaaaggaaatacggaaaaggcactggaatatctcaatgctatacgtttgcgtgccggacttgaagaggctactactattgatcttcagactatcatggatgaatatgcgcgtgagttgtgctttgaaggcaaacgttggttcttcctcaagcgtatcggtaagttggtggaacaggtgaataaataccatcgcttcggtagtacaaccagtagtattcagggtaccacaatgaaagattatatggtgcgttggccgatcccgcaggcacaaatagatgcaatgggaactttcccacagaatccgcaatattaaatgagtatgaaaatagtaaccacactcttgttatctctttttgcttcttcagtgctgtttgcccagtctggtaaaacagtccaggtacagacacgtgccaacagcactgtggagaactggacaccttacgaggcgcatactgtggataacctgaaaggattcaaaaagaaaaaggagccagctctgtctgtgttcggagggtataagacgaaccgccaggaagcaaccggctttttccgtacagagaagatcaatgggcgatggtggattattgatcccgaagggtatccgttccatcaccgggcagtagtagcatttgggcctggaacctcaaagaagcaacagtctgcatttcaggagaaattcggtacgcgtgcccagtgggtgaaggtagagacggaaatgttgcgttcgtatggatttaatggtgccggagcctggtcggcagtggaagatatccgtaccagtcaagctccattggtctatacgctgattgtcaaccctatggggaactataagcatgaacatgtgaagaaatatggaggtacctataaggtggccggctggcaggggtatcgattcaatctgcctatggtattcgatgatgagtttgacaaatatgtagagcaggctcttgctccgttggcacggtataaagatgatccttgcctgttaggctattttacagacaatgaattgccttggtatactgatgctttggaccgccatcttaactttctggctaaagatgaaccgggatacctggcagcacggaaatggttggatgaacgaaaaggcaaggaagcaaccgtggcggatattaccgaggaagaccgtcttgcattctccgccttcttcttcgagacgtatatgcagaaagtgacttcggtgttgcgtcgtatagatcctaatcacatgtatctcggctgccggtttaatcaggataagaatcaggaacttaccaatccggctatctttaaggtagcaggtaagtatatggatattatttctataaatcattaccgccagtggcagccggaacaggagcggatgaataactggggagaatggtcgggtaaaccttttctgattaccgaatggtatgtgaaaggagaagattccggtttgcccaatgcaaccggtgcgggatggaatgtgccgactcaggatgaccggggaattttttacgaaaacttctgtttacagttgctccgcaatccatactcggtagggtggcattggttcaggtatcaggataatgatccggaggatttgacaacagacccttccaacagggattccaacaaaggaattgtagacagcgaatattctccctggttacctttattgcggcgaatggagaaagtaaacaagcaggcttacacactcactcgttactttgattcgcagaagtaaatagttggattttgataggtattcatataagaaccgtttcggctttaggacaagttaaagttgaaacggttctattcaataaatcatttttatctatggtgtttattacgaataaaagcgtttgcttatacagaaatacaggagtattctttgtattaatgatgtgttggttggcatgtagtgcccagtcgggaaataactctatgtacgactatagttcgaaggtcgattctgtactcagcctgatgacactggatgagaaaatcgggcagttaaatcaatataccggtaattggcaggcaacaggaccggtggtggaggattctactaaaatagagcagatcaaggcgggtagagtcggagctatgctcaatatcaaaggggtgaaatatacgcgtgagatgcagaattatgcgatgcagtcccgccttcgcattccattattattcgggcaggatgtgattcatggtctgcgtaccatctatcccattcctttaggtgaagcggcaagttttgatctggatttgatggaaagaacagcagccggtgctgcggaggaagcttctgcacaaggtattcactggacttttgctccgatggtagatataacccgtgatgcacgctgggggcgtgttatggaaggagcgggcgaagatacctggtatggtagcagagtggccgaagcacgggtaaggggttttcagggagatgatttggcggatactcatacggtaatggcttgtgccaagcatttcgcggcttacggagcggccattgcaggtaaggactacaatacagtagacatttccgacctgacgctacacgatacctatctgcctcctttccgggcggcggcaaatgccggtgtggctacttttatgaatagctttaatgacataaacggtattccggctacgggaaatgcatatatacagcgcgatatccttaaagaaggatgggctttcagcgggtttattgtttccgattggggatcggtcaaagaaatggttgcccatggatatgcatccgatctgaaggcatcggctgagattgctattcatgccggatgtgatatggatatggagtcgagagcttatcataagcacttgaaagagttggtggaagagggtgttgtggacattaaatatgttgatgaagccgtaaagcgtattttgctgaaaaagtttcaactcggactttttgatgatccgtaccgttattgtgacgaagagcgggaaaagaaaaccgtattgagcacccgtctcagggatttgtcccgggaatccggaagaaagtccgttgtcctattgaagaatgagaagcaagcacttcctttatctccgtcgtgtagaagaattgcattgataggagctttggccaattctcaaaaggatatgatgggcttttgggcgaatgaaggtgtagagaaagaagtcgtgaccgtgtatgagggtttgaaaagacgttttcccaatgtaacggtcaattatgccgatggatatgatttggaaacaaatgatttacggctttctgaggcccgtgcggctgccaatcgcgccgatgttatagtagtggctgttggcgaaagatttaatcagagtggagaagcaaagtcgagggctgatattaccgtcaatgccaatcagcaattgctggtgaaggagttgaagaagacgggcaagacggttattgttttactgatgggcggtaggccaatgatttttaatgatatggagcctcatgccgatgcaattcttctgacttggtggttggggaccgaaagcgggaacgccatagctgatatcatctcgggtgattataatccttccggtaaactgcctatgacttttcctgcacatgtggggcagattcctgtctattataattataaaagtaccggaaggccggaaagtaaaacagttgcctattcttgccggtatcaggatattgattttgaacctgcttatccgtttggctacgggttgagttacactacatttcagttgtcggagcctaagacttccgccaatgtatatacaatggaggatacgatccgggtgtctgcgaagttgaaaaataccggggtatatagaggtaaggagacagtgcagctttatatccgtgacttggttgcctccgttacacgtcctgttaaggaactaaagggatttcagcaaatagaattaaatccgggtgaagaaaaagaggtgacgtttattctttcatcggcagatcttagtttcatgaacaggaacttgaaatatatcacggagcctggtaaatttgagataatggtagggactaattcgaaagaggtgaagaagacaattatatcattgaagtgaaagttacttcccagacttacataagaagaactcccctgccggtttcccggtagaggagttcttgtgatattaatcaaatgtagaaagggctgattagtctttcagttttgcgatgatgaaatcgcggttcagacgggcgatgttgctgatagagatgttcttcggacattcggcttcgcaagcacgagtattggtacagttaccaaatccgagttcatccatcttgctcaacatagcttttgcgcgacgcaatgcttccggtttaccctgcggcagcaagttcaactggctaacttttgcggaaacgaacaacatggcagaaccattcttacaagcagctacacaagcaccgcaaccgatacaagctgctgcatccatagcttcgtcagcgatttgcttcggaatcaggatagcattggcatcctgaggagagcctgtgcgtacactaacgtaaccaccggcttgcataatcttgtcgtaagccgtacggtctaccatcaagtccttgatgaccgggaaaccggcagaacgccaaggttcaacagtgatagtgtcaccatcgttgaaacgacgcatatagatctgacaggtagtagcacctgttgcaggaccgtgaggatgtccgttgatgtagagcgaacacataccgcagataccttcgcggcagtcatgatcgaatacaaccggttctttaccttcagaaatcagttgttcattcaagatatccagcatttcgaggaatgaagtgtcaccggggatatctttcatttggtatgtttcaaaagcgccttttgcctttgggcctttctggcgccatactttcagtgtgaaacttatatttttatccattgtctttaatttttaagttgacgagttgacaaggcttcagttaacaagggagaatgttccgcttattaataagtgatgacaacatacgtatgatttcattgtttaagctgttaagttcttcaaagctttgagtagataagtaatgtatgtcattacaaataatgagttgggtctctaactcagaagctgaacctaaagatatatataaaaactgaataagctctttatcatgccctcttccatatccttctgctatattcgaaggtatagaaacagcagctctgcgcatttgcgaagtaatgccgtagatttcctctttaggaaatacttgagttatttgatataagtccttaacaagtttcatactcttttgccaaacaattaaatctttatgatttctcatgccttgttcccttgttaactcgtcccctggttaactaattatgatttatagttacgagtctgtaccttgattgcttcgtaaaccagcggttctttcagcaactcaggagctttttcatcggaaccttgatattcccagcaagcaacgtagaagaagttttcatcgtcacgttttgcttcgccttcttcagtctggtattcttcacggaagtgaccaccgcagctttcgttacggttcagagcatcgtaagcaaccaattcgcccatgataatgaagtcgtacagacggatagctttatccaactctacgttcatgccttccttatctcccgggatgaacagatctttttcgaattccttacggatttctttcagtttggcaataccggtcttcagaccttctgctgtacggcccatacctacatattcccacattacgtgacccagttccttgtggatagaatctacagacttcttacccttgatattcatcatccagtcaatcttgtcctggatagctttctcggctgccgcaaattcaggcaggtcggtagagaagcggggaactgtaatctggtcggccagatagttctgaatagtgtaaggcaatacaaagtaaccgtcagccagaccctgcatcaatgcggaagcaccgaggcggtttgcaccgtggtcagagaagttacattcaccgatagcgaacagacccttgatagaagtcatcagttcgtagtcaacccagataccgcccattgtatagtggatagccggataaatcatcatcggattataatatttcacaccggcaatttcttttgccagttcgcccggattaacgtcagtgatttcctcgtacatatcgaagaggttaccatagcgttgaagaacgatatcgatacctaagcggctgatagcctcagagaagtcaaggaatactgccaggcctgtattgttcacaccgaaacctgcatcgcaacgttctttagctgcacggctggcaacgtcacgcggaaccaggttaccgaatgccggatagcggcgttccaagtagtagtcgcggtcttcttcaggaatatcacttcccttgatttcacccttctggagcttcacggcgtcttctttcttcttcggaacccagatgcgaccgtcattacgcagagactctgacatcaaagtcaacttagactgcttgtcaccgtgaacgggaatacaagtggggtgaatctgtaccatagccggattggccatccaggcacccttgcgatagcaagaaacggcggctgtacagttacaagtcattgcattggtagacaggaagtatgcgtttccgtagccaccggtagcgattactactgcgtgtgcagcaaaacgttccagtttaccggttacgaggtttttagcgatgataccgcgggcgcgtccgtcaacgaggacaacgtcctgcatttcgtaacgagtgtataattttacggtacctacgtttacctggcggctcagtgcagagtaagcacccagcagcaactgctgtccggtttggccgcgggcatagaacgtacgtgatacctgagcaccaccgaaagagcggttatccagcaaaccgccgtattcgcgggcgaagggaacaccttgtgccacacattggtcgataatgctgttggaaacctcagccaaacggtaaacgttagcttcgcgggcacggtagtcaccgccctttactgtatcgtagaacaaacggtaaacagagtcaccgtcgttttggtaattctttgcagcgttgataccgccctgtgctgcgatggagtgtgcacggcgcggagagtcttgaatacagaagttgaatactctgaaacccatttcaccgagtgaagcggcagcagaagcacctgccaagcccgtacctactacgatgatatccaagcgacgcttgttagcagggttaactaatttctggtgagctttatagttggtccatttctcagccaccggtccttccggaatttttgaatctatcttagtcataatgtaatttacaatttagttatttacaatttacaatttagcaagcgccgcacaatgattttgcgaagaatacgacaactaccaaggcgaaacatacaacgacgatagtagagtaaatgttggagatgcatttccaacggttaatccataccttgttgttccaacccagggattgcatagaactccagaaaccgtgagtcaggtggaaccacagtgcgccgagccaaatgagataaagcactacgtataccggattgctgaatgtgttctgaatgtgataaacaccgttagcggcataagccagtgtaagcgtgtcagcatgcatacccatgttgtgcatcaactcaggaagctgcatttttgcccagaagtttaccaggtgcagacccagacctacgattacgataagacccaatacgagcatgttctgagaagcccattctacagttttgggtttatcaactacggcataacgttcagtaccgcgtgctttgcggttctgcattgtcagccagaaagcgtagatgatgtgaataatgaaaagggcggccaaacctaccgtagccaccaaggcataccagtttgcccccaggaactcacaaaccatgttgtatccctctgccgagattaatgcaaccaggttcatcgccatgtgaaacgtcagaaacaggacaagggcgataccggtaatgctcatcaccactttccttcctacagatgaattacttaaccacataaatgattgaatttaaattatttaatagttagaaaatttgcttttacttagggtcttacactaatttcccgcaaaaatagaagaaatacattgattaaacaaggaattaaagaaataattccgtaattcagggaatagatagaagttgacaagtgagtcagggaacaggttgacaagggaagattactcttactcgtcaccctgttccctggctgagtcgtcatttttttcttttataatggtgattttctctccgctggcagcacgttttcgcaaggagcgaggggtgtctccaaaggagtccttgcagaaatgagcgaagtgcgacagggagtcgaaaccataacgtgaactgatcacggagatacgttgcttggtgaattgtagatcgttcagaataccttcacgcttcttgtccagtatccattcgtacactggaacattatacatatttttaaacaaacggcggaatgtagtggttgtatatccacctaaatgggcgaattcttccacattcttcaccttgtcgtagttctgcataatgaaataatggaaactttccgtataagtactgataggatagaagaacgtacttatctggcgcaggggataatagcaggttagtatgtaaaccagttcctgacgcttgatgtcgagatatttcccgcatgcggaaggctgttctttaaaatagtcggcgatatcatgcagcaaccgctccagtttggtattggctatcagcggcgtgtaggtcagcggagcctcagaacgttcgaggatttccttgtaacggtcttcacatataagtggaagttccgtaaaccaataggcgatatattccacctcggtcagtgctaacaactccatttttgaaccgatggcttgcagtacacattgtctgctctggagcgtagtgcccgggtattcgttactatttatcaacaattctccctttaacataaagatcatgcagttctgggtacacttctccgctgagaaatgctgcccctggggatattggcggtataccaatgtcccgtctgagatttttgggcatagagtacaatctacttgccgtgtgcaaagagtgtcttttgtcatgaaatataagacgaattactaaaattatggcaacaaagatagaatttttttgtgaatactctaacaaaatcgcctatctttgcagcaaactataagaaagactacatgaaacggactattttttttgtattttttgcatcattacttgtattcaatatttctgcccagaactgggacattaatactttgcataaaataaatagttgggatggtaagttcattcgtaattataataaaataatttctcgtactgaaccttatattgccgtgggggttcccgtggcgatggcgttggctgcctgggtgaaaaaagaccgcgaattattgaaggatgctgtgtatgtaggtaccagtgttgccggtgcttttgttgtaacttatggcatgaagtatcttatagatcgtgaacgtccgttcgaccgctatcccgaccgggttcatgcttatagtcatgaaaccagtccttcttttccttccggacatacggcaactgcttttgcattggcaacttcactttgtgtgaagtatccgaaatggtatgtaatcgctccatctgccttatgggcatgttctgtcggggtatcccgtatgaatgagggcgtgcactatccatccgatgtgctggcgggcgcagctatcggagccggatgtgctgtagtaaatatctatgtgaatcgttggctgaataagtggttgttcggcaattaagaattgcactgtatcggatctatatattctgcgtattgcatctatatatcggacgtgttgcatctatatatccaatgcgttgcatctatatatccaagatgttggacatatagacgctgcaaatggtttattaaagtggtagtttcttctcgtaaatcttttcgttcaataactcaagggcttgttgcacgctgttgttcgtggtatttatcacctgaaagtattcgttcatatcccacaggtcacgggctatcaaggctttcaactgcgtctttatcagaggcaatgatttgttgtactgctcctcgttgaactcaatcttttctttatcggcggcagcgcgtatgtctgcaagcatctgttcgtctatctcaaatttattgttgaaggtatcgaacttcttatatttctcttggagttctttccgatttttctcgatatacttggttgttgctttgatgacaacgcctttggcaaccagattacggtgataatcggtatattgggttgtatcaataggcacgaaatagtcgggcatgatgccaccgccaccatatacggtacgtttcaacttcttagtggagttcttcaatgaatcaggaaaatggatactgtcggcatgcatcatttctccacggttgaagcgatctaccagttccatattgtatttctcctggccgtcatctttactaaggcctctgccgtccagattggctgtatggtcgtacggtttctggatgcaacgtccggatggggtgtaataacgggcgatagtcaagcggatcatagagccatcgggcaattcgatgggacgttgtaccagccctttaccaaaagtacggcgacctacaactacgcctctgtcccagtcttgtatagcaccggttacgatttcacttgctgaagcggagtattcgtctaccaacacaatgaggcgtccgtttttgaagttgcctgtgcctttggcatagaaattactacgctgagaggttcttccttcggtatatacaatcagctctttttgttgcaggaactcgttggcaagatcaattgctgcattcaaatagccgccaccgttgccttgcaggtcgagtatcaggtctttcattccttgcttctgtagttctttgagggcggcggtaaattcttcggcggtagtggcaccaaaacggttgatacgaatataaccggtcttgggctgtatcatatacgaagcgtccaaacttagaatgggtattttatcccgttttacagtgaagtataagggatcgttcactccgcgacggacaatggttagttttacttctgagtctttcgggccgcgcaggcgtgtcattatatcttctgtggacatttttacgccggcaatagcgctgtcgttcactgccacgatacggtcacctgccagaataccaaccttttcagatggtccgttgctgacgggctgtataataagtaatgtatcttctatcatctggaactgcacaccgataccttcgaagttaccttgcaacggctcgttcattttcttcacttcctcagcatcattgtacgtggagtgcggatcgagctgggcgagcatacggataatagcttcttccaccagtttattttcgtctaccgagtctacatacagattggcgatggcaaattctgccatttgtaacttgcgggcagccaagttgcccatattctgcgcctgcatggaagccatggcaccgcatatacatattataaagataagaagtttcttcatcattcttttttgcttatcacttttcactaattcactaatcattaaatatccattccttcggggataaactggctgatatctttgccgaactgtagaagctcgcggacagtagtcgaactgatacatgtcagttcgggttcggtaaagagcaagatggtttcaatacctgccagtttgcggttgatatcggcaatggtctcttcatactcgaaatctttcacggtacggataccgcgaacaataaactgcgcgtctacctgccgggcaaaatcaatcgtcaggcaatcataggagtaaaccttgattcgtggctcgttccggtagaatttctgtattatctccacgcgcttctcaatagggaagtaggtgtttttattctcgttgataccaattccaataatgacttcatccataaaagtcagtgcgcgggtcactaccgatgaatgtccgatagtgaaaggatcgaatgttcccggaaagattgctcttctcatgatgccagatcttcttctataaccagattgttaataataaagttttgccgttccatggtatttttacccatgtagaattccaataattcttttacgaggtccgttttgcgtaaagtaacttgttccagacgcatatctttgccgatgaaatgccggaattcatcaggggagatctctcccagacctttaaaacgcgtaatctcaggattgggactcagttcggcaatggctttttgccgttcctcttccgtgtagcagtaaattgtctttttcttgttgcgcacgcggaacaacggagtttgcaggatatagacgtgccctttctttatcagatcggggaagaattgcaggaagaatgtgatgagtaacaaccggatgtgcataccgtccacatcagcatcggtagcggcaatcaccttgttgtaacgcaatccttcaatgccgtcttctatattcagggcagcttgtagcagattgaattcttcgttttcgtataccactttctttgtcagcccgaatgagttcaatggtttaccacgaagactgaatacagcctgcgtatttacgtcacggctctttgtgatggaaccgctggcagaatcaccctcagtgataaagatgcaggactcggattcttgttcctttcctttgccgtcattgaggtggtaacggcaatcgcgcaacttgcggttgtgcaggttggctttctttgcgcgctcacgtgccagtttggtaacaccggcaatggctttacgttccttttcggagtcttgtatcttttgcagcatgacttccgcaaccaacggattcttgtggagatagttatccacctctgttttgatgaagtcgcctacatacttattcacgcttacaccgccgggagacatggagggggaaccgagtttggtcttggtctgtccttcaaactggggttcttccacattgatggcaatggcggcaacaataccgttgcggatgtcggcatattcctggtttttgttgtagaactccttgatggtgcgggcaatatgttctttaagcgcactttggtgtgttccaccctgtgtggtatgctggccgttgacaaaggaatagtattcctcgccgtattgattcgtatgcgtaaaggctatttcaatatcttctcctttcagatggataatattgtaaaggccctgtgcggtcatattgtcgttcagcaaatcttccagtccatggcgtgaaataatgcgctggccgttgtatataatggaaagtcctgtattcaggtacgtgtagttacgcaacagcgtttccacgaaattagcctggaaggaatagttcaggaataacgtgctgtccggttcaaagaagatataagttccgctttcctcgttacagctttccgttacatcactctggagattacccttttcaaaaatggcgatacggactttaccttcgcgataactgcgtacttcaaagcggctgctaagtgcattcacagctttgatacctacgccgttcagtccgacacttttcttgaaagccttactgtcgtacttaccgccggtattgagtttactcaccgcttcaatcagctttccttgcggaataccacgaccatagtcgcgcacactgacacggagattatcctcaatgttaatctcgatccgtctaccagcacccattttgaactcatcgatgctgttgtccattacctcttttagcaatacatagataccgtcgtcgttctgcgtaccgtcgcccaaacgaccgatatacatacccgaacggacacggatgtgctccatgtcgtccaaatgacgaatgttgtcttccgtatattctacattgccttcgggcatcagtccgttgatttcttccataaactcttatttagttgacgaggtctgcagttgacaagttgacgagggaaagagtctgctttataatggtgcaaatatagtgcaaccccttgtttccttgttaacttgtctccttgtcccctttttatttaatttctttaataaacgccctgcgccgtttatgttgtttggtttcaaagtattcccattgggcttgtactttgccattcatttcaagttcagggttgctttctgcaaatataaaacctaatttctgataaaccggaattaaatcggaaaataacaatgcgttaacacctttgttctggtactccggcttcacggcaacaagcaataaatccaacattttggcacgccgtttcatgaacagtgctttcagcagatagtaccatccgaagggtaataaccgtccatgagctttctgtagggcttcggacagggatggcatggatatgcctacgcaaataagctggtcatcggcatctgtgataagtgtcaccatgcggaggtctacgatggggagatacattttcacgtactggtcaatctgccgttgggacagagcggaataaccgaacaggggcttataagcttcgttcatcaactcaaagatggcctgtccatagtcgcgggcaatcttctttgcagatgtatattttttaatcttgagattatatttacgctggataagatcggagatgcgtttgtgcttgtccggtatggcatccggaatgtagatctgatattccacccagtcagcttccttctcaaatcccatacgctccatgtgttgcggatagtaaggatagttgtaaatggttgccatggtgctgagttgatcgaagccttcgatcagcatgccttccgcatcgaagtctgtgaagcccaacgggccttgtatgtgagtcattccacgttcttttccccattcttctaccgtgtggatcaaggcatcggatatttccgggttatcaatgaaatcaatccagccgaaacggacattctttttatcccaggttttattagccttgtggttgattatggcagctacgcggcccactattttattgtcttggtaagccaggaaatactctgcttcacagaattcaaacgccgcattcttctttttattgaaagtgttgagcatgtcgtcgtagagatcgggaacggagtaggggttgcctttgtatagccggtaattgaagcggatgaaccgtttcaattctttcattgtggaaacttttttgattgttattgccataattttatgtctaatgaagtggcaaagatacatgataatctttaaaataccacgtggcagagataaaaactaatctatttctgtatgcttttccgatactgtaaaggtgtcatacccgtatttttgaagaaagcacgtcggaacgtggaagtggagttaaatccggaacgttcggctatttcgtctatattcatggtgtaaggataggtagccagtaattgcttgccggttttctcaatgcggagattgtttatatagtcgtagaaagtgatattcagcttattgttgaaataggaggataagtaggtgcggtttgttccgatggcattggctacgtcactgatagtaagcttggggttaaggtagagttgttgctcttccattactttgtgcagtatttcctgaaaggcgtaataagaaccgttttcttgttcttcttcaacctcttctttctcttctatgttttttttagacagcaggttgcctttcaggttgtttggcatggagatgctgatctgataagctgaatagtggacaatgacagaccataagagaactgaggatatgtaataaatagtatctccccaacctgtaatatttatgctggtatatacccatgtcaccaagcagatggcgagaataaatgtggctttcttcaaccatgccacgtcgatatgttccgaataagagtaattattgcgtatatagcgttgatatcggcgagcggcaaaagttactataagtacaataattgcactatagatcagtataaatccgaaataaaaaggaaatataggggcataaaaggtgcacaaataggcaattgtaaatgcaagatagggactgagaagtgaaaatactttcttccagttgagccatccgggcgctgttaattccagtagatagaaggaacaggcggcaactgcccatccgtcaatgaatagcaaggagttgaccaatcgttcggttttcagtgaagggaaatagagtaatatatctttgagttccagtaatgcccagaaagcaagagttagccccagtattctctgaatgcgtgagcgtggcctatgtgtaagcaaacgaaaactgacatatccgaaaaacatgaatgcagctccattcatgaagtatgatatattgatgccttccattaaacgttgtaaatgagtacggtggtgtatgctatataacaaagtatcagtatgctgccctctatgcgggtaatggtgcgtttggcgaagaacaatccgaatatccatagcagtatgctggagcctaccagtaccaatagatccatattcgtgatgcccgtcaggtgcaacggtgtgatggaagcgctgcatcccagtacgaagaagatgttgaacaggttactgccaatcacgtttccgatagcaatttccggattcttctttaaggcggcgacaatggaggttgcaagttcgggcagagatgtgccgcctgctaccagagtcagtccgatgacggattcacttactcccagattgcgtgcaatgccgctggcgccatctacgaagaaattaccgccggcaatcagtgccaccagcccacctattatatatagtatggatcgccacatgggaagttgtttgatttcctcttctgtctctccctctttcttcccttgaaaagcgatggcaaaggtatatccgaggaaaatgatgaaaaaacagagcagcaacagtccgtctgtagtgctgattatattttcagaactatgatccagaaagacatcattcgcgcaaatcagcaatactatggaggataggatacagagcgggatttccttgcgcagtgtatttctggaaataacaattggagcgaagagtgccgtacagcctacaatcatcagtgtattgaagatattgctgcctacaacgtttccgatggcgatgtccgcactgcctttcagagccgaagagacgctgaccgtcagttcgggagcggaagttccgaaagctacgatggtaaggccgataacaatggaaggaatgcggaagcgcttggcgatggatgcggctccgtctgtgagtccgttggcacctaaaaggatgaggagaagacctccgagaagagaaagaatatccatgagaattctgttttttgtgcaaatataattaattcctttcatgaaaagcgaaaaacattccgtatgtttggcacgttaattaatttgttgtttctaaataacctgattaagggcttttatatgaagggaatacgtgcgttgtgtctttggttcttgctgttgcctgcgggcgttgcatctgcccagttggtagagaaggtattagatgtctttaatgacgatactttggggactgttgttgctcaaagggcagatacagactcggttcatctgctgaagatgaaagaggatttggaggttgcaaggctgaatgaggctaatctcaggatggagatagagcaaatgaggctgaagtatgatgcggcggactccctgaagctggcaaagcagcgattgcgtattgattcgctcaggcggatgacaacaggcgtgccggtggtggtggaaggcgatacgctatattacctgtttgccaagcgtggtggtcatactccgcagcaacgtgccgaaatgaatgcagcggcaataacggaactgggcaagcgatttaatctgcaaccggattcggtttacttagagagcagtgatattgttaccgatctgatgtacggtaataaggttctttcttcttttacggatcaggatggcctgtgggaaggttgttcgcgcgaccagttggcggctgccaaacgtaaggtaatcgtagacaagctgaaggtaatgaaggacgaacatagtctgtggcagcttggcaaacgtattctctatttcattcttgtaatcataggtcagtatttgctgtttaaactcaccacctggttgttcaataagctgaaagtacgtattcaacgattgaaggataccaaactgaaacctatctccattcaggaatatgaattgctggatacgcagaagcaggtgaatctgcttgtcttcctggcaaatctgttgcgatatgtcgtaatgctgctccagttgatattgacggtgccgttgcttttctccatatttccccaaacgaaagaccttgcttataagttattctcgtatatatgggaccctataaagagcatcttcctgggtatagtagaatatgttcccaacctgtttaccatctttgtgatatggcttgccgtgaagtatctggtgaggttggtgcattatcttgccagtgaaattcaatcggagcggctgaagataagtggtttctatgccgattgggctatgccaacgtttcacattgtgcgtttcctgctttatgcatttatgattgctatgatttatccctatctgccgggctccaagtcgggtgttttccaggggatatcggtctttgtcggcttgattgtttcgttgggttcgagtacggtgatcgggaatattattgcgggattggtaattacctatatgcgcccctttaagttgggcgaccgcatcaagctgaatgatactacgggaaatgtaatagagaagactccgttggtgacgcgcatccgtacaccgaagaatgaggtggtgacgattccgaactctttcatcatgtcttcgcatacggtaaactttagtcagtcggcacgtgactacgggctgattatccattcggaagtgagtgtggggtatgatattccctggcggaagacacatcaacttctggttgaggctgctctgaatactcccggagtggtagatgatccgcgtccgtttatattggaaacgtctcttcaggattattacccggtctatcaggtgaatgcatatattaaagatgctaaccagttggcacaggtttattccgatttgcaccagaatatccaagatagatttaatgaagagggtatagaaattatgtctccacattatattgctacacgcgacgggagtgcgacgacgatacctaaggatgatctgcgaccgaaaaagtaagccttttccggtgcgggaatgagcgatcctcccggtaggattgaaactgattcccactacgagagaaggcatcttccactacgagtgaaggtgcttcccaataggggtgaacgggtgttccactacgagtgaatgtagtggaacactaagtgctttatcgcacagatagttatccgtttgtaatgttgctaaagtcgtccgacagggctgcggatgataaagaaaatgaagtgtctttatcgtgcggctacaatttccgaataaggatagttgtctggaacccgttgccagtcctttttcactaagtcgtaggcataaatcagtctgccgttccgataaccttcgaacaatacatagattttcatcgtctctgtatcttgggcgagcatggttactgaacgtgccgaattggggaatgtggcaaaaggctcatccaagctcattgttgtctgattccaaagacatagttctgtctggccattatcggctcttactacggcatatccaccggtacgtacatatttagtagttccggtatcttttccgctgattattgtccagaagggaatgagtgcggtagcctgtatcggatcgccgatgtatattttcccgctactttgttgcagatccagtacaacgggggtgaagctgttgtttccgttatcggccgagagtagcagttggctgccgccgccttgtacaccgggatagcgtgtcagggattcgagctttatattggcaggcagtttatattggcgtgttagagcttgatccatgtttcgggtgtagggccaggagcctgtggttgccaatatcacttcatcggtggatatttgccttacggctattatagagctttggccgttgcaaagggtcaatatgttttcaagtcccatatcttgccagaaacgcatggaaaggtcgtagctgaatactttgcgcactccatctttcgtatgtattccgcagaggttctgactttccgggacattgactacacaggagaaatcttcctggtcttctgccaattttactatgttcttagggctgccatctgtgaggtttacgtgctcaatgcagttatcataactcgtgtcggaatgagaatttacaatgccgtagagttgaaactctttgggtgcttcgccgttggttaccgaaatctcaccaagcgtcatgatctcaccggagcgacgcagacgtaccttggtggttgaggcaggataatgtcccggtgccaggaaggtgatacttgtggtggtctgttcaatcatgacgggcgatactccaagagcatatccctgatagtttagggcgggttggtcggggagcggccaatagatttcgaacataatatcgtcaccgggttggataccttgtgctttaatcgtgactttatcaccagggttaaaactggtctgagcaggcattacaatgtcggttaccaggatgggttcgtctttgtcgtcgtttttaacgcatgcggcaattagtagacagagtagtagatagagagataacttcttcatagcgtttgtatatttgataggcacaaatatattgctttcctttgacatataaagctgtatctctttttttaacctgttggcgaatgaattcgttttcatgactatcgtcaatggaattaatttcgccaacaggtctttctcattttttccggcttatggtatgcagtatgttgccttttttatcaatcatccgcaatgtcagttcttttttgtccgcagatactacagagaagcccggttccggattacaaaaaacggttccttctgtgggtttcactttgcgggcaagggaaccggctgagttgacaatgtagtcgatatcacttcccggcctgcgaatatgctggaagttgtggatatgtccgcagatgtacatgtctaccttgtgcttgcgaagtatcggatcgagacgtttctgcatatccagacgttcgctgtcatctttcgaagtttctgcatagatgggatggtgtccggctacgatgatccagtcttctttggcactggtcagtacagagtcgatccaagagagttgtttttgtaaatcctgtttgcacgcgtcgggataggtggcggagtcattgcggtatttgtccatcataggggcggtgtctatccagacgatgcggatagtggtacctttgtcttcaaatacctttgtatagtagcgggcgggcatggtccagcggcgactgatgctggtgtagtccaataccgcctgtgtgttgccacggtactcatgattgccgagtacggggaaccagtcgatcatcagttccgggtgagagtagatgagctcatagtttgtcatccataacggatcattcacgctgcgtacgccttcgaaatgatgtatatctccggtggcaactacaaattcggggcctatttcttcggccatggttcccatcagctcggctataggcttctggtcgtagtagccgttgcggccgagatcgttggccacataaaaattgaatttcttgtcgaatatggaatagtccgttatctgtgcgacagcccaattactgaggagaataactaaaaggagagagaatacttttttcattatgatattttttgattgttacttaagtggttagaaattgattttcacacctgcatttacctttataccgtagtgttcgctttgcatcgtgcgatcctttgtaccttgatagtagcgtaaaggctggttcagcaggttgttagcttcagcatagaaggtcgtttttaacttcttgccgaaagtatagctggcattggcatccatataattcacagcatcgtagtaacggtcatagaacttttccgaacccatttcatcgatgaatgcagatgcatagttataagagaggcggatactcagtcctgacttctcgaagaagagtgaagcattggctgtgtgctccggagatcccgggaggcgcaggccgctttcattctcgcgtccttcgaagttgaagttatctacccgggagtaagaataggtgtaagttccgtagaaaccgatgcacttcaaggacggggcaatgaaactgaagtcgcgttgataggctacttccacacccagcagatcagcattgccggagttgcgcggctggctgaatttagtataggtggttccgttgtagctatagttgcgcaatgtctggtctacaatgaagtcgttaatctttttgtagaagatgccggcactgacgagaccgatacttttgaaataatattcaccactcagatcgaagttataggagagtgtcggcttcaatcccggattaccgagggaaatctcgttgtcgctgcgcttaattgtgatgttgggcgccaaggcggagtacttggggcgtgcaatggtgttggtgaacgaagcgcgtaccttgaagtcatcgtttacatcatatttcaccaggacggagggaagtacatttaggtaactatccgattcgtagggcgtgcgggttgttttctcttcatctgcatcgaattggctaccggaatatttcacatgtgtattttccagacgtaatccgagcatcagatcccacttcttgccgagtttctggtcgaaacgcagataaccggctgcgacagtttcttttgccttgaaattggtggcgagttcttcttgcacttgctctttttcgaacaggcttgcattattcaggtcgagagatcccaaatattctttgcttacgaaactgcctactttgtattgatctcccggaatgtatccgtcacgattctggtcgacggtagcagccagactggctttgtcgaaaccttcttcatccagcggggtatattcgtagaagtcaatttccttgtccttagtcttatgtactactttggcaccgaagcgcaggtggtttccaaattctcctttcgtaagcggcaggctgaagtcgagtttgaacttaaagtctttttcctgaatgtcttcttgttgttcggtcacttctttcaggctgaaatcatcgttcagatacatggttgaaccttcttgcggagtaagcagtggtttacgttcgtcactcagatccatattgaatttctgttttttcagctgatagtcgatgtaacgttcgttgggacgttcttcgctggctttggcgtagttaacactccatcttgtatccagtttgccgaagagatgctcaccgccgagggtaaagtccatggtgcgttgacgttccagacgggcgttgcggttatcgggcgtgccgcctttggtctgtacacgcatggtacctttgttgttaatagaacagtattcgttgccattgtcatcctcttccaggttgatacctttcacggtgaggcggtaacggttttcccaatcattgcgattattgaagatacctttaaaggtgagtttgtggttttcgttaatatcccagtcgagggcggcggaataactttgacgctctcgggtgacgtagtattgacgaacctggtagtcggtgatgcagagttctccggtttctacatctttgtcccatacaaattcaacatcgtccgaaccggaaggcgagttctggtaagaagcggaaagcatgactcccaatttgtcgttgaagaaacggtcaccataagtaaatcctaaatttaattgtgctttgtcgctaatccagttgtaaccggttccggcagtggcactgatgaaacgcttataaggagagttcttggtcactaaattaatggagccaccgatggcgtcggcatccatatccggagtaacgactttattcacttcgatcgtctgtatcatatccgcagggattaggtcgagctgtacattacgtgtatcgccttcagcagaaggaactcggttgccgttgatggtgacggaactcatatccgcacttgttccacgtacctgtccgaaacgggcttcgccctggtcatactgtacgttgatacctgaaatacgtttcaaagcatctccaatgttagaatccggaaacttgcctacttggtcggcagaaaccacattcttgatgccgaggctgtttttctgtgaattaatagcgcggcgttgtccctggaaagctccacccactaccacttcctggagttcgagtccttcgttcagtatgacatctttctctagggtacgtccttcgggaatcgttatttttaattccacaggtgagtagcctacataacttacttttacggtgtaagtacccggttccagattagggaaagtgtagaagccgttgacgtcactcgtcaccccggcatgtagcttttcaatgtaaacggaggcacccggaagggtttgctttgaagtgtcgatgatacgaccgcgtacagtgccttgttttactacgtttgttttctcatcagcttttgtcagattgctgaccgctgtaaataagaataagagcgtaaatactctaaaaatgtgtttcatacttattatgatacgttaatgaatttgccgcaaaagtagagacatcgcgtttcatactttttgcggcaaattgaagaaatggtaacaaatatgatacatttcggttacgggattgctgaaatagttttcatttggattgagcttagttttttagggttatatttcactaccttattcattgacagcctctgatttaagatgttctccaactttcttattaaaagatattttaaatgaataggcatattcacaaggtttattttgcgggaaagatatctttaatccttcatcggtttgtttccaatcaatcttttcatcagatcctaagaggtttattccaactatcttggcatcggcaattgattctttattcaaagactttattaaggttccgttatcactccaatttagaataattgcataaaggtcattatctttagtagtgaaacgcatatcttgggcagtataagcgattgctgcattatcggaaaaagcgccttttgtggcttcagtatctccttctccgaacttcttccaacatcgcgtgccataaatagcttctccatttacttttagccatttaccaatagagagtaatactgctttttgttcatcagtgattgtgccgtcagcacggggaccgatattcaataatagattcccgtttttactaactatgtcaattaagtcatgtacaatttgctccgggcttttattttcttctccatcaatgtatgaccatgattttttacccacagaagtatcagtttgccaggggaattgcatcatttttccggattttcctctttctatatcccatacttgaacattagttggatatccatatttggtatttactactacattttcgccccaatccaaagcgttattgtaatagtaagccataaacttattgaaatatggcattagtaccggattgttaactgtccagtcgaaccaaatgagttttggctcatatttgttaattagttcataagtatgagtaagccattcacgagcaaaatcttcggtatatttttcattatcgtatcttcttccgtatagggagatggtggagtcttgtacatcggatggaaatttcattccaccattatagaaccaagcattttcggctctatgagtcgataatccaaaaatgagaccttctttttctatggcttctttcagtaaccctataatgtcttttttagggcccatatttacggcattccatttattcagtttactgttgtacatggaaaaaccatcgtgatgttcagccacgggtactatgtatttagctccagcttctttgaacagtttgacccattcctctgcattgaatttttcagctttgaacaaagggataaaatctttgtagccaaatttatcctgaggtccccacgtttcaatatggtgtttatatacatggtggtctttttgatacatattgcgtgaataccattcggtatcgtaagccggtacagagtaaggtccccaatgaatgaaaattccaaacttagcatcagcaaaccattccgggaactggtagttgtctgctatatttttccagtcaggatgaaaaacttctgttcccttaggtgaagcaaccgagtctatgttataagactctttgtttatggactgacatgaggctaatagagccagagtcaatgtagaatagataaactttttcattggtttcttttttttatttttaatcatatagatagaacattcgttccatcagtttccatttttcagcagaagtgctcttaggagcacattcttggaattctgatacatactcttcccattcagcttgtttgggtaaatgggacagtgtattcatagccgtttcccaatcaaaatcaagaggagtttctataatcatgaatacttggaagcctgatatgtatatttccatttccagaattccgacggagcggataccttttcttatttcaggccatgcttcttttttgctgtgtatcttacgatactctgcaataagtgccggattgtttttaaggtttaatgtctggcagtacctttttacaggtacagagtgttgttttgctgtgtatccttgattatatgtcataagtagtttattttttagttgttatcctgaaatcaatctttctaccttttcccgatattgtatctttaggggactgttgtttctgtaaaatcagaatagaaatagtcaatagcattttcttccggcagatagatagtccgccagcgtaaaacttttgtctggtcgcagtcttctatccgggtttctgtttctgctattggaatcttaattttcttctccttaccggtgacatctgtataatacatttcacatttcaaggcattattggcaggccgccatgagatgacaatatcgtttccgtctgtgtatagtctatccatttttctgttcacaaggttaccttcatagaaatctccatatgcgtacccttcaataacagattcgatggaagagttacctttggcatcataagtggttattgagaactcatattgtccttcttccaggtcattaatcatcacttcaaacgggtcgatggtgttttctcgtacaacgtccagttccagtgatttatcttcttctccctgagactgccaacgtatcacacatttcttttgagttactccatatatgtatagtcctttgagtaaaattcgatttcttccggaagaagcggtcagtgaatcgacttttcctacatagatggtctctccttcattcagatatggctggatattttctaacatatcattgcaggatgaacatattccggcaattacacagagtataataattatatgtttcataaggtttcttttatttagtttcaactggttttccatagaaagtaacttccattaaatgaataaacttaactcctgtaaacgtgcttaatgctttaaaacggatgtaccgtactgccggagcatctgttgggaagatgaactcttcgcctgcactggcgtattctttgtcttcattggagatttgccctgcaggtaatcctgaaggtttgtaactttcacatgtagtcaataaggtccatccatcccaacttccgctttggtctggtttatcggcacgaccccaaacttcccattctttcatgttgccatgttgatataagaaagagtcatccaggcgttgccaatacagataacgacttaagtgagtggttactcctaaatcgaatgtaaaccagatgggcatcgtttggttgtcttgcggagagtgagccatatcccatccgtccccgtagttatgactgccattccatatcttgctcaaccagtgtccccatgcattcatcgggatatcattatccagtattacttcattgaatttccctttatccagttcatactcttcccatggtgttactgtagtgaatacggtatcggttgcattgtcccatctgtctctgacaattactccaaattttctctcttccggcttatatccgcgtgctgtgatattgatgtttttggcagcagtataattggtttgtactgtagtccattggttgagtgaatctggggtgattacttctatggcaaggtcacttgcagaaggattttgcatggatatagcaatacctccaaaagtttcgttcgtttccagagtgttgtatgcctcaatataagaaggtgtgagaggaataatattgtaggttataggttctccgatattttctttccggtctacagcataaaatgtgatctgtttctcttctgtgtctccgaaaccttctacctttaaactgctggaatatgcagaaacacggctctccatttctttaccggataccagtttgtatttggcaacgatgtacatgaggtcttcattgtctggacttctgaagttgatgatggcaccgccggcagttggcgtataagacaatacttctacttttcccgtggctatgccgtcatccggtccataaggtttatgcaggttatcttcctcacatcccattaataggaatgtgaataaactgattagtatataatatttcttcataataatgttctcctttcttattaccatcctggattttgctttaaattcggatttttaatgatatcatcatattttacaggccacaaatagtccttttgactatatttcttttgtgcgatattacgaactacgtaataatcttctgtgttctcctgatctatgctccaacctcttacaaaggtgttattataggtacttttggcaagtttccaccggcgtagatcatgatatcgtataccttcaagagctaattcaatctgacgttctcttcgaataatttcccgcattccttctttggtggatggcttattaggactggtagaatatttcttccatgaatctataaccccttctaatccggaacgttctctgacgatatcaatattagtatagacctctgttggcacaaattctccgttgtcagtcgcttcattcagtgcttctgcatacatcagatacaaatcggccaagcgaacgatggggaacgggtactcttcgataacttcggatgtttgagaaattatgtttttatagtaaatcagtttttttgcataatatccggtgatagaatataaggcaagagatgattggccgctgacctgtcctttcttcgcttccagataatacagatcatccggattgtttttaccatgaccgtaccaacttgctccgtcaaatcctagagttccgtaaaaacggggttcacggttcagatttagcttggcggtctgatatccttccttaacaaaatatttgtcagcttcggtagcggttgccacttggtaacgttcgctatagccattgctgctaatccattccttatcttcttcaatgggtacaccattgctggaatagaacatttccgctatgtcgagggtaggagcatacattcctctgcatgtatattctttctcaatctggtaggcagctaatcttggttggcaatgacactgtagatcacgggtatatgatttgccgcatccccatacaagttctctgttgaaacgttctgttacagcttgtcttacattcatggagtacatcagcccatccggtagatttgttaatgattcttctttgaaattataaagcccatgccctgcttctatagcagttttgagtgcctcttcgcaagcgtccgcagcaagtttccatttgttggtactatattcctgaggaaaataaggttctccatcccagtctttgaaattggcataatctgtatttccattgaagagtgggctggcagccagcaataatgttttggctttgatagccaaggcagcaggctgggtaagacgtcccatttcggttgcctcattctgaatctttagaggtaaatcaccagtagcctcatcaataaggtttacgatataattgacgactgtttctactttatcacgttttatacgaacttcttcttccgttgcagagatggggagattgacatctacaatgggaatagggccatataattgaaatagatagaaatgatagtaagctttcagaatttttgcttcggcaatccatcttctcctgtctgtttcattcaagtcggtaactcgatttctgtccgaaacattttcaatgaagatattacagtcgcgtatggcttggtataaaggttttcctcctttgaccccatcccagtaattgtttattgggtcactgacattttgtagcccattagcaattccgaatgcccatgtattactgaaataatgatcttccatggtgtaataccaaatgtcattgccagcggtcagacccggattctcatgttgattgccatatagcggtacacgtgcataacaggtagccagatatttttctgcatttgctctattgttgaatgccatttcgatggttgctatattatcgggtacgacgtctaggaaatctgtacatccgcataacgcgcttactgccaggacagcaagtatctctcgtattttcatattcatattatttaaaagttaacacttagaccaatattatatactctttgaataggatatccaaggccgttgccgcccatttcaggatcccacaatttgaacttactgaatgtgagaagattggttccatttaagtaaatgcgcacattgctgatgcgggctttgcgagtccatctttcaggcagtgtgtatcctagttccaatgatttcaggcgcatgaaagaaccgtcttgcatccaccaggtactggattgtgtattgtttggtacactttcattcgctaaacgtggccagaaggtatagatattcctgttggcctcagaccagtgattgtctgctatgacctttaggagagcattttgtgaatgggtattgttatcgtcatctgtatcgatgaatggtgatatacgattaggatcaatccagaaagaagaacgtgcattgccttggaagaaagcagaaagatcccaacctttatatcccgctgacaatccaaaaccataggttatttcaggagtggttggatatcctatggggaccttgtcagcttcagtaattttaccgtctttatcaacatctttatatttaatatcacctgccataagcttaccgccaaagttctgttccggtgagttggctatatcagcctcatcaatgaacaggcgttctgcaataaatccccattgctggctcaatttttgtcccagttggcttctccatggagttccggcacccagatagtcaggctcttctattttttcatatttgctggtggcataagtgaagttggcacgtccggtaacccataagtctttattgatggaatgtgagtaatctacagacatatctattcctttacccgatgccgctcctacattggcacgcacatcggctgtcaatcccatggttgagggtatgtatgaacgggtcataaggatactgttccgcttttcgtagaacacatctgcctgaatttccagtttgttgaatagccccagctcaataccaatgttcattttcttggctttttcccatgtgatgacttcattggcatagcgagtgacggtgataccattaatatggtttccccagttagttccgaaatcctgccctttattctcatcattcatgtttacgtttgacagatagaagaaacggtcattagaatcaccaatagcgtcatttccgacaagcccatatgtaaatttccatttcagtttattgattgtcttttcaagtggcttccagaacttctcatttgacatcaggtaacctacaccgaaagaagggaaaaaaccgtaacgttcattttcggcaaagcgttcggagccattgtatccaaagttaaattcggcaaaataacgtttgtcgtatgaataagtgaatcttccggatagtccttggtttttgtatggtagtgatttttgcagatctcctgcattgctattctgctgagtacgacgggtaaatactaacataccgctaattccatgttcatcaaagtctctattgtagctcatggcggcttccatgtagttagtagtggttacatcttttgctccttcattataattcaggtactctgtaccgccgttaggattcagtaaggtcaggctatatgtgttcttcgactggtcgtaggctcccatggcgtaataataaggattatagtagcgggaaacatccgaataaacatagcgggtggtactgataagtcctcgtacattcaatccttttgtaatgaaatccaggctttgttttaattcgccttgtgctacaatagaagtacgattatagtctttatatcctttgaccatatcggcatacggatttatgtaagtgccgtctccataattaccgaacatgaggtgtgtgttgtttgtatactcgcctacgttaggaaatgatttcgggaataagacaggacttgtcttcattactttattatagagagcatcaccgccgtctattggtccgcgataatcatcgaatgaaccatttacacggatgatggcttctgttgttttagtcaggttaatattgatattggaacgaacggaatatttctttaagctgatattgctattgaaattgttttgcttgtctacattcagtacaccgttgtcattgaaaaaagaagcagcaatatagtaccttgcaacattgccacctccactaatattggctgttacacgttggttcatagtgtactttttgaacatttcgtcataccaatcgacagctgggaaagcgtatgaattcagatttctgatggtgttatctatctttgattgagaatatggtaatactcccaatgggttgcgggttttgactgcttcattgtgaagctgcatgtatgtgatcggatctgctgtctcaatagtacggaccggcgtagaaactgagttttctattctgatgttgactgttgctttaccttctttaccttctttggttgtgacaagaattacaccgtttgcaccacgtgcaccatataatgcagtagctgttgcatctttcattatggaaaaactggcaatgtcatctacatttagacgtgcgaggtcggcggtggtgagttctacattgtcaattagaatgagaggacttgctgcatatccaaatgtcgttacacctcggatgaagaaacttgcatcatcttttcccggttcaccactggtttgataggctatgactcctgacattctaccggcaagagctgttgtcaggttactactcggtactttcaattcagacggtttaacggtagtaacagaactgataacgctttcctttttctgttttgcgaaggctacgacggttacttcatctagttcgtcaacttttggtttgagatgtacagtgtattcgttattagtggttatcttaacattttcagtttgatacccgagaaagctaactaataattcatctcccacgttcaccgaaattgaaaatttaccgtcgatgtcggtgatgcatcctcttgtcgagcttttaacaacgacagttgcacctgctacaggggcatttgtttcgtcatagatagttccttttacttctttcttctgttgatccactgtggtggtgacatagactgtcgcatttatgtgctctacaactgggaaaaaaggagctcctgaaaagcacaagatcaaaagagcttttcttaggccttgtgttgattgccaataatgttggctggctaatcgatgtttcataataattgatttatattagattaataggcatagttgttgcgttccagaaaaaacggtaatacaactttgcgtgtaactgttatattctaggtacgaaaatgagtgctatttttttgttcttctagaggttgaaacctggtaaatcttcttttagaaggtccctgtcgagaatgataataaggttaataaagttctgattttcataggcattagttttgtttatacttatatgcaaatgtatgaattaactatttataataataggataaaatatggaatgtatagcaaaatatcgacaattattcctttttataattaataatgtaggatttaatcgataattatatgaaatatatcgattttagcctgtgcctggattattttatctgtaatggcaataatctacatctacagagccagtttcttttttatcattaaaacaatagattcctatccggtcacccctgtaatttccccatgtcaactggtatttctcaccaaaaggcagaaaattatcgccatccagactatagtagtattgggatttgccatccattccccattccgttctgaaccagataaattctgaatgtatctgaattcctttcgttatattaccatttttcctgtattcaagataacaggcgtcttcttccttcactataccaatagccgagtgttgggaagagaaatggcagagtccatttttctgaccatcctgcatattggaaatatccatttttatagttacatcgttattctgttttctaaaggtgcgttgcgtgagtgtattgcctgcctttaataaattattagtttccaaaggtcgataggctttcagacgcaaccatcccggacgttcagtaagggaaaagtaatcttttcttggttgatagttccattgccactgcggagcaagacagtcctcatcgaagtcatcactacgtttgatggataacttttcagtatgtttaaaaggaatctttccatcccatttcattgtaccgatattctgaggaagcacttcacctggtatgggccaatcctgtacccatgtaacaggtaacagactgacaatccgcccgctccagtctcctgttccatgatgggtaagaaaataccagttattgtcctttcccagaataatgcctccctgattcggttccatggcctcacaactgggtaatgccaattgtttttcttccttatagggtcctgccaattttttggaacgttttgccatgacgtagcgtcctactcctggcttatgttcactgaaaatcagataataccagccgttcaccttaatcagcttactggcttccctgccactacccgaattaatgagtttcgcagatttccgatcaatgcttttcccatcctcagacatcttaaaaagataagtcttatatccgtcggcaaaatgagtgccgacaaagtaagctttcccattctcatcccacattgcagtacaatcatcccaaccgggttcgggaagcaacggtgtcagcggctcccatgggccttcggcacgtgaagcagatgtcataaaatagccttcatcgggggtaccgaaaaataaatagaagcgtccgttatagtgccggagtgtccctgcccatacaccacggccatagcggtccatgcgggtccagtttaaatcttcgcttatttgtgtcaggtcatctatgatatttccatagatttcccagtttacaaggtctttggaatgcagaagtgtcattcccggggagaattgaaatgtggaggatatggcataatagtcttcacctactctgatacagtcaatatcgctgtaatctgacggaatgatggggtttatgtaggttccgtccccttgatcaccccaatttttccagttaccccactcaacggattgctgcgcattcaggtaaatactaaaacaggtacaaaagagtactgataataaatgtttcataataacttcgcattaagattaatgaatgttccattcccagattcccgcaattccttttaaaatttttattcggagatagcggtatttcttattcggagtatcaatgtgtggtgactgtatttttatatcttcatgtcctccacagacttgccatacctttccatcggcagatccttcaagcaggtaggcatgtcctgccgtcggacgtacaaagtagacttcactgcggtgcacctttttagctgttcctaaatctgcaataatccaattctctttatcttggtcagcagccatccaacgggagccattggcaccgtctattgcaaaagccgggatgaaatactcagtacgacggcatgaaggatctttcatcggttcgatattcaatggagctgatatgctggacgcataaactgtatctgtctttaattttttctcttgtttaatttttcgtaaggcgcctactccttccagggtaagatcgacaggacggattgtgccgtcttcattgaattccaaccgattaacatatgtctgtcggtttgtgctacgccgtccaaattccagataagcaaaatagtaatcatccgttccttccggattgaaaacacaaccatgccccggaccgaaaacgcctctttcataatttgttgtagaaataatatcctgttccggatattcaaaaggtcccattggagatgtcttgctcattacataagcatactgatatttttcatctccgccgatggtgtacaaatagtaatatatgccttttcttttaaagaagatgggaccttcggaatattctttccggggagtagtaataatttgtataactgaatctacggtgatcatatctttgcccaatttagccacatgacggcgtccccaaaatatataagcctgaccgtcatcgtcaatgaaaacctcggcatcgatgccaccgggatcttttgtctgcaataaagtagaagacgtgaaaggcttgtggaactcatcttttccgcgggccagtttaaacggtccctcggggttattagaaacagccggatacatatatccattgatagtaggatatatataatacttaccattggcaaagatagctttacttggagcccaatatttctctttcattgcagaagggaaataagtaccttcaaagctccagtgaacaaaatcatttgacttccacacaacaggtggtcctgaagtttctagtccctgaccatatccgtcggtagtggcgtagcagtaaaacataccctctatctcttgaatgcttgcatctgcaatcatgtcaggtattaaggcattaccgaaaggattgtttgcttttgtctgtgctgttattggttctgaaatcagaatactaaatactaaactgataaaaatatttttcttcataatattacaatcgtttttgattagatcaactgttagataaagcaaaataaagcctttctatcaaccagaaggtataaaaacaagttataaaggggataaaaaactttcatgatatgattaaatacccaaatgaaaggatttgaatatcgttattcatatagatagaacattcgttccattaatttccatttttcagctgaggtgctttctgcgacacactcttggaatctggatacataattctcccactctgcttgtctgggtaagtgagataatttatccatggcagttttccaatcaaaatcaagtggggtttctacaatcatgaacaattttgccccctctatatatatttccatttctaaaatacctactgaacggatgccttctctgatttccggccaagcttctgcttggctgtgacatcttctatacatggcaatcaaatcaggattatttttcaagttcattgtttgacaatacctttttacgcgacaatggtattcctttactctgtatcctttatctttcatattctttttgcgtatggg

SEQ ID NO: 6281 - DNA, 47250 bp, Unknown
  gut microbiota DNA sequence
gggtattaatcaatgtgcaaatgttatggtttttacttatgatgtttgcaacatataaatatattacaagtaaagaatattaaattcctagaaagacaaatattaatctaaataaaaatgaataagttctattcggacgagaagaatattcaaattcttatctcgttattaaaatctcatgggattaagtatgtaattgcttcacctggtaatacaaatttaaccttagttgctagcttgcaacaggatagcttttttaaaatttattcttcagtagatgaacgttctgcggcctacatggcctgtggtttagctgctgaaacgggttgtcctgttatgattagttgtacaggagcaaccgcttcgagaaactatttgcctgcattgactgaagcttattataggaaactacctattctaacgattacatctagtcgtagtaatgcagaaataggacatcttatacctcaagtaacagatcgacgttatctaccaaatgatgttgtacgactgagcgagcaattacccattgttaatagcagccaagatgaatgggaatgtaatattaagattaatagagctttacttgaattaactcatagagaaggaggaccagttcatcttaacattccaactatttattgtcctacttacaatacaaaagagttacctattcaaagaattgtaaatagattgtatgatggttcagaattgccttctttgaagggtaaaagggtggctgtatttgttggctcacatagtatttgggatgctacattaatatcacaagttgagaaattttgcgaaaaatataattctatagttatatgtgatcatactagtggatataatggtaaatatcgcatccaatattctttaataggtggacaagaacaattagttcattctttgaataagttagatgtattgattcatcttggagaaatttcaggagattatttttctacttttggcaagtttgttgtaaaagaggtttggcgtattagtcgtgatggtgaactttgtgattcttttcgcaaattaagatttgtatttgagatgcaagaagatacattctttaaacactataataaatatgagattaatacagctactaatacgagttattatgaagcatgtcaatttatgtacgatcatctttatgatatgatcataaataaagctgatttaccattttcaaatatttggattgcaagccaaatagcaaacaaaatcccttctaatagttctgttcatttttctatccttagtagtctcaggtcatggaactttttcgaattcaataaagatgttacttcatttagtaatgttggaggttttggtattgatggctgtgtatcttctcttattggtgcatcaatagctcaacccaataaactatattttggaattgtaggtgatttggcattcttttatgatatgaatgttttaggaaatcgccatctaggaaccaatatacgaatcctgttaattaataataatataggagctgaatttaagttgtattgttatcctggatacaaattaggtgatgatactagtcattatattgcagcagaaggccattttgggaaaaaatctccaaagttagttaaacattatgctcaagacttaggctttgaatacatttctgcatcatcaaaagatgaatttattaagcaaatagaaaaatttatatcacctgctccctctaacaaaccaatattattcgaagtatttacagattatcatgatgaaagtttagctcttgaaatgatacgcaacttggattctgatgctttaggtttcttgaaaaagaaaataaaagagaatgtaaattacgctttgattgaaacaattcgtaagttctttcaaatttagcgaatgtgaagaaaataggaatacttacccgtcgagcgggttttaaccatggctcttcactgcaagcatatgccatggcgaagtttattagtgacttaggttttgaatgtaagattttaaattatgatgaatatagtggaaatccacgttggaaaatacgtccttatattgagaatattcaatggattttttttcgtccactcatttatttattagctccttctaaatattattatctgcatattagaaaacaacaatatactaaatttgcagagtttgaggatactttttacaatctaacatcaccaatattgactaatacagaagcactccgaaaggcttctagttcatttgatgcgctagtctgtggtagtgatcaaatatggtctccactctcatatgatcctgtttttctttttaacttcctgaatgacaacagaattaatactgtagcatatgctccaagtattggagtttctgatattcatatgataagtgatcagcaacgtaaacttatgtgcaaaattaaatacctttcatgtagagaattacaaggttcagagatggtaaagaagataacactgcgtgattgtcaaactgttcttgatcctactttaatggttaatagtacgcattgggtaaaaatggcttcatccattcctaatgtagaaatggaaccctatatagtatgttatttcttaggaaagaatgtacatcaaacgtatatcgatgaattaaagcatttgactggatacaaggtacttaatataatgatgtttaatcgcttaaatgatttgcactgcgatcgaaccgttaccgatgtgggccccttagagttcttgaacctcattaaaaatgcttcatatgtatgcactgattcattccatggtaccatattttcatttcactttaaaaaaaaactatctctgtttgaacgctttaaaagtgaagaaaaagataatcaaaactctcgaatttataccttattacaaaacttacagtatgaaaaagtactgattaaagaagatgatttgccatgtagggactgcgagattgattatgctaagtgcgaagctgctctcaaacagtggaccgatttatccaaatcatatattttaaatgcactaaatcaaaattagatgaattttagcaaaatgaaaaacaataagaaaatttttgtttctgcatgtgcttgcaaccctaatatgggttctgagccaggtgttggatggcattgggtgcttgaaatggctaaatactttgaattatgggtaatggttcacgaagctgctagagctgatatagaattagcgattagtaaaatgaataatccaccaaatatacattttgtctatacgcgcatcccgtttaactcttggtttagtaataatggctcatttcgcttggtacgtacctattactgtatttggacctatctttccgatagtgttgtgaagaaaacaatgcaagagaacgatattcatatcttccatcatttgacttttggtaatgctatttgggctgttagtcgttatggacaaacacaaaagtttatatgggggcctattggaggggtagaagttatatcagaagaatatgctaaacactatgattttaaaagcagagtttttgaatggttaagaagaacgattgtcaagagcttaaaatatagaaggggttatcttaatcgatgcaaaaatgcagatttaatcctctgcaaaaccgaagccatgtttcagtctgtgcctgagctttatagacataaagcaatcctgtttacagacgtagcagtagaagagaatattatagaagggacggatgtagaaatagcacattctgatatagtagaaattctctctgtggggcgattggatgcatggagaggattcgatcttctcattgaagcttttgagaaagccaaaaagctttgtcctcaaatacatttgactattctcggtaatggaatgaaccggaaacgattacaacatctcattcaagaaaagaacttacaacaagattgcagtatgttgggaggagtcccgatagaacagtacaatagaataatgactcaatctgatattatagtcaatagttgcctcaaagagggcgctgttactgttagttttgattctatgcgatatagtaagcctttaatttgtatcgattcaggtggttttacacgatatttttcagatgactatgctattgtgcttcctcaacagaaaagagagtcattagtacaatctatgtgtgatgcaattgttaagttggcattaaatgtggatttacgcaaagaaatgggaagaaaagcacatcaagcaggcaagcaatttgtatggaatgaaaagggaaaacaaatacgagatgttatcaatagctatcttcatagctaaaacaattaatgtttgtacttatgatcaactgccaaaggaaaatcatttgtttccaccttttcaatgattatagtggtagcccgaaagtattgcatatggtgttggagaggattttaaagtatgactataaggtggaacttataacctcatacaatggtatactagatgatttatctaaatatcccaacttaaaaaagtatagctatatatatcgtttttctaataatccgatagtgacaatgtcacgctatgcgatgatacaactatatactttcttttttgccttccgatacttgtccaaaaagaatgtggtgttctatatcaatacgctattacccgtaggaccggcattggcaggacggataatgggaaagccggtggtatatcactaccatgagaatgcttttgcgaaaggaaggttctataaggcattatgccgctgcatgcaaacattggcttcagaaataatctgtgtgtcagactatcaacggttgttcttgaagcgaagagatggggtggtggtgacacccaatgctgtgtccgaagtgtttgtaaatagattgatccctgcacccaaagaggcttttgaacggaaacgagtattgatgctcgggtctttgaaactttataaaagtccgctagaatttattgcattggctcagtatctgccacaatttgcctttgaactggtggtgaatgacacacaggaaaacattaatcacttcttaaaagagcataagataaatataagcaaaaacctcactatatatcctcgacagaatgatgttgtacctttctataatcaggcttcactcgttttaaatctttccgataaaaaacaggtagtggagacattcggactgacagcattggaagcaatgagtaccgggctaccagtaatagtgcccacagaaggaggaattgcagagatggttgtggatggagagaacggttacaagatagacgtacaaaatcttaatcagatagccgaatgtataaaaacaattctatctgacgaaactctttatatggaattagcccaaaatgcactcgcttattccaaaagattcagtgaagcaaagatggtaaatagcattgaaatgatactaaacaggaaataaaacaatccttttatatttatgaaacaagtagctatcgtaggcatccaaggtgtgcctgcaaaatatggcggctttgagactttggtggagaacattattggtgataactgttgctccgaagtccgttataccgttttttgtagtggtaaggattataccacacgcatgaaaacctacaaaggagcacaactgaagtacatcccgctattccatgccaatggggtacaaagcactccttatgatattctgtcgatgcttagatgtttgcgaggttatgataccgtaatcatattaggcgtatcaggctgtgtttttttgcccgtcttcagactgttgtatcggaagcaattaatagtgaacattgacggattggaacaccggagggccaaatggggtaagtttgccagatggtttctgcgaacaagtgaagcgatggccgtacgctatgctgacgtaatcatagccgacaataaaggaatacaggactacgtatggaatacgtatcataagaaagccgaattagtagcctatggaggagatcatgcacaaagaaatgtcaccgaagaaaggcagaacgaaattctgaggcaatacggaatcgctcccggaaactatgccgtcagtgtatgccgtattgagccggagaacaacagccatctgatcctgaaagcctttgctacttctggaaagaatctggtgtttgtgggaaattggaaacggagcgaatacagccgacaactcaaagaagaatattgtggtcggaaaaatatacagatggtagattctgtgtatgaccttgatatactctatgcactgcgcaaccaatgcaggtgctatatccacggacatagtgcaggcggcacaaacccttcgttagtggaagctatgtttttcggcaaaccgattttagcttacgacgtgatttataatcgtgagacaacagaaaacgaagctcattacttcaaaacaaatgaagaactggtagaattgctacatgacagccccgaggacggatacaagatgcgggagattgcaaagcaacattatacctgggcttttatagctcaacaatataaagcattactttcatcccacaaataactaaccatcttcacaaaagaaaactcatcagtaaaatattttataagctattcgtactgatcgaattatttatagcagcaaagtgccagaaacaatcaccctacttagtgattgttttcggcactttctttatagaagagccataagaaggaaaacattcatcattttcctaacgtccagttaatagcattcctgaacatcttcgtgaaatcttccgtctcatacagcctcttgctgtgccctatctggaaataaacattgcgcgcttttttaccttcgttcacccataccacaggatgatcgcccatcttgatatccgaagcaggcgtataggtagcctcatcaacactggctagcacacgcacattcggacgtggactcttgtcataagtgtaccactcatcatcaggcaccacgaaagaagcctgtactcccttcatcaccgggtgtttcttatcctccacaagcaccgtaccatcagcaagcggcgctatataattctggaaacgtacaccacccataaaatcagagaaccattgccacagtggaaaaccgtcaaactcacccaacaaagtggcatgatggaaaccgatccaaccacctttaccttcctctatatatttaacgaaagcatcttccgcttctttcggccatgtataaggaggataatccaactggataatcagattgaactgggacagataagtctccgtaataggtttggcattgtttatctcggtaatactgaaattcatctttctactttcatcagtcagccacttcagccccgcatccgtaaatccaccatgctgaccacctctttccgtcaagaccagcaccttagttctatgcttcttaccaagcagattctcagccaccgtacgacgcaaatctccttgctcattatcaccactatagtcccaatacataccacccaataaatctctatccaagatatattgacacttgattgccagtgaacgggcattttcaaaaccgaataccagcgtatcatttttattaaccagataaggaacctgggcaaccgtatcccacttttcagtataatcaccaccggtacttcctactttattaaaatcctggaaactggggtatccatctccgccacgaccataaaaaggcatccccatcaccagcatggaaggtggcacaccggctttcagatgcgcagtaacagcctcatccgacgtaatgcctccactgtttgcagaccgataaagtgccgaatggtgtttcggtgcagaggccatgtcataagccatgatattcacaaagttaataaaaggaagaatagctttgaagtcgatatacttcgctgaagccacagtggcaagtgtcaattccttctgatcacctatcgctgccctgatatctttcatcagaagtgtaaagttctccgtgtcatcgggtgaagctgaaatgttcgccattgaactcgtgggatattcccaatcgatatcgataccatccagatcaaattccttcactacccggtcgcaatccttagcaaatgcccggcgatattcatcattggcagccatttcactgaaacgtccactcccccatccgccgacagacagaagtactttcaattcgggattttgcttcttcaggtccacaatttgtttcaagcgttcttcattgtcaatcctgacgccatcaaaactttcgtttacatgaccgaaagcataattaatatgcgtcatgtactggggttctggcacgatgttactccaagaagttacatacgccacaatcactttggaactcaaggggttcgctgtgctttcccccgacttggtggtgctacatgaagccaatatggctaaagcagcagccatcatcattctaatctttttcataagtattataattaatcagctgtttgacgaatacgtgaacctatcaatgcgtaatagagcatgaatatctcgcccaaaagtacaataaaccaagaccatctccaacttccgagcacatcagccagtattccctgcaacaaaggcaggatggcaccacccactacacctatcataaataccccggaagccacagatgtatatttgcccaaatgggctacggacagggtaaagatggctccccacataatagaatggaacaacccgactgccgtcagcaaccacggattattcagaaggatagccaacaaagcaagtgctcctgccgaaaccgtagttacaaccaactgcacacgaggagaaatcttactcaaagagcttcctaccaaccgccccacgagcatcccgccccaatacagtgtagccattaatgccggagatgcataattcatttcaatggcatacagattgatattggcaccgatacagacttccacgcccacataacagaatatagcacagactcctaaagtgagatgccggaacgaccagatactcttttccagcttctcacctttctctatccgagttccctgtatatccggcaaagatagtttcattaacaggaaaacaatcaaagaaatcaccactatcagcaccaggaacggaatcattaactgatctatccggatatcttccattgccaagccaccgaaaacaacacccgtaacaaaataaggtgccaaagtggttcctacagaattggctgagccaccaatggcaagacgttgaatggcttgcgtacctttcacatggcaagccgtgagataaggattgataaccacctgcaagatggtagcagaagctcccaccacaaaagaccccaaaaggaaaataaagaaaccaccgggaataacatttcctccagcatgccagttggcttccggaaagaaaaccgtaaaataagaggaagcgaaaaataatcccaaaccaaccaccattaccaacagtccgcgcatcagcgtacctttatagccatatttactaatccaggacgaccctacccgaccacagaccggataagccaggaaccaggagaaggtaatcaatgtggcgaatgtgtttttcaggccacccacttcggcaaggaatgtttctttcagcggtccctggaactgagtattggcagtagtaaggaaacctacaatgaagaacaggaataccattgtgataaatggtcccatatagttcacttgtttttcttgttgtgtcatagtatcatgtattaaataaaagaaattcgcaattcgggtgaagctgaagtaccgatgcaggaacttccggtgtaacgggtccctccagcattttcctgacgatatccgccttgttcgcacctttggcaaccaatacgattttacgggcctgcatgatgttccggattcccaaagttgcaccacctagttctttctccggcggtgtattcgtttcccgtcggatacgttcttccagttccgtattcatttgagtcacccatgtttctcctcctaagggagaaccaggttggttaaaacccagatggccattctcacccaatcccaaaatcaataggtcaatgcctccacgactctctatttctcgctggaaaagcttgcaggctttgtcaaaatcatcagagactgtaggtagcatcaggaagttgtcttcttggatgcccagcgtatcgatcagttctgtcttcagcattgtgtaacatgcacctgcatactcacggggtacattagtcacctcgtccagtccgaagaatgtaacagaagaaacatcaaaaggatatcgagaatagatttctccaaccaagcgatgcaggttgccggtagtacgccctgtagaaagtccgataacactttccggcttattcagaatttcaccaataatgcgccatgcagcgatacaatcaaactctttttcactctttgctatagttattttcatgagtctacttttttatcactaatcattaatcactaaccattaatcactatttacatattcatcgccactgcgcccgcacccaacaaacctataaaacccgggttaagtttagtgataaccacgccattggttacaaagcgcatcgtagtaggatgaagtttctccagtattttctcatgaatatatccgtcggacacaatgccgccacccaataccaccgtatcaggatcagtaacccgtaccagattcatgataagatttgccaaagcttccgaagcattttcaaccagagccacacacaaaggatctcctttctggcttagcgcaaagacttcgctgatcagtactcgttctcccttttctgccgggatatgcagattggtttcataccggttgcgaagaagacgggcgcaattatcaaaaccgataccggcagcaatggcctccacacaatccattcttccacaaccacacttaatgccaagattcactcccacacgcacgtgccctacctcacccgcattgaagtgactgccacgtatctgcctgccattgataaccgtaccgacggcaatacctgtacctacattaatataaataaagttcttggatatttgtccgaatccccagacacgttcagcgcgagtggcacttttcacatcattatctatatggcaggggataccataaatatccgacaattcctttgccagcgctatcggttgcgtccgactcggatcaatctgtaaccaaatgccctgattaggatctacacgccctatcagcccgactcccataccgacaggtttctggtcacaccaacccaccgtacggatataatcatcgagtgacgactttatgatttccgaagctgcttgctggttaaaatatccggagtcatatttcttataccttaaaatattaccatggctgtccacctcaccaatcagtagcttggttccacccaaatcaagacctaaataagtttccattctttattgcgtttttaatattgtttactgtccacaatattacgcactatcaggaaaacgggagttgattatctaacaaaaaaggtttgatacctgtccgtggtggttaaaaagctatctttaatactttaaatcttgctgggactcgtaccaaactgctttttaaagcaagtactgaagtattttgaatcagaaaatccaaccatggaagatacttcaccaatcgaaaatcttcgggaagccagaagttctttcgccttattcagacggacaatacggataaaatcattaggtccctgcccggtcaaggccttgatcttattataaacggaagtacggctcatgcccaacatacggcaaaagtcgttgatagagaattctgaattagaaagttcttcatcaatcacttccatcactttatccataaactccttgtccaactggctggtatagtccgtatcttccggtggagtatccatggacagcaccgtatcgcgaagatgctgcctgttctggaggatattccgtatccgggctttcaggacagagaggtcgaaaggtttaattatataatcattcgccccggcttcgagtccgaatatgatattctccctttcactcagagccgtcaatagtatcacaggaatatggctcgtatcgacagaagacttcagtatacggcacaattcatcaccttctaacacgggcatgacaatatccgaaataatgatatccggattgatctcccttgccatctccaaagccttcccgccatcgggcactccgattactttatattctgatgacaaactgttcatcagatactccctcatatctttatcatcctcagccagaagcaacacattcttaccggcatcttcctgctccgggaaggtatcaacagcgggtatttcctgcgtattttcttttcgctcaacaactatccccgactttatcttcaacgggaatgtaacggtaaatatcgtccctttaccttccgtactgctaaacgaaatatcaccgtgatgctgcttcacaatcctccgtgtaatcatcagcccgatacctgaacctgtttcctgaaagttcatggcattctgtgcccgataatactcatgaaagatatttctttgttcttcttttggaatgccgatacctgtatcttttacttcaatcgaccatttcttcttcgttgttcttaccgtaatatagataatccctttctccgtatatttcaaggcattcgaaaggagattgtccacaatatgatccatcttatcccggtccatccacacctgcggcatgtccgcctctgccttcaactgaatttccactcccttttgcaggacggccatgtggaactccgctatcttttcttccagataagctttgatatcgtaaggagagactttcagacattcggcatgcagttccgttttctgtaagtccaacaactgagtaaccatactcaacagtttctcagcattcttcacagctaccgccactgtcttcttactttcttccggaagctcccgctgtgcttcaagttcgctcagaggtgcctttatcaagctgatcggggtgcgtatatcatgtgctatgctgataaaggaacgtatcttctcctttacccggtcttcattggctttatgcctccgatactgcacaaagatataaacaaagacagaaaacaatataaaataaaacagcaatgcccaccatgaaacccagtaaggactactgattaccaccttcagactgcgctcccctatctgttgcccggtatatttatcgaatgcccgtaaccggaatgtgtatgtaccggaagaaaggtccatatagttcacgctccgcaccgaattggaatgttcccattcttcattatgcccctccaacatatactcataccttattctgtgcggagccgtaaaattgatggcagagaaagaaatggagaatgaattctggttatagttcaagccgatcttctgcgtgtcgttgatattagtctttaaaagggaacctttcatacccgccttcaccgattcataaagcaatttaaaatctgtcagtatcagttcgatagggccatgctgtccgaagttcagcgaaggagaaaaggttatcactccctccgccgtaccaaaagcgaggcatccgtcgtccagcttgaaggctgaattagggttataatatccccaggtgatatccagaaaatcgtttgcactgatcagaatatcgtttgataagtccaggcaatagagttctttttccgtactgaaccagatacggccatcgttatcttccgacaggctattaatggaattggaagcaagaccgtcatccgtagtataggcacgcgcctctcctctatcagggttgaaacgtaccaatccttctccgtcggtggcaagccatatatctccggatgaagattgcaataagcatcggataggatagtgcagggaaatatctccgaacttctgatgccactgtgcttttcccgtagctttatcgaaaacagccagaccactacatcctgctatcagtaatgaaccgtctctaccggatttcaagtctcctacacaatcaatcggataataggtataagtattcgtcagcatattgtagcgtgtaaattcgccttcaataccacctatccaaagataatcaccttccgcatggatagcataaatgtaatcggtggccacacctttgtccgaaccggttttccgtttttccatcttttgcaccttgcctgttctcttatggacagcataaagaccgataccatatccaccgacccagatgtttcctcttgaatcttcagcaagagccaatacaactttagaaccatgctccgtaccatccagaaagtgcttccattgacgttgtttgtgccggtaaaggctgactccattgtttgtgccataccagcaatctccctcggaatcctgaaatatgacattgatatgatccgatttcagggaattagtattattctgttcatgcttcattctccttacatcaggaatattggggtctaaatagctgatgccattggtggaagtactcacccaaatgccgccaaattcatctacacaaatatcagaaacagtattgccattcagacttctttcatcatcttcattggtgatataatgcttcagaagccgttccgtagtcctgtctatctgaaaaacaccggcaccgtcagctcctatcagcaaggtattatcaggaggctgtgcaaaagtgcgaatgggaacatgggggatgaactctttgaaagaccgcaccttccttgtcgatttatccacgacaaaagccccgtcggaaaaggtacctacaaataatttatcttcgaaagcacacaatgattcgacatgcatttccgcgggaagaggtatcgcttcctctgaagaaaaaccggttttattcgctcgcttcaaccgatagatacctttattggttccggcacagaattcagtatcatctatctgcacaatgcaattgacgcattgtcctttcaacccggcaagcaataagccggacttttcttcccaacagtaaacacccgttgacatacacagccaaaggcggttatccacatcaaaaaggatattattcaagaccggaaaagaaagatatccggatgcatcgacacgcagttgaaaagcatccgtccgattatcgtacgcgtatatctttccgttcttcaaggcaatccagatattccccgaataatcacaggtcatggtagtggaagacaggatatgatctttggactccaccgtttcgtccagctgatagtgttttatttcattgccgtcataccggtctacccccatatgggtataggcccatataaaaccggcagaatctttactgacctgaaatacctgccggctgctcaacccttcttttatactcaggggacgaaacgaaccggcaaataaagtgaagcattgaaggagaaatataagtaaggtgaaaatgtattttatcataatatcgttattatctgtccgcattacacatttataggtttcgcggatgcaatattagacacaaatataaaaaaagtggtttaaaaactatctaaataggtttgatttctattacttttgtccatcaaaccaataaaccgtgataggccatgctcagcaagcttaaattaaaccagctctatttcaaagacacgcagttcgctaacctgatgacgcgacgcatcttcaacgtccttctgatagccaatccttatgacgctttcatgctggaagacgacggacgcattgacgaaaaaatctttaatgaatatacttcactttctctgcgctatccaccccgctttacccaggtatcgacttgcgaggaagccttggcacaactctctaccgtaccgttcgatctcatcatctgtatgccgggaacgggagataacgacagtttcgatgtggcgcgacacatcaagagcctttacgaacatattcccatggtgatactgacccctttcagccacggtatcaccaaacgcatcgccaacgaagacctgagtcctttcgaatatatcttctgctggctgggaaacacggacctactggtgtctatcatcaaactgatagaggacaagatgaacctggaacacgacgtaaatgaagtaggtgtgcaggtgattctggttgtggaggacggtatccgtttttattcatccatattgcccaacctctataagttcgtattgaaacagagccaggagttcagcaccgaagcattgaacgcccaccagcgcacgttgcgtatgcgtggacgtccgaagattgtactggcccgtacgtatgaagaagctataggcatttacgagaaatacaaaaataatatattaggagtcattaccgatgtccgctttccacgtgtggaacgtggtgaaaaggacggacttgccggtatcaagctttgcgctgccatccgtaaggaagatcccttcgtaccgctcatcattcagtcgtccgaatcggagaatgcgctttatgcttcaaaatatggtgccgcctttatcgataagaattccaagaagatggacgtagacctgcgccgcatcgtatcggacaatttcggtttcggcgactttatcttccgtaatcccgacacactggaagagatagcacgtgtaaagaacctgaaggaattacaaaacatcctttttgccgtaccggcagagtcattcctttatcatatcagccgcaaccatgtcagccgttggctctattcacgcgccatgttcccggtagctgaatttctgaaacctatcacctggaacagtttgcaggatgtggacgcccaccgtaaaatcatcttcgaagcaattgtaaaataccgtaagatgaagaaccagggtgtggtagccgtgttcaagcgtgaccgtttcgaccgctactccaacttcgcccgcatcggtgacggctcattgggaggtaaagggcgcggcctcgctttcatcgacaatatggtgaagcatcaccctgaattcgaagaattcgataacgcccgcgttgccattcccaagaccgtagtgctctgtactgatgtcttcgacgagtttatggagacaaacaatctgtatcaggtagccctttcggatgcggaggacgatgtgatcctgcgatacttcctgaaagcgaagttacccgaccgactggtagaagacttttttaccttctttgatgtagtgaagtctccgcttgccattcgttcgtcttctttgctggaagattcacactatcaaccttttgccggaatatacaatacgtatatgatcccctatctggatgataaatacgaaatgctccgtatgttgtccgatgccataaaaggcgtgtacgcttcggtctacttccgagacagtaaagcatatatgcaggccacaagcaatgtcatcgaccaggaaaagatggcggtcattctgcaagaggtagtcggcaaccaatatggtgaccgttactaccccagtatgtccggtgtggcacgctcgctgaactattatcctatcggtgatgaaaaagccgaagaaggtactgtgaacctcgccctcggtttgggaaaatatatcgtagacggtggtatgacactccgcttctctccctatcatccccaccagatattgcagaccagcgaaatggaaatagcactgaaagagacgcaaacccgtttctacgctctcgacctgcgtaatgccggacacgatttctctatggacgacggcttcaacctgttgaaactgcacgtgaaagaggcggaaaaggacggagcactgaattatatagcctctacctacgatccctacgaccagattattcgcgacggtctatatcccggcggacgcaaagtcatcaccttcgccaatatcctgcaacacgacgttttcccgttggcacgcatactgcaactggtactgaaatacggtgaacaggaaatgcgccgccccgtcgaaatagaatttgccgccaccatgagtcgggaacaggacaaatcgggtactttctacctgttgcagatacgccccatcgtagatacgaaagagatgctggacgaagatctgacagccatacctgacgataaagtactgcttcgctccaacaattccctgggacatggaattatgaatgatatctatgatgtcatctatgtgaagacggatgattacagcgcatcacacaatcaagagattgcctgggagatagagaaactgaaccaacaattccttgatgaaggcaggaactatgttctcgttggtcccggacgttggggtagcagtgacacatggctgggtattcctgtaaaatggccacatatcagtgccgcccgcgtcattgtggaagccggattgacaaattatcgcgtagatcccagccaagggacccacttcttccagaacctgacttctttcggtgtaggctacttcactattaatgcctttatgaatgatggcgtgtatgatcaggacttcctgaatgcacaaccggccgtacacgaaagcaagtatctgcggcatgtccacttcgaacaacctgtaacagtaaagatggatggcaagaagaagctgggtattgtactcttacccggtgagtgaacatgcaaaagatgccatctgcatcagtaggtattagtctttctgctgatgcagtataatcatcaccacttcgctgggcgcaaagagtcggatgttcttattggatgtaccgatgccattggttataatcatcggtatgtgatgcgagttgtatttcaatccggtgcggaaacgcttaccataatgggatggaatgattggtgcgtacaagccaaatagagtgacctgtcctccatgagtatgtccggcaagtacgagatcggtattcgtaatgggaacatcttccgcatagtcaggcgtatgcgtcagcagaatgacaaaatcatcgggtgaaagtccaagtgtgggagatgtgccattcttctttaaattgaaaggattacgtacgccggcaatcaaaatttcttctccgtcccgtctcaaagtatctactttatgttccagcaagtgcataccgtacttctgcaatccacgtacaatatcatcataacaagcttcatagtcattattgcccagtacgacatacgtccccatcggtgttttcaccccggacagggcagccaaaaggggctgaacatattcgcaaccttcatgcaagtcaccacctatcaacaatgcatctgcatgctggttattgagcaacttgactaaattagccaatcccttctctttgaaaagacttctataatgcaagtcggatataaaggcaatacgaaaaccatcgaaagcagttggtacatcgggatgggtaaattcataagtccttacccgactgatgcctttatatccggaaccggacttggaagacgaaaacatactgctacccgacttacaggaagaaaaaaatagtaaggaaaggatacatatataaaataaattattcatcataggcaagtatattattcatcgcaagtgagcacattattcatcataaacgaatacaaagataggcattttctgtatctttgctacaaaattggtaaatgataacttacttctaaaaccggaatatgaaagagatcaaacagaattccccccatgcatggctccttgcagcccgtcccaaaaccttgacgggagctatcattcctgtgatgataggtacttcactggcatttgccgacggacaattcaaaattgttcccgctctgctgtgtatgctctttgcctgcggtatgcagatcgccgccaacttcatcaacgacctcttcgacttcctgaaaggtaccgaccgtaccgaccgcctgggtccggaacgtgcctgcgcacaaggctggattacaccgggagccatgaaagtgggaatcggtgtcatcgtcattctatcctgcatttccggtctcggattgctatacacaagttgggaagaactgcctcacggaggatgggaactcattgtgctgggagtattctgcgtaatatttgccttcctttataccaccgtcctctcctatcaaggttggggcgacttactggtgctgatattcttcggctttgttccggtaggcggcacatactatgtgcaggcatatacattcaccccaaacgtcatcattgcttcgctcatcagcggactggtaatagataccttattagttgtgaacaattatcgcgaccgcgatcaggatgccctcagcggaaaacgtacgctcatcgtccgtttcggagaacctttcggcagatacctttacctctggctcggcatcatcgcgacattgctttccttctggtttgcccaaggctggaactatgcaggtatcttcatgcctttcacctacctttatttccacgtaactacctggaaacgcatggtaaagatacgaagcggtaaaaaattaaacagcatactgggcgagacttcgcgcaatatgctgtttatggggattcttcttagtgttataatagcaatcactaaccgttaatcactaacatcatctctttccgtacatcttctcgtaatagtgctgataatcaccgctggttacttcttccacccagtcctgattattcagataccactcgatagtcttcacgataccgtcttcgaatttcgtttcgggataccagcctaaagcagcagtgatctttgccggatcaatggcatatcgctggtcatggccgagacggtctttcacgaaggtaatcaggtcttcattaatccagctgatatcaatctgaccgtcttcatccttcactttcttcttcagaacttcacgatattccggtttctccgtcatcaatcggtggatagtggcaatagttaacttcacgatttcgaggttggtcttttcattatgaccgcctacattgtacgcttcaccttctacgccttcgcgaactaccaagtcgatagctttgcagtggtcttccacatacaaccagtcgcgcacattgctaccgtcaccataaacaggaagcttctttccttccagaatattcttgataatcagcggaatcaacttttcggggaaatgatacggaccgtagttattggagcagcgggtaatggttaccggcatcttatacgtatcatgataagccataaccaccatatcggcacttgttttggaagcactgtaaggactgtgcggacaaagcggagtttgctctgtgaagtatccttcggcacccaatgagccatacacttcatcggtagaaacctgatgatagcgtacacccttgcgccaggtaggataaccattttcatccttacccgtcacccaggcacgacgcgctgcatccagcaggttctgcgtacccagaatgttagtaaccaggaaaagctgcggattttcaatactgcggtctacatgactttcagcggcaaagttcaccacatagtcgaatttgaacttggcaaacagttcgtcagccaatacacggtcgcaaatgtcacccttcacaaagatacaacgttcatcatcaatgtctttggcgatggtaccgaggttgccggcataagtcaaagcatccaatatcacaagcttgacatcatcatgctttgccagaatgtgcttgatataattcgcgccgataaacccggctgcaccggttacgagataagtcttcattgatttatgatttataatttataatttatgattttctcaacggtgagaattggcaagttccatcaggtatgtaccgtattccgttttgccgagttgttcaccaagacgatataactgatcggcatctatccaacctttgcgccaggctatttcttcgatacagctgacgcggaaaccttgtcggttctgtatggtagccacaaagttgcttgcttccagcagactgtcgcagttacccgtatcgagccatgcgaaaccacggccgaagatttctactttcagtgtgccttcatcaagatacaagcggttaagatcggtgatttcatattcgccacgggcagatggtttcaaagcggcagccttggcagtgacagtagagtcatagaaataaagaccgggcacggcatagttgcttttgggttgcgcaggcttctcttcgagcgaaatggctttgccgtcggcatcgaattccaccacgccataggcacgtgggtcctttacataatagccgaagatacatgcgcctttttctatcgaagcggcacgcttcaacatagcagagaagccctggccgtagaacatattatcacctaggataagacatcccggttcaccattcagaaactcggcacccaggacaaaagcctgtgccagtccgttaggtttctcctgtatcttataagagaaggacattccgagctcttcacccgtaccgagcaattcgcgaaacatgggtaagtcacgtggagtggaaataatcaacacttcgcgtatccccgccaacataagcgtggaaagcggatagtaaatcatcggcttgtcataaaccggcataatctgcttggaaatagcctttgataaggggtaaaggcgggtggcgctaccaccggcaagaataattcctttcatatttcagttcttttttcggttgatacaaatatagaataaaataagaaggaggaccaagccccacggctctcaatttgctattcaagtcgcaaagataatgcaaagcaaatgtagtacaaaataatttaatttatttttaggagctttctcaacctgccaactctattacttcaagatccttgaacactccattgtcaacaatgaaacggaccattgtgcgtaccttatggaatccggaaatacctgcggcacccggattaatgtgcagcatatccagtgttttgtcatacttcaccttcaatatatgagaatgtccgctaatgaaaagtttgggcggacgcaccagaatgcttccccgtatggaaggatcgtaattgcccggatagccgccaatatgttttatcaacacttcggcaccgtcaatagtaaaacgattgatttgcggatagacctgacggatgtcttgcccgtcaatgttgccatacacggcacggaaaggacggaatgccgccaacttctgcgccacttccagcgaaccgatgtcaccggcatgccagatttcatcacacgtttcgaaatattgcagatacttttcatcccaatatccgtgtgtatcggataataaaccaacttttgtcatctttcttttgtttatctgtgcaaaggtaactatatttgggaaaatcttgatgagtatggaaaaccaatatcaatattttaaacgggacattagttggctgtcattcaattaccgtgttctgttggaagcagaagatgacaccttgcctctgtatgaacgcattaactttatatccatttattcttccaacctggaagaattctacaaaatacgcgttgccgaccataaagctatagctaccggtgctgcacaaagtgacgaggaaaccgtacagtctaccatcgaactggtggatgcgataaaccttgaagtaaaccgccaaatggaggaccgtatccgtatctacgagcaaaagatacttcctgccctgaagaaaaatcatatcattttctatcagagccgaaatgtggaacccttccatcacgacttcgtacgtcgtttcttccgggaagagattttcccgttcctgcaacctgtgccggtgtccaaggacaaggtcatttcatttctgcgcgataatcgtctgtatcttgccgtccgtcttcaacagaaaggattgccgcccggtgctccgggacgtacgcaatatttcgtaatgaaacagccgtacagcaaagttccacgtttcatagagttgcccaaagtaggaaacaactattatctgatgttcatagaggatatcatcaaggctaatctggatgttatcttcccgggctatgatgtagaaagcagttattgcatcaagatttctcgcgatgcggatatactgatagacgatgccgccaacacttccgaaatcatcgaacaggtaaagactaaagtaaagaaacgcaagataggagatgtatgccgctttgtgtacgaccgtgccatgccgcaggattttcttgatttcctggtagacgctttccatatcgaccgccgcgagttggttccgggagacaagcacctcaacctggaagacttacgccatttgcctaatcccaaccccaatatacaccctatacggaagccgcaaccgatgaaactgacctgccttgatgaacgggaatccatattccgctatgtggagaaaaaggatttgctactacattatccttaccattcattcgaacatttcatccacttcctgtacgaagccgtacacgaacctaccgtgcgtgaaatcatggtaacacaataccgggttgccgagaactcagctgtaatcaacactctgatagccgccgcacagaatggcaaaaaggttactgtttttgtggaactgaaagcccgcttcgacgaagaaaacaaccttgccactgctgaaatgatgaaagcttcgggcattaatatcatatatagtattcctaaattaaaggtacatgccaaggttgccctcgttcttcggcgcgacgcagaagggaaaaaactaaccagttatgcttatatcagcaccggtaacttcaatgaaaagactgctacgctctacgcagacagtggtctatttacctgtaaccggatcatcgtgaacgatctgtacaacttgttccgtaccctgcaaggtaaagagaatctgaagttccaccgcttactggtagcccgttttaacctgataccggaactgaaccgtctgattgatcatgaaatggagctggcgaaaaaaggaaaagccggtcgcatcatactaaagatgaatgcactgcaagatcctaccatgataaaccgtctgtatgaagcctcgcaagccggtgtggaaatagacctgatcgtccgtggcatctgctgcctgataccggggcaaacatacagtcgtaacattcgtgtcacacgtattgtggatacatttctggaacacgcacgtatatggtatttcggtaatggaggaaatccgaaactattcctcggctcaccggactggatgcggcgtaacctgtaccgtcgcatcgaggccgtcacccccatactggacccggatgcaaagcaggaactgatagatatgctttctatccagctctcagataagcgtaaagcctgttttgtagatgagaatctgcgtaactgttggaaatcagctcatccacaaaaggaaaaagtacgttcacaatatactttttatgaatacctgaaggagaagactgaatagttttgtaacatctatgtaatatgtatgacatttctctgcaacacgatttacgttcctttgcagccagaaataaaatacattattatggaaactatttatctatgcattgtcatcttcctgttcgtccttgcggtgttcgacctcattgtgggcgtcagtaatgatgcagtcaattttcttcaatcgtcagtcggagcaaaggctgcttctttcaaaaccgtactgtttatcgccggtttgggcgtattcatcggtgcagcgttgtccaatggaatgatggacatcgcccggcacggtatctatcaaccacagcatttctactttgccgaaatcatgtgcatcctacttgccgtaatgctgacggacgttgtgctgctggacgtcttcaacacaatgggtatgccgacttccactaccgtatccatggtattcgagttactcggaggtacattcgcattggcactgatcaaggtgcaaggcagtgatacgctgggacttggcgatctcatcaatacagacaaagcactatccgtcattatggcaatcttcgtttctgtcgctatcgctttcttcttcggtatgctggtacaatggctggcacgcgtggtgttcactttcaactacaagaagaaaatgaaatacagcatcgggatattcggaggtatcgccgttacgtccatcatctatttcatgctgataaaaggtttgaaggacagctcattcatgacccccgataacaaacaatggatacaggataacacagttatgctgatcggtttctgttttatatttttcacgatactcatgcaagtactgcactggctcaaaatcaatgtattcaaagtagtggttttgttgggtactttcgccctggctctcgcttttgctggcaatgaccttgtaaacttcataggtgtacctttagccggatattcttctttcatcgactttaccactaatggagcagacagttcaccggacggtttcctgatgtcctcacttctcggtcccgccaaaacaccctggtattttctcttcggagcaggtatcatcatggtatacgctctctgcacttctaaaaaagcacataatgtaatcaagacttccgtcgaccttgcccgccaggatgaaggagaagagaacttcggaagcacgccgattgcccgcacactggtacgtttaagtatgacaatgtccaataatatttctaaagtgatgcccgaaggtatgaagagttggctcgacacccgcttccgcaaagacgaggccatccttgccgatggtgctgcattcgatctggttcgcgcttcagtaaacttggtattggcaggtctgctcattgcattgggtacttcattaaaattacctctttccaccacttatgtgactttcatggttgccatgggtacttccctcgccgaccgtgcctggggacgtgactctgccgtattccgtatcacaggtgtacttagtgtgattggtggctggtttattacagccggtgccgcatttaccatctgtttcttcgttgccatgataatccacttcggtggtacatttgccatcatcgcgctgattggcttggcaatattctcactgattcgtagccaggtgatgtacaagaaacgcaaagctaaagaaaaagggaatgaaaccatcaaacagctgatgcagagtagcaacaatgcagaaattctggaactgctgcgtaaacatacccgtgaagagttagtgaaggtactggcatttaccgaagaaaacttagaacgtaccgtaacggcattcctgcacgaaaaccttcgcggattacgtcgttccatgggttctgtgaaatttgaaaaacaactcattaagcagatgaaacgtaccggcaccctcgccatgtgtcgcctggacaacaatacggtattggaaaaaggtctttactactatcaaggtaatgatttcgccagcgaactggtatatagcatcggacgtctctgtgaaccttgtctcgaacatatcgacaataacttcaagccattggataccattcagaaaggtgagttctctgacgttacggaagatattatctacttattacaagtttgccgccacaagatggaaaacaatgattatgatgagtttgagaatgaactccggaaagcgaatgatctgaacggacaattatcgcacttgaagcgtgaagagttacagcgcattcaaagccaagccggcagcatcaaagtcagcatggtttatctgacaatgatacaggaagcccaaaacgttgtcacttatacaatcaacctgatgaaagtcagtcgcaagttccaattgacggaataagatttcaccacagagtaaaagaggagtcccacagagtttaatcaatttgaaattaaactctgtgggactcctcttttactctgtggtgagaaacaaaatttagtctctgcgtcccataaatatcataatgtagtaaatcagcgttgccaatgaacccaatgcagccaccacataggtataagcagcggaacgaagtgcatcttcggcttgcttatgattgtaggagttcgtaatgcccgaacggctcaaccataccaatgcacgcttacttgcgtctatttccaccggcaaagtgacgaaactgaacagtgtggtcatagcaaacaggataatacctgccagcaataactgcgggaacgtgttcaatagcaagataccacccagcaacaaccaggtcatccactgtgaagcaaacgataccactggcaccaacttgctacgcatagtcagcggagcataagcccgtgcgtgttgcactgcatgtccacactcgtgagcggcaacggcagcagccatgatactgttactttcatatacaccttcactcaggtttactgtcttattggcagggttatagtggtctgtcagttgtcccggcgtatgtgtcacctgaacatcataaattccattgtcatgtaacatctgaagggcaacatcacggcccgtcattccattaccggtagggatcttggagtacttcttgaacttgttctgcaagttcatttgcaccagccagctaactacagctataccaataaagataatccattgtattcctatcattccttccataatctttttctgtttttagtaattaaaaatgtgtcgtttgttatatataatacaaattgtttgccaaaaataaagggaaaccgtgagctttactacagtttcccttatattttaggaagaattagcgaaaaccaactattgcccaacaagttgtaactctatcacgtaatccgtatctgcgggaacttctggtaattgcaacaccactccctgtccggtacgggtaattcgtatcggggattgatctttaaacagaaaacccttcttcaccatttttccatccaatggaagataaagcgcattatccttcaaattcaagatgtgaacaaaaagtcggtttcctttttgtgttgtcactccccaatcatgtggaggaataataccgccacgagtgccataaatcgtttcaccatacactttcatccactctcccacttccttcagcctctgaactgccacttctggcagacacccgtccggctgagggccgatattcatcagaagatttgcatcctttccggcagccttcaccagataatgtatcaatgttttcgttgacttataatcttgatcggtaatcttatatccccacatcccgttcatagtttcacaagtttccagaggcaggtgactgacatcttgcccagatagtccggcactgttttcccccggcagatcacgctcgaagatttgtatatcttcccctgggaaaggtacctgatgatggttgttccctaccagacaagcaggttgcaggcgatgtatcagcgcatattgttccggcagctgccagtcaaaatccggattagcatcctggtcccaccagccatcgaaccagatagcacctatcggaccgtagttcgtcaacaactccgtcaactggttattcataaaagtataatagcttttccagtctcctttcggattagccttccggttccacgccctgtacgtccccaaggtgcgtcttcacgataccagtcgatatgggagtaatagaaatgaagccgaataccttgtttatgacattcgtctgccaattcttttactacatcgcacttgaaaggggttgcatctacaatattataagcggaatacttggtatgaaacatagagaacccttcatggtggcgacttgtaaagcagatatatttggctcccgatgccttaatggcacttacccattcagccgcactaaacttggaaggatagaaacctccggcaagtttggcatattctttatagttcaaatctttattggtcatcgtccactcaccggtagccaacatacagtatagtccccagtgcaggaatattccaaacttattgtcttgaaactcctgacgggctttcaggttctcggcagacggttgataagtctgcgcctttgcaggcaaaaaggatgctgcaaacaaaagggataaaaaaaggtgtgttttcatcataaagtatgcggatgggttaataaaaaatgagattacatcagcatgtatatctgatgtaatctcattataatatagttagacttactcttctgtataacgttcaatcgtctgtccacggtcaggacctacggaaacaatcttgatgggcacaccaagttgttcttccaggaatgtcaggtaagcattgaattcttctgggaattcatcttcgctctgcattcttgtcatgtcagtttcccaaccgggcaactcaacataaaccggctcaagaccttcgctgatgtcatacggaaaataatcaatttcttcaccgtttactttataagctacacaggctttgattgtttcgaatgaatcgagtacatcgctcttcatcatgatcaatttggtaacaccgtctaccataatggcatacttcaacgccaccaagtcaatccaaccgcaacgacgtttacgacctgttaccgaaccaaactcatgtcccagtgtacaaatctggtcacctgtcttatcaaacagctccgtagggaacggacctgcacctacacgtgtacagtatgctttgaagataccatagacttcaccaatcttattaggagccacacccaaaccggtacatgcacctgcacaaatagtattggaagaagtaacgaacggatatgaaccaaagtcgatatccaacatcgtgccttgagcaccttcacaaagtactgacttattatcgttcagcaggttattaatctcatgctcgctgtctaccaacgggaattgcttcaggtactcaataccctccatccaggccttttcaatctctgtcaggtcatactcataattcaaacctttcagaatttgctcatgacgagctttggcttcagcatatttctgttcgaagttatgcaggatatcacctacacgcagaccgttacgactaatcttatcggtataagtcggaccgatacctttacccgtcgtgcctactttagcatcacctttcgcagcttcgtaagcggcgtccaatatgcggtgggtcggcaagatgagatgcgctttcttagaaatatgcaagcgcgctttcaggttatgaccggatgcttccaatgcttcagcctctgccttgaagagagccggatcaagcaccacgccattaccaatgatattcaccttgtcaccttggaaaattcccgagggaatagaacggagcacatacttctgcccttcgaactcgagtgtatgtccggcattcggtccgccttggaagcgagccacaacatcgtatctcggagttaatacgtcaacgactttgcctttgccttcgtcgccccattgtaatcctaatagaacatctactttcatttttctttcttatggttattatttttcttcttacgtttgttagcgcggtcgcacttactgcacaatccatacagataaagcgaataatgtgacagactgaaccgactcaacttagtattcccaatcgcctgctgtaactcttcgttctgaaattcagtcaccttgccacactgcgtacagatttgatggtgatgcgtatcacggttatagctcttttcgtattgggaggaatttccgaactgatgtttgattaccagtcgtgcattgatgagaaggataatagtattgtaaagagtcgcgcggctcacacggaaattctcctggtcagccatcagcgaataaagcgtatcgatgtcaaaatgaccatcaatggaatagatagtatcgagtatggcatagcgttcgggagtcttgcgatgcccgttcgcgttgagatattcagtgaatatctgctttaccgtatctttcacattctgactttccattttggcggcgcagttttttacagccaacaaagttaagccttttttgcggaaagcaaatgagaaaggggaaaaaaaacaaaaaaagagtgatagagtaatcaccctatcactttattctatttcttctcttacaagattatatagcaactgttcggcttccgattcggaatgttccatctcttccacccgacggcacacttggaaagcatgttcttcactatgctgcatgaagcggcgaatggccgccatagctgcattgcgcacgtggtaggaaccggaaataaaagcgcaaaccgcctggtcgagaaattcgttcgcagtacgttcattcatatcccccttcttcatcagcaagcgggcaatggtgagaaaaccgcacgtctgtacatactcccgctcatcggcaatccattgaaaagacttcgcaggagcataaggaagatgctggaacagattcatagaagtaagttccgctatttcaatattctgaatattttccacccagatatcagcaatctccggaaagaagctgtctaccggctgcaacagccctgccagaatcttacattcacggatatcctctttccacaaagcttgcgccaatgagtgatctttttcgtacccttcggcaattgccttgatacggggaagttctacaccgaaattcaatttgtagaccagccccttttcacgcatactttgagacacagccccgttcatagagaggcggagctgtgtctttatttctttcagttgttcatgtaaatccacaaaacaatgatttatagttaattattaatagaaggcagattcgaataatccttactgtaacgcaacatttgttccgcataaccttcgtcataagtcacctttacatcggttatcttaccggctgcatctaccactgcttcatatttcggatttacaaatcccttgtacggagccagattcagtttcttataacgttccagaacttcggcatgcaaagccggatctaccttcactgcataattttccaccaaatcatgcgcaccttgatagtcgcctgttgatttgatacgttggatttcggacagtaatttaccgaagagtgcacgcaatttttcgtaatcgttcactactacataagttttaccatctttcttcaccagttctactactttatccgccgcacctttctcaaacacccagcgggcaatgagctgacgattacgcatgtgggcttcttccacattattacccggttcaatgcgaaccaactgtgtcatcaggccgttcatcagataagtataatattctgctttgtaagcatctgcattgggtgtcagccccaattctaccaacttaggatcagctacataatacagaccgaacaagtccgcacgtgcttcctcaatcgtggagccataagctttcaaagcatccgggtcaactcccggaagcaactttccggaaccatgtcccagacattcatgcaagtccgtatgaagttcaccggtcagatcggcatatttatctatcaactgcaattcagcatcgctatacacaaattcttcattgaatccgttgccatgagcagccttattatatgcatccgtaatattaccgatagtcacagatttagaaccatgatggctgcgtatccagttggagttaggcaaattgataccgatagccgttgccggataaaggtcaccggccagaatagcagcagtaatcaccttagcagaaacacctttcacttcatcttttttgaattgtttatctaccggagagtgatcttcaaaccattgcgcattgccactgataatctcagtacgatgcgtagcttccatatccttaaagttcaccaatgattcccagcttgccttcatacccaacggatcaccatagctttcagtaaatccatttacaaagtccacaagggaattcaaatctttcacccaaaggatagcatattcatcaaaagtcttcagatcaccggtctcataaaactttatcagttcggaaatcacagccttctgttccggattttcagctacgccttccgctttcttcagccagtatacaatcttatcgatagcctgtccgtacagaccacccactttccagaccttttcctgaatcttgccgttttccttcaccagacgactgttcagaccgtaagaaacaggcgtttcatctttcgggtctttcattgcattatagaagtcttcagcttctttctgcgtcacaccgtcataatagttgcaagcagaagtcaacactaagtcctctcctgctgcctggttcacgcgcttcggcattacagtcggatcgaaaataaccggagacagctcatcgcataattgttctgcggtttgtccttcagccagcggcaatgtagaggcatctacactcagcatagcctctttgaaaaattcgggagcaaaaccaggcacgaacttctcagagccataatgatggtgaatgccattagagaaccacacacgtttaaggtacacttccatcgccttaaaatcaggcgtatttttgtctcctttatatcctgtataaacagcttccaacgttctccgaatacgcaggttatattttccattctgatcgaagagaatgtcacggccctgcaaagcagcttccgtaaggtaatacaccagctctttctgttggagcgacaagttctcgaaaccgggaacccggtaacgtaatatttgtaagtctgcaaattgttccactgtataatcaaatttatctgcctcggcagttgttgtcttcgagccgctacaagctgtcagcaatgcaaaagcggcacatgctattagttgtttcttcatgtgtcgggagatatgtgagttggtatttagaaaagacgaaaaggaagtattccgaaacagttgctccggaatatttcctttttatacattgttctatgcagaattattgttttttatctgcgtgttttttgcgatatccgttaggagtttcacctacatttttgtaaaatgcagcgtagaaagactgacggttggcaaaacctaccatcgtgctaatttcctctacattcttgtcggcatatctcttgtccgtcaataaatgcttagcatcttttactctgtactcattcaataggcatgaatagttcataccaaaacgagaatttactacagcagacaaatagcgagtgttggttttcaactctttcgccaagtctttagccgagtaatcgggatctttgtacttcttctgcacaaccacgatattcaatatcttgtcatacaattcatctgccaattccggacgaatcaacgagcggtaagcagcattcttctcttttttctctctcaggttataggggcgcttctttgtagccgcttcctgattcttgttttctaaatcactcatttgaattaactggttagggtttgttaaaaaatgaaagcccgaaggattttcctttagactttacaaaagtctgacatttttttctaatacgcaacttttctcgtacatatttttgacctataaacaacgaaaaaggttgaaaagtagtctttaagccgatttaataagaaactttaacttttgcaaaagaggttatgatataaaatgaatacgtttatcagcttgttttatatacaataattaatgtacctttgcaggataaaactttatcaacgaaaatgatacagacgcttaaacgatattttggttacgatagtttccgccccttacaagaagagattatccgcacattactggccggaaaagattccttggtattgatgcctaccggaggtggaaagtccatttgttaccagcttccggccctgttatgcgaaggaactgccgtcgtagtttcccctttaatttccctgatgaaagatcaggtggaatcactttgtgccaacggtgtagctgcgggtgctctgaacagcagtaacgacgagacggaaaatgccgccctacgccgttcttgcatggaaggaaagctgaaattactctacatttcgcctgagaaattaatagcagaagccaactatcttttaagagatatgcacatctcattatttgccatcgatgaagcgcattgtatttcacaatggggacatgatttccgtccggaatatgcacaaatgggattcatacgcgagatgtttccaaatattccggtcatagctcttacagctacagcagataaaattacacgtgaagatattgtacggcagttacacctcaaccagccgaaggttttcatctcttctttcgaccgccccaacctgagtcttaccgtaaaacggggataccaacagaaagaaaagagtaaagccatactggatttcattgatcgccatcgcggtgaaagcggcatcatctattgcatgagtcgcagcaaaacggagacagtagcacagatgctgcaaaaacaagggctccgtgtagccgtttatcataccggattatcctccgcccgaagggatgaagcacaggatgatttcatcaacgaccgtgtacaaatagtttgtgccacgattgctttcggtatgggaattgataaaagtaatgtgcgctgggtcatccattacaatctgcctaagagtatagagagtttttaccaggagatcggacgtgccggacgagatgggttgccaagtgatactctcttattttattctctggccgacctcattctattaaccaagtttgcgacggaaagcggtcagcaaggtatcaacctggagaagttacaacgtatgcaacaatatgctgaagctgatgtttgccggcgtcgcatcctgttgagttatttcggtgaagccactacagaggattgcgggaactgtgatgtctgcaagaatccaccccaacgttttgacggaactgtgattgtacaaaaagctctaagtgctatcgtccgtacggaacagcaaatcggcacgagtattcttgtagatatcttgcgcggaaataatactccggatgtatcggagaaaggttaccagcaactgaaaactttcggtgccggacgtgaagttcctgcccgtgactggcaggactacttgttacaaatgttacaactgggttattttgaaatagcatacaacgaaaacaaccatctgaaaataacaagtagcggtagtgatgttctcttcgggcgggcacaagcacggttggcagtaatccggcgtgaagagttcgcacccgccaaagggcgaaagaaaaaatcaaccattccggtcagagagctaccattggggttaccgaacacggaaagtgaagaacttttcgaagccctgcgtgcattacggaaaaggcttgcagatcaagaagcactaccggcctatattgtactgtccgacaaggtattgcatttactcagcaccgcccgccctattacaatggaagcattcggaaatatcagcggaatcggtgaatataaaaagaagaaatacgggaaggattttgtcgagttaatcaagaaatacgtttaataacccgttggcggaatttcttatggtataaataatatactaaagatgtaaaccacttatcatttgcattgctgtagcaatcccctgagatccgcctgcggcactccaagagacattgctttctcaaaatcctgctttgccaaatttttcttcttctgggacagataaatctgtccgcgcatcagataggcttccgtctgcgaaggattcaattttagagcttcttccagatcaatcattgccagatcaacatgctgcatatcctgttctatccccgcacgtgctacgtataaggctgcatcctgcggatcttctaccagcatcttattcaatatctccaaggctttctgtaagtttccatctttttgctccagagtggcgagtcctaaacgggcattataattctgaggatcgagcttcagtaatcgttcataatctgcccgggcaaatttgagatcgcgctgagtcacataaatataggcacgcatcaagagtgcttcccgattatccttttccagatccagcaccaaagaatagtctacacgtgcctgctcattccgtcccatttcaagattcagtgcggcacgattcaagagaatgggaacagcccgtggagcaatgttcaaggcatacgtgtaagattctaaagcctgatcataatcccgttgccgacgttggatagtaccgagattagaaaacaataaggcattatgcggattagcaggttccagtttcaaagcctggcggatataattttccgcctgtgccagactatcttgttccgtacaagcaatggcatggtccgaaagttcctggtaagtttgggcaaacacaggagatacacctattatatatacaaggaaagaaagaataaacttcttcatttttaatttatttaaagattatgtttcaaggaagggaatcatttgtttcattacttgaaaccgttagtttcattacttggaactattagtttcattgcttgaaactcctggtttcacaccgagaaactgcttgtttcatcgcttgaaactatttgttccacacgaggaaatattttgttccctaatatgcaacgaaacgtttaataaggatgactaatccaacggataagtttcaaatgcaaacagctctgtcgacagataacgctctcccgtatcaggcagaagaactacaatcttcttatccgcaaaatccggacgttgtgccagcaaacgcgctgcatatacagccgcaccggaagatatgcccgccagtaatccttcggtagacgccaactcgcgtccgccacgaattgcttcatcatcgggcacaggaagcacttcatctacaacggaggcatcataaatagcaggaataaaattggctccgattccctgaatacgatgtggcccttccactccgccttccaatacaggagatgattccggttctacggcaacaatatacacatccggattatgttttttcaaggcacgtgccactccacagatggttccgcctgttcccactccggctacaaagacatccacttttccgtctgtatccgtccagatttcttcacctgtagtgagcgtatgaatctgtgcgttagaaggattttcaaattgttgaaggatgattgaaccaggaatagacgccctcaactcctgcgcttttgcaatggagcctgccataccggtcaatccatctgtcagtacaatttcagcacccagtgctttcagcagattacgacgctctgtactcatggtttcgggcatcgtgagcatcaggtgatatcctttgattgtagcaaccatcgccagtcccacaccggtatttccactggtaggctctataatcgtcgcaccgggcttcagtgctccgcgcgcttctgcatcttcgatcatggcaagcgccacacgatctttcacactcccagccggattgaacgcttccaactttgcgataatattctgtttcagtccatatttacgactgtattccgctaattccataagcggagtgcgaccgataagttccgtcaggttctttgctatttttgccataacaatctaattattaaatatcctcacttgcaggtatctttgtacaaagataatgcaaaccgaaagcagaataaaatgaactcgttcattttttatgcagaggtacagcttatcttcgtttctaagcaaagatagataaaaaactatttcgctgctcaagtgttacatttctatcacgtaaatttgcataataaaatttatagaactcttacaccttattaaatatatgtcacacgaacattcacatcagcatagccatgccatcaacgcagagtcgctgaacaaggcatttattataggcattgttctcaatttagcttttgtcgtcatagagtttgcagccggtttctggttcgattccctcgcgctgctttccgatgcaggacacaatttaagcgatgtagtcagtctcgtgctggcattgctggctttccgtctggccaaagtcaaagccaatgaacgatatacgtatggttataaaaaaagtacaatcctggtatccttgcttaatgcagtcattttgctggtagccgtaggcgccattgtcatcgaaagtattcataagctgaataatccggcagttgttcccggtggagctattgcttgggtagcgggtgtgggggtacttatcaatgcattcacggctttcctctttatgaaagataaggaaaaagacctgaacgtaaaaggagcttatctgcatatggcggcagatgctttggtatcagtgggagtactagtggcaggtatcgttatcagccggaccggctggtatattatcgacccgattatcggtctgattgtggctgttgtcattctcatctctacgtggaatttactgcatgacagtcttcgtctgacgctggacggcgtgcccacaagtatagacagtcaaaaagtagtaaaagccatccatgcccttcccggtgttgatgacgttcaccatatacatatatgggccatcagcaccacagagaatgcactgacagcccatattgttttaaagcaaccggaaggtatgcaagaggtgaaacatcttatccgccaccggcttgaagatttcggcatcggccatgccaccctggagtttgaagttccgggcgaacattgcgaagccgtatttgccgaagattagctacgtttgatataatctaccacccatgctcctacttctttggtaccatacttcgcaccaccttctacctgaatttccggtgtacggacgttagcatccaaagaagcatctacagctttgcgaatcaatgcgccttcttccagcaaattgaaatattcgaataacatggcagccgaaaggatttgcgccaacgggttagcgatattcaaacctttagcttgtggccatgaaccgtggatcggttcgaatacaggagtgctttcgcctgtagaagccgaaggaagcaatcccatagagccactgattacagaaccttcatccgtaaggatatcaccaaatgtattttcggtaaccattacatcaaagaatttaggctcctgaatcatcttcatggctgcattgtccacgaacatatagtccgtagtcacttcaggatattgcggtgccatttcctgggcaatctgtctccacaggcgtgaagatgcgagcacattggctttatctaccaccgtgaggtgcttattgcgtttcatggcatactcgaaaccaactttcagaatacgttcaatctccggacgagtgtacatattggtatcatacgctttgtcattgtcctgatacttctcgccgaaatacataccaccggtcagctcgcggatacaaagaaaatctgcaccatccaccaattctgcacgaagcggtgatttatggagcagacatttgaaagtttgtaccggacggatattggcaaacaatcccagtttcttacgcatagccagtagaccctgttcgggacgtactttggcagtaggatcattgtcgaatttcgggtcgcctacagccgagaacaaaacagcatccgcgtttttacaaacttcataagtagcttcggggaacggatcgcccactttgtcgatagcatctgcaccgcagatggcatattcgtagtttactttatgtccgaacttctcacatacggcggtcattacgtccacacctacggtggaaatctccgggccaatgccgtcaccggctaatactgcaattttaaaatccattgttttctttatttttttaggtattcttctattttctttccctcaactgggttcatcattctgattttttaagttcatagtcatcctcaatgatattcagcattttcattgtcgccttaatcgctgcctccgtctggtcggcatccagtccgcgtgtacggaacactgtgccgtcatagctccaggtaatcactgtctgcacaaaagcatcggtacgcccaccgggagggatggttacggcatagttcgtcagcatggggaatttgcgtcctaacgtcaccttataaatcttacgcagagcacgtacaaaagcatcatactgaccgtcaccgctggaactttcttcaaactcctgtccgttgatttcaattttcagcgtagccatcggcttcaaaccgtaagcaaggttcacgatgtatgtcttcagtttcactttctcattcatcactccgtgcttcagtacatccgaaacgatataaggcaaatcttcctgggtaaccagttctttcttgtcacccaactcgataatccgttccgtcaccttacgcatggaatcctcatccagcgtcagtcccagatcttccagattcttacggatgttcgccttaccactgttcttacccaatgcatactcccgcttacgtccgaaacgctcgggtaacaggtcgttgcaataaaggttactcttattgtctccatcggcatgcacccccgctacctgcgtgaacacattttcacctacaatcggtttattggcgggtatggcgatacccgaataagattcaaccacccggctgacttcattcagacggccttcgtcaatgttagtgatagcattgaaatgatctttcagaatagcctgcacactggacaacggtgcattaccggcacgttcacccagaccgttgattgtggtatgaagtcccttcgcaccactcagcacagcagccagcacattgctcactgccaggtcgtagtcattatgcggatggaaatcgaagtgagcatgcggatagcgcttcaccatcttccgcatatattcgatgacctgcaaaggattcagcacacccaatgtatcaggcaacatataccgtttgatatttgtgtgcatcagtgcatccaccatctggaagacatactccggagaatctttcatcccgttgctccagtcttccaggtaaatattcacctccatatcttgctcattggcataattcactacgccaataatatcctcgatatgttcttcaggggtctttctcaactgacaggtgcaatgcttcagcgaacctttgcacagtagattaatgacgcggcagccggtagcgtgtatccagtctaccgacgtatgcccgtctacgaaacccaacacctccactcggggcaataaattacgccgcgccgcccagtcacatatcatcttgactgcgtcgaactcaccgtccgaaacccgtgccgaagccacttccaccctgtctactttcagttcttccagtagcagacgtgctatcatcagcttttcatgggggacgaacgacacaccgctggtttgctcaccgtcgcggagcgtggtgtccatgatttctatttggggctgtttatacttcatttttattttcccacgcttctattttatctttattctctaccaggaaatcgatgtcatccaggccattcatcaggcaatgtttcttgtaagcattgatttcgaaagtctcacttttgcctgttgctttgttggtgattgtctgttccggcaggttcaccactacctctgttttcggatcggcggcaatggaatcaaacaattctttcaggaacggttcgctcaccactacaggcaatacgaaattattcagttcattattcttgtggatatctgcaaagaaactgctgaccaccacgcggaaaccataatctgcaatggcccatgctgcatgctcgcggctactgcccgaaccgaagttctttccggctacaagcacctgtccgctataggtcggatcgttcagaacgaaagagtcgattttgtttccttgtttgtcataccgccagtcacggaacagattctctccgaagccctctttagtcgtagctttcagaaaacgtgcaggaatgatctggtctgtatctacattctccaacgggagaggcacacaagtactggtgatgatattgaatttctgtttcattgtttcttatctttgattttgaaatacttattattaatgacttctgccaggaggagtgaaattacatcagttctctcgggtccgtaatcactcccgtcactgctgccgcagctgctaccagcggactggcaagcaatgtgcgtgaacccggtccctgacgaccttcaaagttacggttacttgtagaaaccgcatacattccggcgggtaccttatcatcattcattgccagacaagccgaacatcccggctggcggatagcaaaacctgcttcctccaataccttatccagaccttcttcacgaatctgtgcatctaccatccacgaaccgggtaccaaccaggcaaccacatgttccgccttcttgtggcctttcactaacgaggcgaaagcacggaaatcttcaatacgtccattcgtacaagcacccaaaaacacataatctatctttttgcccaatactccctcaccgggttggaagcccatataatccattgatttcaggaatgaagcttttgcagcttctcccattccgtcagtcgtaggaatgtgctgcgtgatacccatacccatacccggatttgttccgtacgtaatcatcggttcgatatctgccgcatcaaaatgcacttctttatcaaacgtagcattctcatcgctcttcaacgtcttccagtatgccaacgccttctcccattcctcacccgccggagcatattcacggcctttgatatattcgaatgtcacttcatccggtgccaccataccaccacgtgcacccatttctatactcaggttgcacagcgtcaggcgtccttccatggtcagactgcgaactgcttctccggcatattccacaaaataaccggttgcaccactcgttgtcattttagacatcatataaagagcaatatcttttgccgtcacacctttacccaattttccgtccactgtgatgcgcattgtcttggggcgtgtctgcaagatacattgtgaagccattaccatttcaacctcacttgtaccgataccaaaagctactgctcccatcgcaccgtgcgttgaagtatgcgagtcaccacacacaatcgtcattcccggcaatgtcaagcctctttccggacctaccacatggatgataccattcttcttatgcaacatgccgaaatgtgtcaatccgaaatcttccgcattcttggccagtgtatccacctgtgttttggagatcggatcttcaatcggcttgtcctgatcgtgggtcggcgtattatggtcgggcatacaaacaatcttttccggacggaaacattggataccgcgtgcacgcattcccgcaaaagcctgcggactggttacttcatggcaataaaggcgatctatatataactgtgtgggaccatcttccacttgctgaaccacgtgggcatcccagattttatcaaataatgtattcatcagatttattacgattttacgatttataattgaggttagtcttatgatttgaacttattgatacaatcgatataagcttctaccgatgcggcaataatatccgtattcgcaccgaaaccataatagatatgattatcatattccacctgcatgtgcaccttacccatatcgtcactacctttgctgatagcctggatcgtaaattccttcagtgtcatgtggcggtcgatgatcttctttaaagcctttatcgctgcatctaccggaccgtttccactggcagccgcttcaaacttttcaccggagatattcagtcccagactggcaaccgaacgcacacctactccactggtcacttgcagatattccagtttcacgcggtggttctgtgtgcggtctgcaccggcaagcaccaggatatcatcatcattaatatctttcttcttatccgccaatttcaggaaagcttcatataccttgtccagttgttcctgttcaagctccacgcctaatacctgcaaacgattcttcaaagcagcacgtccgctacgggcagtcaatacgatagaattatcgtcgatacccacatcgtgcgggtcgataatttcgtaagtctgcacattcttcaacacaccatcctgatggatacccgatgaatgcgcaaaggcattgcgacctacgatagccttgttaggctgcaccggcatgttcatcaagcttgaaaccatgcggcttgtcggataaatcttctgtgtattgatgttcgtttcaatttcaatatctttatgacatttgataatcatagccacttcctcaagcgaagtattacctgcgcgttcaccgataccattgatagtaacctctacctggcgggcaccattcagtacaccggccatcgtatttgcagtagccattcccaagtcattatgacagtgcgtagaaagaatcgctttctcaataccactcacatgctccatcaaatacttgatcttcgctccatattcatccggcagacagtaaccggtcgtatccggaatgttcactactgtagcacccgctttaattacagcttccaccacacgagccagatattcattgtccgtacggcctgcatcttctgcatagaactctacatcatccacgtaacggcgggcatacttcacggcagctactgcacgctcgatgatttcctcacgattggaattgaatttatacttgatatgcgaatccgatgtaccgatacctgtatgaatacgtttgtgcttggcaaacttcagagcatccgcagctacatctatatctttttgtaccgcacgggttaatgcgcaaatagtaggccatgtcaccgctttggatatttcaataacagagttgaaatctcccggactggaaatcgggaatccggcttcaataacatccacgcccagcagttccaatgcctttgctacctgaatcttttccactgtgttcaattggcatcccggaacctgctcgccatcgcggagcgttgtgtcgaaaataaataacttgtcactcatttcttatagtttttataaattattgccattaaaaaaagcctttcacacttggaagtgagaaaggctttcgaatattctaatcgttacatatattcacgcacagcactcacttccactaaaccttgccagtagaataataataccacacagtagaatatatgtaaatttctgtatcatttttatcttcttgtttttattataacggtgcaaaggtatagataatttcgtagcacacaaacaaattcgttacttttttatctaaaaaagcatcattttataagtttgctattaaataactctataaagtataacaaaaaaggggaatacatgatgtatccccctttttatatgctcctatgtgataagaattacttcttgtcgcaagctttatcacattcttttttctctttgcagcaagcttttgtgctatcacaagcagccgaatctgccttgcagcaagcctgtactgaatcacatgcctgtgcttcttctacaacttcaacttcggtagcttccacttcagtattagcagcttttttgttaccacaagaagtcacggcgaaagaaaatgcaactgcaacagctgccaaaaataactttgtcttcatctctaattttgctttaaacattaataataaatagtgcggcgcaaatataagcaaaaaattagaattatacaaacacaaaaagcctccatatc

SEQ ID NO: 6282 - DNA, 180624 bp, Unknown
  gut microbiota DNA sequence
ttcagtaatggataactgggatatcctatagccgttttatcattatcatcaatcttaccatcatgatttagatcctcatacactacatctccttctttcaggacatagctatgatccgccacatcttccataccttcgtagtagaatccccggacttttaacccaaaaggttgccccacaggatgacctgttttcaaagtatatgtatattcagaaggaacttcatcctgataaacgatcttgttcttcgcataagaaacattcaagttggtccaataacgaaaactattgattttatgattccattttaagttcagctcaacacctttgttggaaacaatacccaaattcaaaacaggtaagctcattgcatgaataatcggatcggtagatgccttcgccaaaatatccgtgcgtttttcatagaagtaatcgatactaccactcagcttctgattaaacaaagaaaagtcaataccataattctgcttggcagatttctcccaactcaatccggagttaccgaagctcttttcgtaagcacccggagaccaacttgtacccgtaccaaattgataaccgcttcctataaagtaactgttaggcaaatacaagaacctatccataaaaccggttccatacggatggtatctatcattacctacaataccataagaagcacgtatcttcaagaaattaactactggattatctttcagaaattcttcctgagtaagtacccatcccccggaaactgccgggaagaaaccataacgattgcctggagcaaagttctcagaaccattataacccacattgccttcaatcaggtatttattatcataatcatacgtgacacgacctaccaaaccaacataccctcttggaataccggggtaatcactgtcaggataataggttttgctttggttataaagggccaatgcagaaagatgatgcagaccaaaatcacgtttccagtcaaaactggcctcagcataccagtcacgcgacttaccaaaactttcggcatagctgatcagaccggcttcaccgtcctgaatatacacaacttcattgggatcggaacctgccggatgctccatccatgttacatctttcctataccacggctgataactctctatagaagtagcacgctctttggtgtgatcatatccgctattgtaggctacctttatcttaaactgcaatcctttggtgacgaaatccagtttttgtgttagagccaagtccagattgacaacattggtcgtcttagaaccgtaaccacgtccataaatattccccaaaccgtcagacaatcctaccggcagatattggctattacccttgatccatttcccatcaacaatgccaggaccggagaaaggtgtagcccaataaattctgcggaacaactgatttatatcatcacccgaacggggaaagtttcttttctccacgcgacctcccatattgatagccacaagtgttgtttttgtaaaatcaatatccaggtttgcacggtagttataacggttgaaattgaagttagcatcgtaacgggtatcatggtttttaaagaaacctttctgatccagcatacccatcgaaatgaagtatcgaaccctttccgttcctcccgatatattcacatttccctgagtctgaggcgccgacgacttaaacaacagctccatccagtccgtatccggatatatgataggattagaatgtgtacggaaagcctctactgcttcaggagtaaacttgggatctttgccatcattcgtataagcttcattcaaaaatgtggcataatcatagctattcacaaattccggcatccgcgtcggagtctggataccataagaaaaagaagcgttaatcttagctttaccctcttttcctcgtttagtagtaacaatgattacaccattagcgccacgtacaccgaatacagccgttgaagaagcatctttcaaaatcgtaatattttccacttcattaggatcaatctggaaaaagctgcgctctaccccatcaaccagatatagaggcttagcattcattgtgttcaacgtactgataccgcgaataaaaacatccggatcatcgccaccgggctgtcctgatgactgtatggaagaaactcccgaaagtacacctgacaacatattaccaatactcgccgtaggtactttcaacaattcatctgtattcacagaactaatagaaccggtcaaagttactttcttctgagcgccataggccactacttgaacttcctctaataatgtattagaagatttcaatacaatatcaaaagttcctttacctttcatcgggatttcctgagtttccatgcctacaaaagacaccactaacactccattcaaatcatcagcccgaaaagaaaaatgcccgtcaatatccgtaatagttcctaatgtagttcccttaacaaggactcctgctccaatcaccggctcacctgtatcatctttcaccacccccgaaactgttgcagtttgggcgaaagtagcagcagtcgaacaaatacataataatcctactattagtttccggaccaaccagaatgtaacagtctgattcatcttttctaaatgcttttcatgtcccatactcttactattaaattaaaattaaaaaggttactatttacatttgttgcaacagcacaaaagtgaataaaaaacgagtgactactgtcgtgaattcattcattcaagtcgaaaattccttcaccatacactttatgcaacgattgaacgatctcttagactttattgactgatttttctacctgtttattttatatttgtttctacccttaaaaaccggcataattactcattttttatatatgatatttagtttaatttggtatttttgcgaataccacacaatattatgaatatatggaaaacattcagaaagtatctttgctatttatactctccctgctaatatcgtccttccagaacatacagggaaaggaacataagattgaattcaaaagtctccctccttatattaatatccctaccgatgttcaacagatctatcaggacagggatggttttatctggtttgcaacccgcaacggggtatgccgcttcgatggttacgaacttgaaatcatcaagtcgaacctctatactcccggagccttatccagcaatgacattcttgccatacaagaagactaccagcaccgattatggataggtaccagctatggtttaaacatgcttgacaagaaaagcggaaagattcaaaaagaatttggggctctgaacaacgagcgagtccagtctatactgataactaaagataatacaatttggttaggcaccggtagttctctatataaaagcaacaatgatcccgggcagtccaatacatctgtaagtttcaccaaagtcagatccatggatgtgaaatctcttgtagaagcccccaataaccaaatatggataggaacctggagtgatgggctatatcgctatattaccgctacagacagcttagtatcctaccctgctattaatcctttgaattccgcttactttctattccaggatagcaaagaacaaatctggatcgggacttggggatatggcttatacaagcttcatcatccatatgatcaggaaaaagcttattttgagaagttcgcacatgaagaaggcaacagcaatagtttaatacataatttaatttactccatctccgaagattcgagtaccgggaacctatggataggaaccctggaaggtttaagttgctttaacggaaaggattttctcaactacacaccaaatattccttccaatgggttgccatacaatgaaattattagtattttcagagaccgaaccggaacaatgtggctaggatttcttggcggaagagtttactgggtacgaccacaaaatttgcaattcaaccttcaccaactttcccatgcatctgccggaacagcctgtagcaatatccaaggcctgacagtatacaaaaacgatctgtggattggattagagaaacatagtttcattattcacgaccgcaccacaaactctaatagtaaaagagaaaaagcatttaatccttccatacttcaatcagaatatacttattattcctttttaaaacctcgacacaaagatgaactatggttgggtagttatggtaatggggtctacatatatcaccctgaagagagtggcaagccgctatcaaatatgcgttcacctgaaattcctcattttccaaactttatatattgtatgtttgaggacaatcggcaaaatgtatatttaggctccaccacaggattaagtatcctgacgaaggaagggaaattctatcactataacaatttactttctcctcaagggcaatactcacatagcgtatattccatcgcccaggacagtctcaacaatatctggataggaacagatcatagcggtatatttcgcataaatccaactcaggacctcagtaattgcacattcagttcttactctatcaataataacaaaataaattccaatgaaatacaatgcatatttgtgaataaagaaggaaatatcctcgcaggaacagatggaggaggattgaatttatatgatcctcatctggattcttttatttcaatccatacccaatataatattccgggagacatgatatgcagcatcctggaagacaagcaacaaaatctatggatgggaagtaatgtcggattaattaaattaaatctgaaagattctattgccgaaagcaaatgccgtctctataccacttcagacggtttacaagacaataaatttgcacggggagcagcatgccaagcagaagatggagaaatgttctttggaggtccccagggatataattctttttatccggaaaagttaacggctgatgagttacagccagacatattcataactgatatacaggtacaaaacaaatcggtgaaagacctcccagctaaagataaattaaacataatgtctgatctggcacccggatatgctcagacccttcacttaaattacaaacaaaatgattttacctgtaaactatctgttttgaatttttacaatccggagaagaatgaatatgcttatagattggatggtttagaccatacatggcaatacaccactgacagaagcaacattatctcttatagcaatctggaaagcggaacctatacgctatatataaaagggacgaatgggaatggaaaatggagtaaagtagaaaaagcattaaccatcatcattacccctccctggtggaatagtatgtgggcttatatagcctatgctatcttcttaatagcagttattgcctataccatacattttatcaggaaaagaataagactaaaaaatacactccgcataaaagaagtagagcaaaggaaacaagaagaactgaaccgtgccaaactacaattctttaccaatatcacgcacgagcttcttactccgctgactattatttcagtcacattgaatgagataaaaagtatcgctcctcaaataagcgattattattctattatggacaataatatcaatcgcttaaaacgattgctgcaacaaattctggaattcagaaaagcagaatcgggcaacctgaaacttaaagtatctcaaggcaatattgcttccttcatccgaaaaagcgtcgatagttttctgcctctgctcaggaataagaaaatgcaactcgacatgtcaatcgaacaagaagaaatcatcggatacttcgaccctgacaaagtcgacaagattctctataatcttttatccaatgctttcaaatataacagagaagggaaaacaatacgcgtcaatgtgtcttatggctcttcaaaaagagaaattattatatctgttagcgacaacggagaagggatctccaaagagaatctttctaaactgtttaatcgcttttatgaaggagattatcgcaagtatcatactacaggacatggaataggtctgtctttaaccaaagaacttgcagtgttacatcatggtaaaattgaagttgaaagccagatcaatgagggaacgacatttcgtgtcaccctgcccattattgaagaagagtttactgaagaagaaatagacagaagtattcttcccttacccgaaacggtatcagattccctctctgtgatatcttctctgaacaaagaagaaaccatagaaatcacagaaaaaattgataagaaaaagctgctattagtagaagacaatgaagacttattaaaagtcatggccgattcattgtcccgtgaataccacatcatcaaagccaccaacggtaaagaagccattgaacaattagaaaaaacaaaagatatcgtagtagtcatatcggatgtgatgatgcctgtcatgaatggtatcgaactttgtcattatatgaagaagcaagatgaatggctacatattccaatcatcctgctgacggctaaaagcagtgagtcagatatcattgaaggatatgaagccggggcagacgattacataaccaaaccgtttcaactgacattgctactggttaagataaagagcctgcttaaaaacaaagaaaacctactcaaaaattattccaatatcattgcttttgaaatgcaaaagcccaatatagactccgcggacagggagttcttacaacaagctatcaattgtgtatatgagcacttggatgacatcaaattcgatcaacaagcatttgcagatgctatgcgagtgagcaaatcaactttatacagaaagttaaagagcctgtcgaatgaaggtccctctgttttcatttctgatatacgcttacaaacagcttataagattctttctgataaccccagtatgcgtatttccgatttggcttatactgtaggatataatgatcctaaatattttagcagttgtttcaaaaagaagttcaaagtattgcccagagatatatcacaagaatgatgctattcaggcaatgtaacagggaatatatcactatctctgtgttcccgcttaataatctctttcatctgcttcacaatatcaggatgggcagctgcaatatcatgatcttcatgcacatcatttgagagatcatacagataaggtgtccctttctttaccaataatttccagtctcccatgcggacaccaatttgatctgtttcatggaactcccaataaagaaaatcatgtttttgctgcttgccatcatcccccaacaaggtcgaagcaaaagaaataccgtcgaagcagtcattctttatcttcttatttatgtacttcttcggaaatgctttatcccccatcaactcacaaaatgtaggcatcacatcgtagaaagccaattggtgatcattgaccatgcctgctgatacacgccctggccaacgcacaataaaggggattcgtataccaccctcatggcattgccgtttcagaccacgcaacttaccatcccgtccgaaaaattcgggatccgctccaccctcttcgtgagggccgttatcactgctaaagataacgatcgtattatcatcaagacctttctctttcagcttcttcaagacttcgcctacataactgtcgagacgggtaatcataccggcaaactcagcatgggtatgttccacggcattataacgcgaaccttcggaacctccccaggttttatctctgaaaaaatgctttttgtatcctttaagaatggagtcattgggctgtgccaattccgcatatggaagcgtataagtgaagaagccataaaaaggttgtttgccatcctgcttatcaatccactccatggctttctgatgaatcaaatcggcagaatattgcgaacgctttttgtaatcatcaccaaacatgggataattgatgttgtcttccattacaatacgtacgactccggtatctccttcctctttactgtatctgttcaggaaattgggatagtacaaatgtgcctgaaactgacatatataaccgtaaaattcatctacaccccgtttatccggtgtggagcaggaaccttcatagccgcccgcccatttaccgaaaactcctgtaatatagccgttcttcttcatgacttcgggcagaataatgtggtcttcatcatacggttcctgtcctacgacagagaaatctttattgatgccgtatgtcacggcaggaacatttttccaatattctttattaccacgcacatgagtatgcccagtgtgctgcccggtcatcaaagaagcacgggaaggtgcactaaccggactaccagcataagcttgggtaaacaacataccttcctgcgccatacggtcgaggttgggcgtctggatatatttctgcccgtaacaccccaagtcgccatagcccatatcatcgcagagaatgaaaatgatattaggcttggatgaattatttgccgcattgctgtataaagaaacagcggtcaacaatcctgtccccaaagttacttttatagatttcatatcattgttttttctatttcactgggacggttcattcatttcttctctccgaaatcctcctgttgttgctccacttctttcagtttctgcatattctgttctttctgcaaccgttcctgttctaactcagcagccgattttactgttgttcctcccaacccggtagcagaagcgcttgaaataagcaccgcctctttttctgaatatagtaatgaatgctctgtcagcacactttccaactccaaaacagcactggtgggcatctgcgaaccttcaaacaacacactggctatcacctttatcttgcccggtttcaaggtcgactgtatcagtaccggagcagtgccccactttacaggtgcgggatttgccaatatagaagcatctcccagaaggcgtccttcgccttctacatggaacttcacataataattattcaagcgctttatatttccatttttatcagcaacggcagccaccactgttacaaagtcggagccatcggctttcaagttaaccccttcattatctgtccaaagcagtagcttctccggacgacgtgccggatgcacctcatgggtggcaaccactttgccatctatcagcccttcggccagcaaaagtacatcttcttgttttttcttccgggacatggctttgtccatctgaaaatcatagacatccgggaaagtgataacaggtgaaggcataccggcttctgtcagtggcttgctgtaagtagacactttcccgtctctcatgaaagtaagccggacttcctcgcaattcgaataaacagtgacatccttacttgagaatggagtcatttcatgggctatataaaccatcgggccagtctcgaaaaggcgttcctgtttctcgggcgaacgctgtgccttgaacatataatacgaatacttgggctgacggaatacatccatcaatccaccataaaacggatcaggatggtaaccacgttgatggtcgaacgagtgccagagacatccacccacgtgttgccggggagtgcgataaagagcatcatagcaagtataagtataggtaggattggcataatgccgggcctggatgagcatgggttgctctccccagttgcgtgctacacgactgggtgagttatgcgaactccaatcatccacattgtcgccccactcacgggtaaaataggtaattttaggatcagcattcggatcaccccaggccttcccatcaaaagacggatgggtgaaaagtaccgggaaatattctttgccacgcgctccgctgtcgcaacccgaataacaataagggtaaggatattcctgatcgaccagttcacgggtcttcttggcaaaatcatccggataccaagtttcattcaggataggttcccacaaccagacacaagcatgattacggtcacggcgtaccagattacgtatatcactatatacacgttgtgcaaattcaggggcatcattccagaactgccagcccggagtattgactattacaaacaaaccgagttcatcgcatgcatccatgaaagccgggtcttgcggacaatgggcattgcggatcaccttcattcccgcatcccgcagtttctttgcgtcacgccagtgaatgctgttgggtactgcattacctactacagcaaagtcctggtggcgattggcaccgatcaacggttcttcataaggtctgccgttcagccagaaaccatccttacctttaaattccacactgcggataccaatacggcgacggtaaccatccaccacttttccttcgtggtcgcggatacgtacaatcagattatataaagtaggagtctccggactccacaacaatggattctttactgtgattttatcttttgaagtaacagccttacccggacgtacctgtattttatcattcaggaacgccacttgagtaccatccggttgctgcaattcatattccacaactcctgtaaaagttttacggctatcattacgtagatgagctttcaacaatacttcagccgaagcatccgataccttatcataagccacaaacagaccgccacctgcgacctcgtcctcaaagttagggtcggtgataaagacaggattatgagctaccagccagcaatcacggtagataccaccgaagtaggtaaaatcaaggacatcctgtgcctttccgggaggataagacggatcatcactattgtccgcccatacggcaatcacattatcctctccccatttcaaggcgttggttacatctacgaccaccggcaagtaaccaccaaaatgctcttttatcaaccggccattcacaaacaccttgctcttccccatgatggcttcaaaatgcaggaataacttctttcctttcaatgcatctgcgggagtgaagtgcttacgataccaaacttcaccttggtaattgatacaaccgctggcttctgtaggcagatattcaatcccattaggcagggagactacagcccattccgtatcatcaaaacttatagcctcagcaccggcaacgcttcctttataaaaacgccaggccggattcatggaaaacacttcacgtccggaattgggtaattcgaagaaaccggcagtggaaaactctggttggtgagacgcctgcaatgcgctgcagggaactaacaataaaacaattagaattaaatgaatgatttttctcatgaagatagtattattttaggtgtacacgatttgatgcaacaacaactgtttacaacatccgatacaaaaatagggcaaaacagaagatacgtatcacaataatcactattttttaatccaattttgtctaaccacccattcttttttaccttcaacaagacgaaagagtataatataaggatgagaatgtattcgtgttgatacattctcatccatcccaatttagaaacgactgattaccttaaattattctacctttactatccgaatatcaaatagtcctcctaccgtattatttttctttgcatgtaacttcaccgtcacggttttctttccggaaagcaattctttgggaagcgatactacttcataatagaataaatccggaatgtctttaggttggcaacgatctattgtagcaatctgctttccatctaccaatacatcaaatacccttgcaccttcatccgtattgatgaactgcatgtagagactttgaggtacatccggcaacaccgccatctggtacataaagtaaccgccattggaagcatgcctccatgaacgaccatatgcttcaccccaatccatattcacacccgccagtttatgatcgctctccgaaagtggcgactgaatcagtacatggtctaccgtattcgcttgcaacatctcattttcctgaatagtcttcttttcctgttcataaacagcctgataatctttcatctgtttataaagcgggaaatagatggcatagcggttgaaatgaattctattgaaaggaatcaactcaaaagtagtggaagctacctccgatgaacattcaaacactaattccttatccgattttctggaaactgctttctttattttatctaaagaacctattaacgcaggagctgtcagcattggaatttctaaagtggcaaccgttcttttcgggaatctgaaactataggcttcttccagtccattattgtcgacttttgctgccaggactatgggaccatagagaaatgcagcatatttatcactacctttcagatattctactgtaacctggggagttaattccacctctactttgtctccattgctccacgagcggtccaactgtacataaccttcagtattcggagctaactgcatcttcttgccattcacccatacggtcatcttcttcgcagtcgaccaatgaggcttgcggatattcaaagtgaaatgaacgccagcagccgtattgattacaaaacccaccttattattatcagggaagtccgtgttctgtaccagtttcacacctttatctttccagctcagctcggaaggcataaagaggttgacatacaactcggaaccttgatgcgcatatatcatctttccaaactttgcaggagcctccatacctgtaccggtacagcaccaaaaactatgatgctgggttccatatatccggtaatgtgccggacgcatagaagtatagtaagtacacattccttcatgaggatcataattagccaggatatgattatacaatacccgttcgtaataatccaccatcttcattcttccgtaatcctgatacaaggtttccgtcagcctcatcatattcacggaattacaagactccggtcctccgtcacttggcactctcttttcaaactgatctaccgggaagaagtgctctcccgtactgtttccaccaatcacccaggtatgcttgtctaccacagtttcccagaaaaactgtgccgcccgggtatacttatcttcctgggtatagttgtataccttctcgaaacccgtgaacttaggaatttgcgtattggcatgccaaccgttcaatacatcccgttcctcggctgcgggaataagcatgtcttcatcattcagaagtttagcccatttcagatacttctcatcgcctgtaatctcatatacagtgatatacgactcattgatagaaccatgttcacataccagtaactcctgaatctgttcataactcagtttatccagaacctgatatccaaaccagtcagccatcttcaccagtacatcttttgcttgagggagatcacaactcagataggcattatacaaccctaacatgattttattcatgatgtatacaggttcccataccccgttgattgtcggattgttggtagtgaactttccactcactacttcttcaaagatgcgtcgcccgttgatagttgccaacagatagccatctccctgggcatcctgacactctttcagtccgcgaaccatcttttcaatctttctcttcagtgcctcatctcccgtagcttcatacatcattgacatggaagacaacgagaagcccataatatgcccggccagagggccaccaccccagacatcttcggactcccagaaaggataagcaggtgcatcaggagcaagacctgcctcccgccggaaccaggataacagacgttccggctccaatgatagtagataagcatgatccagttcctgaatatctttaaactgactatcgccaagtctcacgtccgtaagcggaaacaaagtccgttgtgtgggttgcacagggttcaccactattttagtatctgcagcttcggcagttgtgtaggcacttagcaaagtacctaccagcaaacaagttatatatttcatccgttctgttttatgtataaaatttaccaaccatgattctgaatcaggttcttattcttatcgatctcagtctgtggaatcgggaacaggtaatgcttatcctcaaatacacgtttcatcagtttcgagcgtttgtaaaatacggataaacccacttgcttcgactcggaaggaacattcagattcaatcctgattgctgtgcagccttttccaattcttgtataacaggaagtgaattcatgcccgtaacattcgcaccatccacctttttagctatcatccagcgacgtacatcatagaaacgatggttctcatagaataactctacccgacgttcgtttctgattctcttacgcattcccacctgggttttatcctcttcagtgatgggaagtgaaggcatacctaccctgtttctcactgcattgatagcactatatactttgtcatccggtctatccaagtattcattccaagcttcggcacaattcaaatattgttcagccaaacggaacaatggataatgatggcttgtacgccatgacattttcaaattaatattaggatccatccatttacgaataccatatcctgtttcacaactctttcctaccagcttcttattcccctcaaagaagtcatcactattattcagccaataagcatagtatagcggacgattgacaaattccgacttccaataagttccctggaataatatggaggcataaaaacgcggatcacgatccttatacatattagatatattctcaacatgtttcatcgtttttccgtcatgcaattcacctgaccagaaacctgtttccgtatatccggactccggatttatctgaggattaccatttgcatcataaatcacacaaccatcgtcatccatcttgaaagggaaataaccgtctttggtttcatatgcatccaccatctcctgcaaaacagagaacttaccataaccaccgtaatcaccggcattggaggtacattcctgatcaatcgtcatatccgtacccagcaatcccggaagaatgatttccttggaatgtgtgttatcatagaagagtttcgcataattatccaccggattggaaggattgggctgttcaagaatgatacctgcacgagcactccaatctattacagcttgtgctgcttccgccgctcttttccataactctttatcgtatccctgagggaataactgcgtaccatcaggatttatctggtcagcatacatcttgttaccattgtacaaaggacttgccatatacagcaaggtacgggctttcagtgccagacaggcccccttagtaattcgtcccaattcttgggtagaataggaatcaggcaatccggctgcagcaatatccaattcagaacagatataatcgactacttcagtcacagaagctctcggcaacatcgtattctccacattagaaatgtccaccaactcctttggcaaaggaatagcaccgtactgacggaaaagatcgaaaaagaaataggctctgaagaaacgggcttcctccttatactgcttcacacgatccgaataatatgctatttgtgtagctttcaattctactttatctatattgtcaatgaaaacagtggcacgacgaacgaaattgtacataaacttccattcacccagcgggttattcgaagcgccccatgccccgctgttatacaacagtctggaagccggagtttcccaatgatcatacatctcatcggtacaagcacccagctcactcttgaatccgtcacgcctcaagctcccatggtcccaatataagctccagtaaatacgtcccaaggccagttccgcagttttgatatcactgaagatttcttcttcagaggaaacttctgtcggtgcaatatccagatagtcacaagacgttgtcagcatgacagaacatataaataatagtataaattttatctttttcatatctgtatttctttaaaaggtcaagtttactccgatattatatattttctgttgagggtagttacccgagttatgaggcatttccggatcgaagactttaatcttatcccaagtgatcagattttctcctgtcagatagaagcggcagcctgccattcccatccgtttgcaaacagcttctggcaacgaataaccgatctcaagattcttcagacggaggtagtcggaggaacgcgtccagtaggaacttgcctgataattgtttggattagagtcagatgtcatacgaggatagtctacctttgcattctgcgccggagtattgtccttcgaccagtaattacctttcacatcggcaaggacattggagaagcgagcaaagggccaaaccagatcaccggaataccagatatatgctccggcagctccctggaacagtacactcaggtcaaagcctttataactaccgcccaatgaaagaccgaatatcttatcaggtttatcgatacgtcccaaaaagccctcatcttccgcatcaatcacattgtcattattcaagtccttatatttgatatcaccgggctgcacatcaccatacatttgtttcggactgttagcaatatcttcttccgattcaaacaaaccgatagctgtcagtccccacatctcaccaatccgacgtccttcgttttcacgccactcacggcccacatagtcaggttcggtcatatcaatgatcttattgcgtgcataagagaaattggctacagcaaagatgctggcattacggaaagccttacgatattccaattctaattcaaaacctttattatctacaatacctgcattgataagcggaagggactccacacccgagaggtcgggaatagtcaaaggagtagtgagaatattcgtacggtgttcgaagaagatgtcaccggtgaaacgcaactgattattgaacaaagctatatccaaaccgacatctatcttccgggcacgttcccacgttacattcggatttccggtagtggcttcctgggcacctcccagataccaaccatcgcgcacataaccaaagttataaccatacatattcgggttccaagtcgtcatatacataaagcggctaccaccaatctggtcatttcccacttcaccgaaagaagcccttaactttaacatatcgagccaagatacattattctttataaagttctcttctgaaattaaccagctaccggacacggcagggaagaaaccaaaacgcttacctttcgggaagttctcggaaccgttatatcccgcattaaattcaaaataatacttcttgtccaaattatatgtaacacgccccaccagaccttgtcggcgataaggcaaaccagccaccgcattctgagtacctccacccacactcggtgtattttgttgttggttatacaatgccagtaaacctacctgatgccgtccaaattgtctgtcataattcaaagaggcttctactacggctgttctccaaccattggcaatcacatcataacctaatgtcgtattaccatctcctacggaagaataagttcctttggatagatccgtttcattttcatcaattgagaatgtataagacttataagaacgatgtctgttcacatttcgccaattactattatcaaaacttatacgtcctttggcagtcaaacctttcaccagtcccgacatatcccaagataatcccaccgtagcattcaacgttgtggtatggtgtgccccataaccggtctgcgtaagaagagcatacggattagcatttttacctgcaatttcaccgatggatccatccggattaagcataggataccaccaggaaggagtttgttgtatagctttgaagatagttcctgccgcctgaccggggaagttgttatcttggataattcctccaagattcagttccatcttcagtctcttagagaaatccacatccagattggaacggaaattatagcgttcggaacgtacctgagtatcgtaatcattcaagtccgtatgcttgtacattccactttgattcagataggatacggatatatagtaacgaacggcaccgctaccacccgatacattgacattggcctgagttttgaatgaggctttccgcaacaactcttcttgccagtttacattaggatacaaatactggtaagtagggttactgcgatcacggaacttctcaatatactcatccgtatatgttgcataattaagaccatcattcttcagaccttctctgtaaagttgcaaagcatcatatgattccagatattccggcaatcgggtaggattcagcactgcttgctgcacattaacattaatgcgaggcttaccctcagatcctcttttcgtagtaacaatcacaactccattcgcaccacgcactccatatacggctgtggaagaagcatctttcaggatagaaatactttctatttcattcgggtcgatatcaccaaaagcgcgttcaatgccatctacaataactaacggattggaagcagtctgataggttccttgaccacgtacccagatggtagcaccgtcataacccggttctcccgagtactgaatagcagtaacaccggtcaacttacctgccaatgaattagatatattggcaacaggagattgagttagttctttggtactgacagcagatacagcacccgttaccgtcacttttttctgagtaccataaccaactactacaacttcatccagcatttcattggattcctgcatcacaacattcaatacagactgatttttcaactggatttcctgtttctgatatcctatataagaaaataccaatatagcattattcgaaacatttgtaatctcgtactgcccgtcagcaccggtaatcactccctgggcagttcctttcactgtgataagtacccctattaagggttctttgtcgacgcctgtcactgttccctttattatttttgtagcttgtgtcgtagaagctacagcagcaacatcggcaaacaaagcaaggggtgaattgacaaacaacaatgtcataatcaaacaaatcccccagcaggaatgccatttgtcagggagcattccaacatcaaatactcttttcttttccataaattagatcaattaataagtataacaatagtgtattataagaactcatagtatcaaatctgtctcattttccagaaatccgcagtttgattaacacaaatgtagggattagaagagaagatttacatcataattttggcaaaagacaataaaatcctgtcattaatagggggtacaaaaggttcttggcaagctttgcaaagattctttcaacacagaactgtcaaagggggcaggctgtcttatgaattgtaattgccatatttgtatatggcagaaaatgcaatcatatcagttttaagaggcactatactaactatcaaatagaaatagaaacaagcattttcctttctatactatcagcttcttgaaattctacgaactcaaggtttgaataaaacgagctatctggaaaaaagaaatcatattttgcgggaaagaacctgcctatttactccaaaacaaacggtctatttaccccaaacatacaatctaatcagtcaaaacacacaatctgtttctataaaacagataatcctttttccaaggctacaccattttgctcaaaaggtgtaaccttttaccccattaggtgtagccatgtatcataaagggtataaccattccgccaaccagaacttatttgttctggttggcggaagcacttgaagcaaagaaaactttccttttcaatacagttcagacagattcaaatccaaacgtgcaagatattagaaattatatagcattttatcacattattcccagtcttagtatctcttcaaatctttgaaacgcaaaatccttgcgtttcttttcacttctttataaatgggacggacgaaaggattctgaaagagccaaattatcattttgccattttgctacttcattcctacactctcctattccttttgtttttgtgtccggcaaccgaatactcctccggcaatcattccgggcaaagcctgaatcttcaccgtcacactttttctgcctttcgtcaaattagcaggtatgggataagccctgtcaatccaggcactataagtttccgcccgcagtttttgctcaccaatcttccggtcatttaccagaatctcaaactcccggttaccaccatccgtactgagataagtcaacaccaattccatcggtcgttccgcatccaccttcattgtataggagaaccaaccgccatccgatgcatcccgccaagtattgggtcctccggtatgcgtattcttacctttcaggttatgggctacctccgagtcagtatgcccgataataactttatccgtcatacgcccacgctctatcagttgattcttcagaattgtttcatccgaaggaaaccatacggtcatctcaccatttcccctatgggaacgtgcataataaggaatcaaagtaagggaatcaattacagacttgatgactttaaagttatcctcagcaacaatccgttcagccttgcccttcaatacatttactccaccgaacatggcattttcaaaaacgggcgcaaaagctgtttccggtttcagtacatagttaagaactacattcttattatcggcaaattcagcgcaataaacaatcgggccgcgttccacagctatatgattgacatcagcttccaccagatcatttgccttacatgtatgtacctccatgggtaaattcatttcaatgacatcacccggtttccaatcttccgacagaacagcatagcctttttccattctgtactctttggcgcgtccatttacggttatctccaccgctggtttatgggttgccgtatagttatacaaatcagaaggaaccggctgatcattcacccatccgggaatacgcagcattacgtcgaagtgcttcttgctttcgggtgtcaatgtcagtatgactttaccatcccaagggtaatcagtttgttgtgtcagcttaatatgctctccactgtttaaaacaacttcggcctcattggctccgtataagttgacatacattcctttggcagaaaccgcatacacatatccgggaactgaaggaatgaaacgagataaattggaaggacagcaagagcaatcaaaccattcgctacgttcggcaccattctcatcacaagtcaacacattcggataaaagaatttcttgccatccagactgatgccactcagcacaccattatacaaggaacgctccagaacatcaatatatttggaatctccatgcaacataaacatgcgcagattccacatacagttggctatagcggcgcaagtctcacagtaggcggtactattgggtaattcatagttcttgccgaaagcttcgccgtgacgggtggaaccgataccaccggtgatatacattttctttccaactacattttcccaaagcttatctatagcattcttataaggttcttcgttcttaagtgcggcaacatctgtcattgcagagtacatgtaagtagctctcacggcatggcctaccgcctcatcctgttccagcaccggtttatgatcctgccagtaagcgccgttgcggaactggtcttcactactacggtcgtacttatcatactttccacgtgcatccaagaagaactgggacagatcgagataacgtttatctcccgttacccggtagagtttaaccaaaccgatttcaacttcctgatgtccgggtgctaccgtgattttcccttcttccggtccaaaagtctcgcatagcagattcgcactctttatcgctatatccaggaacgaacgtttccctgttgccagataatgagccaccgcggcttcgtacatatgtcctacattatagagctcatgactattatcccgttcattctcccatctttccttaccgatccacggatggtttccgccacttgtacggactgtatacaagtatccgtccggttcctgcgcggcagcaatcagggtgataagactatccacataagcgtccaacgccttatcctgcttgaccgccatcagataagaagctccttccataattttatagacatccgaatcatcaaacggataaggtgaattgaactcaccctccatcaatttgcctgctacggcaaaattatcgatgcgatgcgtatcttcacatttctggaaagcaaaaggaacggttacactacgaatggtttcgatacgtggcgcccaaaagttatcattgaaatgcacattggtaaaaggcacatccttataaaagtaatcagacttttcctgcatagactcacaggaaaggagagtacaggaagccaaaaggacgatcagtgttttcttcatggttattctatattttatgatttatctataattcgtatcagaagttattttcaattcatacaatccgcccgcccgcttatccttaccggcccggaatgtcactttcactttatctttgccttgtgtccattccaccggaatagggaatacatcgtccacataagtcaaataaagtcttctgtccaaacggaccgtacatagcaggttatcatctactaggatatcaaattgaccggcttccgattcatccccccagaaacggcaaatcaggttatagggcttcgtttcttttttatctatatgcagaacgtaagaaaaccagccgccgtctgccatacgatattgtctgttctttgcccagaagaaatcgtgccagtagatggagtcattctctccccggagcagatgtttcttttcatttttttcgtctcctatcttcacttcatccgtcagagaacgagtgcgataggtaaattcatcgggactgtatattttccagtagaccgtatgccgttgatgatgcatccggaaataaggaatcagttccacatcctgttgcttacccccattcttaactgtaaagtgcagcggactttgtgaagaacatacaatccaactctccaggtcagccaatgagccaaccagcatcgggatatttccggcaggtaccgattcacggcatgcccgattatcggaaacacggtctgccggcatattctccttccccaatccaccggccagcaacaacgggccatacatgacagaaccaaagtgaggttcatcctttgcatagtcgatatataacttccgggcgaataccaaagtgatgacgtctcctgtctgcaccggagacaacagacgtatatagtttcctttatgggcttccgtcttcgcttcttttccattgatcagaaccaccgcttcgccatctacccaggcaggataacgaaacaggaatgaaccggtataatccccttttttatctatactgacagaaatcgtatccgattccgggaaacgggtattcattgtcaacgccatccccttttctctccaatttaggcgtgagggaatatacagattgaccagtaaatcctgttctgatttaaaatagatggactcagcatacttggaatgattttccatacctgtaccgacacagcaccagaaagaatcgaacggagtactgtattgtttgaaggaaccgggcaacagagacgtataataggttacacatccgggcatatccgggtcctgagaagctaatatatgattatataaagcatgctcatagtaattcagatatttaaaatctccatccagcataaacatttgtctggacaatttcagcatattataggtattacaagtctcagccgaagtataatccagacgcttactctcctcacccggtatgccgaaacgttcatagcaactatttcctccgatagccaacgtgtgattatttataatcatatcccagaagttacgggcagctttatgataaacttcattagaggaaaattcatattcccgggctactcccataaatttaggtatctgatcattggcatggcgtccaaatagtacatcttctccattggctaccggatatattacattaatgtgattaaatctcttggctgtctgcaaatacttatcatctccggttatgctgtagatatcggtaaacacttcattcattccgccttgctccacactcagtgtactctgaaataaatcgctattactattcaaagcgatattagcaatgaaatcggccaaaggaagcaggatatctttcgcctgcttgcagcctgcatagacataggcatccttcaaacctgccagaatcttatgaatgcaataccaggaattgccattctggttataattccagggttgtctggtctcatcgggccggttcaggataacgttaccttgcagtaattgccgatatccttccttcgctcccgcaccggaaatgaaccatccgtcttttgtctgattctggcattcctgcaattcgctcagcatataattgagtttatccaggaacgctttctcgcctgtagaagcatacatcatggcacaagccgacatataatgtccgtagctacatcctccatgtgtttcccaacctccataattagagccttttccttgtagccccacaccacggcgtacatgcggaatcagcctgtctacttccagcgaaagcaagtattctttattcagctccattgctttcttgaaatagctgtcagtcaactccacatccgacagggcaaaggcttgccacaccggaacatgcacgcgaggcgctttacgcaccttctcatattccgatgccggcaactttgttatccctaaaaccagtatacctataatcaatatcaatctacagttcttcatagtatcccgatgttatatcatttattttattgggttacggggaaagccgaaatacgcaaacgggcggctcccatcggtataagcgtaatctcttccagtacttcacttttgggagcatcttcttccggcaatactccgcacagtccatacttgtcaattccccaggaaggtactttccgcccttttgcctttatcataaggggcacactctgagtggtaaaaggataatcatcagaaggccattcttttctttctactttcaggcactgtgtcaaagttttatcgtccagcttcaaagcataattccatgcactctgcggataaatctcgtaagtaggccatgcgttcacgtccgcatccttctgccatttggaatcccagatggctgtttccgcactgttcactttcctatattcttcttctatcaacagagagaaagtcaacggaccataattcacactcgcactattctggtttgtttcccaacgcttgacggataataccatcggcaattgtaaagtaaccacatcaccttcgctccatgttctgcacaaacggatgtatttacccgactccatatcagcattcaccacattcccattgacaagtactttggcactcttacaccaggaaggaatacgtagatacaaagggaaatccacactctcagaagcttgcaagacaaaacgtatagactcctcgaaaggatagttcgtctcttctttcagggtaacgactgtaccgttttcacccaccttggcctgcgtggtacaaggaccgtaaataacggcagccaaaccattatcgggagttgcatacatcaggttctcaatataataaggccatccctgcgcatgattatgctggcagcaacgactactgaaaggattcattgccaggaaagggcctccattatcgataccgggcctatgattctgagaatcactcactacctgattgggacaggtaatgtatctcaatgccttaaaatcaggcatcactgctgccggataagaattaaatgccacatcctcgcaatgttctgcccagaaaggatcaccagtcatacaaagcatgatttcatccgaagccatctgctctacaaagccacaggtttctgttccctgtcgcggatctatataagccagacgggcattctcgtcagctccaaacatacctcccggtacttgcccaaatatgcggcgcaccagatggtgtactctataagaagctttcaaatctgccgaatcaccactaagcatataataagtagccggctcacggaaagattgagcgatatttacattatgccagttaggcaatgccgaatcattagtccagtcggcagtattacggtgtatcttctctgcaagctccagcaggaatttatcacccgtccggttgtaaagccaataaacactgtacagattatctcctccacgactgttttcccaataatccttcaggaaattctcatcaggtaccgtcatttgccatttgaaatagttagtcataagactgataaccctctcatcaccggaatattcataataggattgcagacaccagagcatgatcatatttgcccaaagttcccggttcccccttcgttcattgaccggaccaaaatatccatccggttgctgacttcggatagccgcttcaatccaagtttgagtttcagctatcattgtagaatcattcagaatatatgccatattgccatatcccttcaaccagtaaggaacttcctcccaaccatgatcgccaccggagagtaaccatgcattgtcttccttatccaaccatgcactgatctcgcccagtttacctgtcaggccttccttctgcaataataagtactttttcaaccagccttccggtttaatatttcctaccggcagcttaataaagtgcagaggcttcagtggtaatctgtttcccgtatagctcacattagcagaggccgtatacggacgggataaaatattcacttctgtcgaggcattcttttccgtacaggacataagcacagccgtagctaaaaaagagccaagcaataagttcttcatttttctttttctattaagcatatcgttatcttttaaattatttctgtgacagcaaaaatacagcaatacagaaactttacaggataaaatccaacctgaaaatgcaacgattctgttattcgaccttattttatattcttaatagcctccaaaacttttcttacctccattaattgatccggactccattttaccacctttctatcatatgtgattaatccgttgatttcactttccacatccgtgatctgggtataaacagcagcacacaatccttcctgtttttttagttcttctactttgccggcatactcaatgaacagtcttttaagatcttccgcactattcaccgttgtataattcacttcactgcctgcccagatatgattatctattttcaaattaataccaccatattctccacaaaccacagcccgctgattcaccggattatcatagacagccggtagcggatagtgatgtttatcaatcatatccccgatttcataatcaaaccaaccgctggcagcattcaccaggcgaccgttactcttttcctgtacttttttgacagccatacgtgtataagcctcacgcttatcttcaatatctttccggtcatattgcccccagccttcattaaatgccacccaagtgataatagaaggagtattcttcaaacagttcatgatattatgggcttcacgtacaaagttggtttccacccagtcgtttctttgtgtattagtggtcgcattcggaatatcctgccaaaccagcattcccagtttatcacaatgatagtaccagcgtgcaggctctactttcacatgtttacgtatcatgttgaatcccatttctttcaccatctttacatcatattccaatgcctcatccgaaggagcggtatacaatccatcaggccaccagccctgatccaatacaccgtactggaacaatggtttattatttagataaatacatggtttgccgtcttttctctccaatgcgattttacgcatacctgcataacttttcacgatatctacagttttaccgtccttctgcaattcaatctcaacatcatataagaatggggactcaggactccacaggcgaggattcttcaccggtatttgcaattcttcgccaaaggaggaaactttcatcttagtaacttccttcttatcagccaatacacgaatcacagcactcatgtcatccgataacgcattaggcatgagcgtgattttcatctgttcattgtcaatatcaggtacgatcaggaagtcggacaaatgggtctttgctacaggctccaaccacacagtctgccaaatacctgttacgggagtataccaaattccattcggatttaacgactgcttaccatgaggctggccaccagcccactgggaatcaaagacctttatcaccagctcttgttgggcagtcttttgcaggtaaggggtgatattaaaggaaaaggcatcgtatccgccttcgtgtgtacctacactcttcccattgacataaacttcgcacaaccaatccacagcacccaaatgcagcagtaattcttttcccttataattctttggtacagtaaacgttcttctgtaccagtaattcttatcatcattcttcgcatcaacttccattactcccgaaagagcagactctacaggaaaaggaaccagaatacttttatcaaagacccgtttctcattatacgtatccccatatgtaccacgggtaaactcccatattccattcagattaatccaatcgttccgctgcatctgcggacgagggtattcttccaaaacatgtgcaggatctatcttttctccccaggtagtcatgactgcaactttagcaggtttccactcctgagaacatacggagaaaatgagtccaaatatcaataggaaagaagaaatcaatctattcatcatactgtgttttaataaagtactattagttattatctctttttataatccgtacatcaaaaataccacctgccgtacttccattcttagcctggaatttaaccgtcacagcatttttggaagcaatacaactatcgggtatctcgatatagcgtctatacagtccagaacagtctggattaggagtagaaagatcaagagtctgtatcggtttcccatcaatcagtacatcaaatacccggtttcctccatcactcccaaaaagctgtaaacataaagactgtttcacaccgggcagggctttcaattcatacataaaatagcctcccttatttgcatctctccagtcgtatccgttagaagaaaataccgcctccattttgtgtgccttttccgactcttgattagccacgatcacccggtcgacagtcttggcctgcagttcagcctcttcttgcttttgttggttctccaattcattcatttctttatgtgcctttaaataatcgtctttccgatcataatgacggaaataaactgcataccgactccagtgaatcgtattaaacggaaccagttccacgggttgggaaaccactttatcagtacataaaaatgcaagtttatcccctttcatacgggttatagcagatgcgatcttctgaacattaccaaagaaagccggtaccttgactacaggataatttttcgatgcgattgtgctccgtgctgatctgaaatctgctttttgtaactgagcgtcaggaatccggacacccaatacgataggaccatatttcaaagctatataatggctagcctgattcagtggaaccacctccactttcatcggtaaatcaatatccacccggtctccatccttccaatgtctattgatagaaatatagccatcggctcctgctttcactttctgacgcttaccattaatcattacagttagtgaggatgttcccacccaataaggacagcgtaccttcagatcaaattcagagtctcccgaaatagtcagatgagtagaactttcatccgggaatgaagtctcctgccgaacctgaatattctctttccatgaaaccactgaaggaataaacatattgacataaagagcctcatccgtatgtgcatagatcatctgtccaaacttggatgtctgttcaaaccctgtacctgtgcagcaccagaaagaatcatacggagtgccatacaccttatagtggcccggcttcatagaagtataataaacgcacattccctgatccggatcatagttggcgagaatatgattaaacagtacattctcataataatctactttttcaacctcaccataatcacagaacaaccgttccgtcagacgcaacatattcacagaattacaggattccggtccaccgttatgttcaattctccgttcaaattcttcgggagcaaagaaatgttcacctgtactatttcctcccattacccaagtgtgtttatctactacggttttccaaaagaagcgggccgccttggtaaacttctcatttccatcataacgataaaccgactcaaaaccagtaaacttaggaatctgagtatttgcatgccaaccctgcaaaatatcccttccttcagacatcggtacccacatatcttcatcattcagcatctgcgcccatttcagatatctcttttctcctgttatctcatacacatccacaaaagactcattgatagagccatgctcacaaaccagcagtttttgaatatcttcatgcgacaacttatccagaatggaataaccaaaccaatcagccatcttcaccaaaatatccttagcctgtggtaaattacaacgcatatagacctgataaagcccaagcatgattttattcatcacatataccggctcccatgtcttatcatgaggtgtatctataaagggatttgaagtttcgaaattaccatgtacaacgttctcaaagacagctctaccattgatagtcggtaagagatatccatcgcctcccgcctgttggcaaatagccagttcctttaatatataattcaatctttccagtatggcagcatctcccgtagaatcatacatcatagaaattccagacagataaaagcccatgatatgccccggcagaggtccatggccacccatccattccgattcccaaaacggataaggctgggccttaggagtcagtcccgcctcacgccggaaccacgaaagtaacttatccggttccaaggagagtaagtactcatggtttaagtccataatatgcttaaaatcgctatctaacaaacggacatcttgcaatgaaaacaaggatattttatctctatttgcaggagatgctttcgttttgttttcctgtgcacaaacaccggaaaagaccaaaaaacaataaaagagagcaagaacatttttcataatacgaatcattttataggtgttattttcgatgagaagttggttctgtgggcaaatgtaggcctattgactacaaaaaaacaaaaatattcttccagtttacattactatccggtcaaagttaatatcccatactttttatgcctgattcccttcttgccattcacaattaaatatctacatttgtgaacaaccttatcaataaaactatgcataagaagctttttttcctgatgctaactttcgttagtttgtttgcaaatcatgtaaatgctgaaagatactacttccaacatttaggactaaagaataaattgtctcaaagctctgtcctttgtatacagcaagacaagagtggttttatgtggttcggcacaaaggacggactaaaccgttacgacggctctaacttccgcacattcaagtacgaccataagaatccccagtcattaggcaataatgcaatcaattccctccatgagaacaaagatggaaacttatggatagggacagataatggcatttatctgtataaccccatcatggaatcattctccaaactcgaaaagaagagccaggacagtgtttgcattacccaacccattgtacaaatcactgctgactcgcacgaaaacatatggctcatagtagaatcacaaggcgtcttctacttcgacaatgataagcaagcattattccattacccggttcccgatgcccatgctcttagttccatttgtgtcgatcaacagaacacggtttggttgggttataaaggaaaaggtctttattatacaaatgatacattcagaacattacaattattcactactaaagatggaaagaacctctttgctactgatcacattttcaagattcttcccgagcagcataacacattatatacaggttccgccaaaggaggactaaagagtataaatatcgtcaaccagactgttacagacctgttagccgatcctcagactgaaagtatctttgtcaggaccatctatcccatcaataaggatgtactatggattggaacggaaaggggggtctatacttatgataaaaacacgaaagaaagcaggcattttactcacgatcccagtgacgactattcattatcggataatgccatttactccatctgcaaagataaggaaggaggcatctggataggaaactatttttgtggcattgattattatccgaaccaatacgccacattcgaaaagtattaccccataacaggtaaaaacagccttagcggcaaagtcgtacgcgaattctgtgaggatgaagaaggtaacttatggattggtacggaagatggcggacttaataaattcaatactaagactaaacagttcactccactcaatttaagcggattacactataatatacatgccttaagtttagaccataacactctatggataggaacgtattccaaaggactatatgcactggatttaaggactaaccactccagacattacactatgggagatgcagagaatgaattgaatgataataatatctattccatgtgccgcacctcatcaggagaactatatataggaacaactaccggattaaatcaatacaactaccaaagtgataattttacccgcattcacaagatggacggcatttttattttcagtatattggaagatagtaaaggaaatatctggttcgccacttataattccggaatattcaagtacaaccccagagataaaagttggaagaactatgtctccagccctgacaatccacatggcctgccctataacaaagtgataagcatatacgaagacagcaaacaacggttatggttctccatattgggacatggcttctgttcactaaacgaagatacggagacctttatttcttatgactcttcccaaggattggccaatgacgtcatctacaaaataattgaggaaaaggatgatattctatggttgacttccaacaaaggtctgatacgattcgacttaagtacgaagaaatcaaccatctatactgacagtaacggtttattaaccaatcaattcaactattgctccggaataaaaagtaaagatggaactatctatttcggatgtataaatggcttcattgcttttaaacccgatctattcaccgagaataccggcttcccgcctgttgcaatcacagactttctgctcttcaacaaaagtgccgacattggaagcaccgattctcctttagcccagagtgtgacatatactcaaaacatagagttgaaatacaatcaaaattcattctcattccgctttgctgccttaggatatgcatctcctgaagaaaactgcctaagttacacattgaagggattcgataaagaatggtattatacatcaaaaagcgccacagctacttacaccaatctcaagcccggtacatatacattctgcgtaaaagcagcaaacggcaaaggggaatggaatgacgaatacagagaaatccaaatacatattgcacctcctttctggaaaacagtttgggcttatattatctatgtgatattagccatcatcattacaagttatactctctaccggttccggaaacaaataactgataaacataaaaggcaattagaagtactggaatcggaaaaggagaaagagatttatcatgcaaagatagatttcttcaccaacattgcccatgagatacgaactcctctgactctaataaaaggaccgttggaaaacatcctgaaaaaagaagaaataaatacacactcactcaaagataatttaagcatcatggagagaaataccatgcgcctgcttgatttgacaaatcaacttcttgacttccgcaaaacagaagcgcaaggattccaactcaatttcatgatttgcgacatatctcaactcataaaagacacctacatacgtttcgaccctgctgcaaaacaaaatgatctgactttcaagattggactgcccgaacagaatttcaatgctgccgttgataaggaagcactgactaaaatactgagcaacttattcaacaatgccgtgaagtatgcgaaatcatacattcatgtatccttacatgcacctacagatgagcaaaatgatttcttctcgatcacagtcagcaacgacggattacctattcctgtggaaatgaaagagaaaatattcgaacctttcgttcagatcaaaaatgtatccaacggacaaaccaaaacaggaaccggtatcggacttccattagcccgttcactgacggaactgcacagaggaaaactatatctaaaagatagtgatgacatctgtttctgcatcgaacttcccatcaaacaggaaaaaaccattctattgcagaaaacagaaatagaaaaacctgtcaatacccctaccgtcatccgccagcaccaaacagatatatgcatactggtagttgaagatgatcctgaaatgcaaagtttcattagctcccaactgggaaatgcctattctgtgatgaatgcctcaaatggcaaggaagcactgaaaatattgtcagagaatacaattagcctggtggtgagtgatgttatgatgccggaaatgaatggatttgaactatgccgtacattaaaaacgaatatcgaatacagtcatattcctatcatcctattgacagccaaagctaccattcaatccaagatagaaggcattgaactgggagccgatgactatatcgaaaaaccgttttctacggagtacctgttagcacgtattgccaacctcctaagtaaccaggagaaattgcgccaggcctttacttcatctccctttgtcaatgcccaaaccatcgcattgaccaaagcagatgaagcctttttggagaaattgactgaggtcattaaaagtaatatctccgaacccgaattcaacgtagatatactggccgagaaaatgaatatgagccggtccagtctgcaccgtaaaataaaaggcattgcccaaattacccctaacgaattcattcaactggaacgtctgaaaatggcagcccagctcatccaatcgcaagagtacaaaatcaatgaggtatgttatatcgtcggatttaactcctcttcctattttgccaaatgcttccaaaaacaattcggagtacttcccaaagacttcgggaacaagccaacgggctattacacttcctcccagcagaaagttactgataaataagctgatagataataaacaagctacatctactccatacccggaccgtatctgcaccctacttgctccgtaccaagtatggtccggatacaaaactgagactataaaaccatgttagttccccacccaaaagggctttcaccactatgttcattatcaacgaaataaacaatgaacagggtgttgaaaacttctcagaaagtttttagttaaatcttgtggggaattgtggggaaatgtgtacttttaccgtcgcttattataataaggtaacaatgatacgttttttgggcaatatagaagcgaagaccgacgctaagggacgtgtatttatccccgtcggttttcggaggcaactgcaatccgcttccgaagaaaggctcgtgctgcgcaaagacgtattccaagattgcctggtactctatccagaaagcgtttggttcaagacgcaaaaccaattaaggaggcgattgaacaaatggaacgcaaaacaccaagacattttccggcaatttgtgagcgatgcggaaatcatgattcccgatgggaacggacgcatccttctgcccaaacgttacctgcaaatggccggcatacagagcgatgtacgttttattggtgtagataatacaatagagatctgggcaaaagagaaaaccgaacagccattcgtaagtccggaagagttcagcgaagctttgcaggacattctgggagatgaggatgattgggaggaagaagaagatgagtaacaagtgattagttattagtgatgaatgaagaattgacatatcatgtaccggtgttgttgaagccgagtgtggacggaatgaatatccgcccggatgggacatatgtagacgtcactttcggtggaggaggacattcacgcgaaatactgtcacgattaagagacggcggacggttactgggatttgaccaagacgaagatgccgaacagaatatcgtggataatccgcattttatttttgtacgcagcaatttccgctacctgcataacttcctgcgctaccatgatatagaagaagtagatgcgatacttgccgatctgggtgtgtcctcacatcacttcgatgatagcgagcggggattctcattccgttttgatggtgcactggatatgcgtatgaacaaacgtgcaggagacactgcggcggacattatcaatacttatgatgaagagcgcctggcagatatcttttatctgtacggagaactgaaaaacagccgcaaattggcatccgtactcgtaaaggcacgcgccggacaaaagattacaactatcggtgagtttctggaagtcatcaagccacttttcggtcgggaacgcgagaaaaaagagttggcaaaagttttccaggcattgcgtatcgaagtaaatcaggaaatggaagcgctgaaagagatgttgtatgcagcaaccgaagcgctgaaaccgggcggacgcctagtagtaatcacgtatcactcgctggaagacagaatggtgaagaatatgatgaaaaccgggaacgtggaaggcaagatggaaaaggatttctttggaaatgtacagacgcctttccgactggtaaacaataaggtgattgtaccggacgaagcggagatagaacgaaacccgagatcgagaagtgcaaaactgagaatagcagagaaaaaaggggaggaatagtggttagtgttaagtgattagtaattagcgataggcaatgagtgaagtagaagagaaacagattaatgagaaaacagagaaagcgaaaaaagctaaaaatcgcacgtctctgaagaacatcattggtggtgatattctggcaacggatttcttccgtcgtcagaccaaattgcttgtgctgataatggtactgatactgttttacatacacaaccgttatgcttgtcagcaacaaatgatagagattgataaactgaaaaaagaactgattgacattaaatatgatgccctcacccgtagctcggagttgatggaaaaaagtcgccagtcacgcattgaggaatacattgcaaccaaggagagtgacttacagacctcaaccaatccaccgtatttaattaagtaatcagtagaatcgttaaacagaaaacagacttggcagtaaataagaaaaatatcatgacccgctacttctttgtagtcctcgtaatggggctgctgggaatagctattgtcgtaaaagccgcaattatcatgtttgcagagcgacaatactggcaggatgtagccgaccgtttcataaaagagaacgtgacggtaaagcctaatcgtggtaatattctttcatccgatggcaaactgatggcaagttccttgccggaatatcgcatctatatggactttaaggcaggtggtgtaaccaaagataccatgctggtgaaccacatgaacgaaatttgcgaaggactgcataagatattccccgataaaagtgccgccgaatttaagtcacacttgcaaaaagggcgtaagaagggcagccgtaattatctgatttatccgagacgtatctcgtatatccagtataaagaagctaaacgtctgcctgtattcaatctgaacaagtacaaaggcggtttccacgagcaggtttataatcaacgtaagaaaccattcggatcattggcagcccgcacattaggcgatctttatgccgatactgcacaaggtgcaaaaaatggtatcgagttgtcattcgacaccttattaaaaggtcgcgatggcatcactcatcgccagaaggtgatgaacaagtacctgaatattgtagatatagcccccgtagatggttgtgatattatctcaaccctcgatgtaggcatgcaggatatctgcgagaaagcattggtagacaagttgaaagaaattaatgccactgtaggtgttgcagtactcatggaagtacagaccggtgaagtgaaagccatcgtcaacatgatgaaagctaacgatggcaactattacgaaatgcgcaacaatgccatcagtgacatgatggaaccgggctctactttcaagacagcttccatcatggtggcccttgaagatggaaagatcacaccggaaacagaagtagacaccgggaatggtattatgatgatgtatggcagcaaaatgagagatcataactggcatcgcggaggatatggaaaaatcaatgtaacacgcattctggaagtctcatccaatgtaggtgtctcctatctcattgataaacattacaaagataatccgcagaaatatgtggatggtttaaagcgcatgagcatcgaccaaccgctacatctacaaatttccggtgaagggaagcccaacatcaaggggccgaaggaaagatacttcgcaaaaaccaccctgccctggatgagtatcggatacgaaacacaggttccgccactcaatatcctgactttctataatgccattgccaacaatggtgtaatgatacgacccaaattcgtaaaggctgcggtaaaagacggtgaagttatagaagaatatcctacggaagtgatcaacccgaagatatgctctgaccggacattgactcagatacgtgatattctggaaaaagtggtatcacaaggattagccaaaccggccggaagcaaacaattttccgtagccggcaagacgggtacagcacaggtatcacaaggtacagcaggctataaaaacggacgagtaaattatctggtaagcttttgtggctatttcccggctgatgctcccaagtatagctgtatcgtttccatacagaaaccgggacttccggcatcaggcggtctgatggcaggtagtgtattcggaaaaattgcagaaagagtatatgcaaagaatctgaggtttgatatccgcagtgcaatagatagtacaagcaatgtcattccaccagtaaaagccggagaaatgaatgaagccttccaggtactgaatagtttgaaagtaccggtacagaaacaattcacatccaagaaaggacaagaggtttggggacatacacaagctgctcccaatgcagttgttctacaaggtaaagacggggccaacccggatctcgtccccagtgttattggaatgggagcgaaggatgctgtgtacctattggagagtaaaggtttgaaagttagactaaacggtattggaaaagtgagaaatcaatcgataccgggaggcaaccgtgtggtaaaaggacagacggtgacgttagcacttcattagaggtgtggacgaaagatttattaatttagaatatatattatatataaggtatggtattaagtgaattactgaaagcaatacaaccgatacagattatcggaagtacggagacggagataacgggggtaaacatcgactctcgcttggtacaagccggacatctgtttatggctatgcgcggtacccaaactgacggacatgtctatattcccgcagccatagagaaaggtgctgtcgccgtgctctgcgaagatgtacccgaaactaaacaggagggcatcacctacattcaggtgaaagacagcgaagacgctgtaggcaaagtagccactacattctacgacgatcctacttccaagatggaactagtaggcgtaaccggaacgaatgggaaaacgaccatcgccaccttattatataatacattccgttatttcggttataaggtaggactgatttctactgtttgcaactacatagacgatcagcccatacccactgagcatacgacccccgaccccatcactctgaaccagttattaggacagatggcagactccgggtgcaagtatgtcttcatggaagtgagttcgcactctatcgaccagaaacgtatcagcgggctccgttttgcaggtggtattttcaccaacctgacgcgcgaccatctggactatcacaagacagtggagaattatctcaaagctaagaagaaattcttcgacgacatgccgaagaacgccttcagtctgaccaacctggatgataagaacggacttgtaatgacgcaaaacacgcgttcaaaggtatatacctactcattgcgcagcctcagcgatttcaaaggcaagatattggagtctcatttcgaaggtatgttactcgacttcaataaccacgaactggccgtgcatttcatcggtcgttttaatgcttcaaacctgttggcagtatttggtgcagctgtactgctcggcaaaaaagaggaagatgtattggttgccctcagcactttgcagccggtagccgggcgctttgatgcggtacgttctcccaaaggcatcaccgccattgtagattatgcacacactccggatgccctcatcaacgtattgaacgctattcacggagtacttgaaggtaaaggcaaggtgatcaccgtagtaggtgcaggcggtaatcgcgataaaggcaaacgccccatcatggccaaggaagcagccaaagccagcgatcgcgtcatcatcacctcggacaacccgcgttttgaagagccccaggatatcatcaacgatatgcttgccggattagacaaggaggacatgcagaaaaccatcagcatagccgaccgtcgcgaggccatcaagaccgcttgcctactggcacagccgggtgatgtaattctcgttgccggaaaaggccatgaaaactatcaggagattaagggagtgaaacatcatttcgatgataaagaagagctaaataaagtttttaacggttagtgataagtaattagcaactgcattatcaccatgcaagacactaatcgcttatcaccaatcactaatcactaagaacatgttgtattatttatttcaatggttagacaagtatgacattcccggtgcgggtatgtttggatatacatcattccgggctttgatggcaatcattcttgcattgctcatttcaagcatctggggagatcgttttatcaacctgctgaaacggaaacagattacggaaacacaacgtgatgccagcatcgatccgttcggtgtgaacaaggtaggtgtaccgagcatggggggcgtcattatcattgtagcaattctcattccgtgtctgctactgggtaagttgagtaatatctatatgatattgatgctgattaccacggtatggctggggtcattaggatttgccgatgattatatcaagattttcaagaaagacaaagaaggcctgcacggaaagttcaagattatcggacaggtaggtttgggattaatcgtaggacttactttatacctgagtccgcaagccgtcatccgcgaaaacattgaagtgcagaaacccgggcaggaagtggaagttattcatgcgggacaagacattaagtcgacgcagactaccatccccttctttaaaagcaataacctggattatgctgatttcgtaagtttcatgggtaaacatgcgcaaacggcaggttgggtactgtttgtgattatcactatattcgtagtgacagccgtcagcaatggcgccaatctgaatgatggaatggacggtatggcggcagggaactcggctattataggtttggcactgggaattttagcttatgtatccagccacatcgaatatgccggttatctgaatatcatgtatattcccggatcggaagaactggtaatcttcatctgcgccttcattggtgccttgattggttttctgtggtacaatgcctatccggcacaggtattcatgggtgatacgggtagtttaaccattggcggtattatcgccgtatttgccatcatcatacacaaagagttgctgatacccattctttgcggtgtattcctgctggaaaacctatccgtcattttacaacggttctattacaaagccggaaaacggaaaggagtaaaacaaaggctattcaaacgaacacctatccacgaccacttccgtacctccatgagcctgatagaaccgggctgtacagtgaagtttacaacgccgaccaagttgttccatgagtcaaaaatcacggttcgtttctggattgtgacgattgtactggccgcgataacgattattacattaaagataagataacagagttgccagtgacgagctacaagctacaagtgctcgctaccggtaaccaataagaaacaaacttgtagcaactaccaactccagccactgcttgtagctcgtagctggtagcccgtaactaaagaaaacatgagtagaattgtagtattaggagccggagagagtggtgcaggtgctgccgtactcgccaaagtgaagggattcgacacattcgtatccgacatgtccgccattaaaagcaaatataaagaaatgctggacaggtacgacatctcctgggaagaaggacagcatacagaagagctgattttaaatgccgaagaagtggtgaaaagccccggcatccccaatgatgctccgattatattgaaactgaaaaagcaaggtacgcctgtcatctctgagatagagtttgcagggcgctataccaatgctaaaatgatatgtattaccggttcaaacggtaagaccactaccacctcactcatttatcacattttcaagagtgcaggtctgaatgtaggattggcaggcaacattggcaagagtcttgctttgcaagtggccacggatcaacatgattactacgtgattgagcttagttctttccagttggataacatgtataagttccgcgccaacattgccgtgctgatgaatattacgcccgaccacctggaccgctacaaccactgcatgcagaactatgtggacgcaaagttccgtatcacgcaaaaccagacaccggaagatgccttcatcttctggaatgacgaccccatcatcaaacgcgaactggacaaacacgggttatgcgcccacctttatccattctccgcaatgaaagaagatggagccatagcctacgtagaagacggtgaagtggaaatcaacgaacccatcgccttcaacatggagcaggagaaattggctttacaaggcacacacaacttatacaattctctcgccgcaggcatctctgccaatcttgccggaatagagaaagaatatattcgccgtgctttgtccgacttcaaaggcgtagaacaccgccttgaaaaagtagccactgtgcgcggtgtagagtttatcaacgactctaaagctaccaacgtaaattcctgctggtatgctttgcagagcatgaaaacgaaaacggtcctgatactaggcggaaaagataaaggcaacgactatacagaaattgaagacctggtgcgcgaaaaatgctctgccctggtttacttgggattacataacgaaaagttgcacgatttcttcgatcgcatgggattgcccgttgccgatgtgcaaaccggtatgaaagatgccgtagatgccgctttccgtttagcgaaaaaaggcgaaacggtattgctgagtccttgttgtgcaagcttcgacctcttcaacagttatgaagatcgcggagaccagttcaaggaatacgtaagagcattatgaccgtgcccgggataaaaagacggtcgcacatcgtgagaaaagcaagcgtatatgagcgctttcattccttaattattaactattaatttgcgaagtattggacttactcagaagcatattcaaaggtgacaaggtaatctggatcatattccttttcctttgcctcatttctatcgtagaagtgttcagcgccgcgtctacactgacgtacaagagcggtgaccactgggggcctattacacagcacagcatcatcctgatggtgggcgctgtagtagtggtgtttatgcacaatattccttataagtggtttcaggtgttccctgtgttcctgctgcctttgtccgtagtattactgggtcttgttatgatgatggaacgcatcaacggtgctgcacgctggatgaccttcatgggtatccagttccagccttcggaggtggcaaaaatggccgtgatcatcgtcactgcctttatcctctccaagggacaggatgaagacggggccagtccgaaagccttcaagcgtatcatgattatcacaggtgttgtctgcctgctgattgcaccggagaacctttcgacggcggctttgcttttcggagtggtttttctgatgatgttcatcggacgggtggcaataaagaaactgttaatattggccggtgctttggcaggagtagcaatcataggtgtagcattcctggtactgaccaagaatagcgatttaccgttcctgcaccgttttgacacatggcgtgcccgtatagagaaattcacggatgacacagaagtgcctgccgccaaattcgatattgacaaagatgcccagatagcccacgcccgtatcgctgtagccacaagcaacgttgtaggtagaggaccgggtaactcagtacagcgcgacttcctgagccaggcattctctgactttatctttgccattattgtggaagaattgggattgataggcggggctttcgtcgtattcctctacgtctgcctgctgatacgagtcgggcgtatagcgaagaagtgcgaccgaacgtttccggctttcctcatcataggaattgcgctgttgcttgtatcgcaagccgtatttaacatgatggtagcagtaggattggcaccggtcaccgggcaaccgctgccgcttatcagtaaaggtggtacctccacacttatcaactgcgcctatatcggcatgatattgagtgtgagtcgctatactgccaaattggaagagattaaagaacatgacgcacagataccgatgcaagtggaagctgctgttgaagaaggaaatagcgagatacaaacagcggccgaaccaacagcaaaggtgctgaacagtgatgcagaattcgagtaggagacaacggagtgacaactcctttaactcctgcaataaaattaagtatgaaagatatgaataaaagtcataacggagaggctccccgcattatcataagcggtggaggtacagggggacatatattccccgcagtatccattgccaatgccatcaaggaactacgccccgatgcagaaatcctctttgtaggtgcagaaggacggatggaaatgcaacgtgtgcccgatgcaggatacaaaatcatcggtttacccgtggcaggcttcgaccgtaaacgtttatggaaaaactttgcagtgattataaagttactccgcagccagttgaaggcacgccgcatactgaaagagtttcatcctcaggtagcggtaggtgtaggtggttatgccagtggccctacgttaaaagtagcaggtatgatgggagtgcctactttgatacaggaacagaactcttatgcaggtgtaacaaacaagctgctggcacaaaaagcctgcaagatttgtgttgcgtatgatggaatggaaaagttctttcctgcggataagattattatgacaggaaatccggttcgacagaatctgttagcaaataagcagagtcgcgaagcagccgtgacctctttcggtttcaatccggagaagaaaacaatattgatactgggtggcagtcttggagcgcgtactataaaccagacgctgattgccgcactggatacaatcaaagcatacggtgacattcagttcatctggcagaccgggaagatatacattcagcaagtgaaagatgccatcactaccaccaccggagaagcggtacgtaatccacgcatctcagctatcccgaacctctatgtgacggacttcattaaagatatggcaagtgcgtatgcggctgccgatctggtcatttcgcgtgcaggagcaggatctatctctgagttctgcctgctgaataaaccggttattttggtaccttcacccaatgtggcagaagatcaccagactaaaaatgcactggccctcgtagataaggaagccgccatttacgtgaaggatgcagatgctatgaagcatcttattccggtagcactcgaaacggttgccgatgcacaaaaactaaaaacgttgagcgagaacattgccaagttggcgctgccggactcagcaactataattgcaaaagaagtattgaaactgatagacaaactatagtatctcaatgaataaacagcagtatcccaattcccctcctcctgggaggaggggtgcctgaaaggcggggtggtaggtgaaaaacatattccttattttaaagagcccctgccatttcacctaccacctccccccgttggggtactcctcctcccgggaggaggagaattgagatagtattaaaatataagaaaatgaatatagaaaacatcaaatccgtatatttcgtcggtgccggcggcatcggtatgagtgccctgatacgttatttcttatcaaagggcaaacttgtagctggttacgaccgcactccgagcgaactgaccgaacaccttatcgcagaaggtgcacagatacattatgaagaaaatgtaagcctgatccccgaagattgcaaggacaaggaaacaactttagtcgtatacaccccggccgttccgcaagatcatgccgagttagtgtacttccgcaataacggtttcgaaatacaaaaacgcgcccaggttctgggaacaatcacccacagcagtaaaggtctgtgcgtagccggaacgcatggtaaaaccactaccagcacaatggctgcacatttgctttatcagtcacatgtaggctgcaccgcattcctcggaggcatctccaagaattatggaactaacctgctgctgtctcagtccagtccgtacacagtgatcgaagcagatgagttcgaccgttctttccattggttatcaccgtacatgagtgtcattacagctactgaccccgatcatctggacatctacggtacggaagaagcctatctggaaagcttccgtcattatacaaccctgattcaaccgggcggcgcattgatcattcacaaagacattgctttgaagcctgatgtacaatccggcgtaaaagtttatacctatgctcgcaccgaaggtgatttccatgctgaaaatatccgcatcgggaacggtgagatatttatcgacttcgtggcacctgatacacgtatcaatgatatccaattaggtgttcccgtcagcatcaatatagagaatggtgtggcagccatggcgctcgcccacctcaacggtgctacggatgaggaaatcaaacgcggcatggcaagtttccgcggagtagaccgccgtttcgacttcaaaatcaagaatgacaaagtggtatttctgagcgactacgcccatcatcctgccgaaatcgcacaaagcgtaaagtctatccgcgatctatatcaggacaagaaaataacagctatctttcagccgcatctttacacacgtacccgtgacttctacaaggaatttgccgacagcttgtccctgctcgatggagtgatcctcgtagatatctatccggcacgtgaacaaccgattcccggtgtcaccagccagctgatatatgacaacctgcgtccgggcattgaaaaatatatgtgcaggaaagaagacatactgaacctgctatcgcagaaaaagatcgaggttctgattactttaggtgcaggagacatagataactacgtccctgccattgcaaaacaattggcagagtagctgacagttgagaaatcataaatcataattgataaatcatacatgctgaaaagaattctattgtctatcgtcctgctgctcgtcatcgcctatctggtggtagctatcacggctttcaaccggaagcctgccggacaggtgtgtcgtgacatggaattggttatcaaagatacagtttatgccggcttcatcaccaagaaagaagtttcgggtatgctggaaaagaaaggtatttatcccgttggcaaacctatggatcgcattcgtagcaaaacattggaacgggaactcgccaaacatccgctgatcgacgaagtggagtgctataagactcccagtggaatactctgtgtggaagtcagccagcgcatccccatcctgcgagtgatgagtgcaaacggtgaaaactactatctggacaacaaaggcaccgtgatgccacccgacgcaaaatgcgttgctcaccttgccatagtgaccggaagagtagaaaagtcgtttgccatgagggatttatataagtttggtgtatttttgcagaataataagttctgggacgcacagatcgaacagatacatgtgctgtcggacaagaatgtggaattagtaccccgtgtgggtgaccacatcatctatctcggtaagctggacggctttgagcgcaagctcgaacgggtgaaagctttctatgaaagaggtttaaatcaggtaggatggaacaaatattcccgtattaacgttgaatttagtaatcagattatctgtacgaaacgagagaattaaaatataaacaatagaaatatatctatggcaacaacagaatttatcgccgctatcgagttgagttcttccaagatttccggtatcgccggcaagaagaacagcgacggaagcatacaagtgctggcctacgcgcgtgaggatgcctcttcttttatccacaaaggagtcatctacaacattgataagaccgcacaggctctgacttccatcatcaacaagctggaaagccagttgaacaactccattgccaaagtatatgtaggcatcggcggacagtcattgcgcacggtaaagaatgcggtaagccgtgtgctggaagaggaagggattatttcgcaagagttggtagatgcaatcagcgatgaaaacctcgaagttcccctgatggacatgagcgtgttggatgtagccccgcaggaatataagatagacaacaatcttcaggccgatccggtgggtgtggcaggcaaacgtatcacaggaaacttcctgaatatcgtggcacgcgcttccctcaagaagaatctggagcacagcttcgagcaggccaaagtagaaattgccgacttgctcatcgccccgatagccctggccaatgccgtgctgacggaaagcgaaatgcgctcgggatgtgccttggtagacttcggggcagatacgactaccgtatcagtatataaaaataacattctccgcttccttagcgtactgccgctgggtggaaacaatatcacccgtgacattaccgccctgcaaatggaagaggccgaagccgagcaactgaagctgaaatacggagatatgctttacgaggaagaagagactgaaacaccggcagtctgcacactggaggacggtcgtagcatcgagttgaacgtgttgaacgacatcatcgacgcccgtgccgaagaaatccttgccaatgtatggaaccaactgcaactttccggatacgaagacagattgctgtccggcatcatcttcaccggtgggggcgccaacctgaaaaacatggaagacgcattccgcaaacgcagcaaggtcgataaggtaaagaccacccggtttgtacacaacaccatccatggcttcagcgatgtactgaagaaagacggcatgcagaatacactgctcggcctgcttgctgccggcaacgaaaactgctgcctgcaagaagtgaaacctgcacctgccgcttccaccgttactccaccgaaacccgtcgatatgtttggcgacgacgaagccctgaaagaacaggaagccgccgcccgtgccgccaaagcacagcgcgagaaggaagagaaagaacgtcgcgaacgggaacgcaaggagaaagaacgtaaagaaaaagaagagaaaaagaaaaagaagaaagaaggtcccagctggtttgaaaagactttcaacaagatttccaatgagattttctcggatgacgatctgaaatgatctcataacgtataaatcataaattataaatcataaatcccattatcatggacgatatagtacaattcgatttcccgacagattcaccgaagatcattaaagtgattggtgtaggtggtggtggtggtaatgccgtgaaccacatgtaccgggaaggcatacacgacgtaacgttcgttctgtgtaacacggacaaccaagcgttgaaagagtctcccgtccccgtaaaactgcaactggggcgttctattaccgagggactgggtgccggaaaccgtcccgaacgtgcccgagaagccgccgaagagagtagcgaagaaatcaaatcgctgctgaacgacggtaccaaaatggtatttatcaccgccggaatgggtggcggaacaggtacgggagctgctcccgtcattgcccgcatagccaaggagatggacatcctcaccgtcggtatcgtcaccataccttttatcttcgaaggtgaaaagaaaattatccaggcgctggatggcgtggaacgtatcgcccagcatgtagatgccctactggttatcaacaatgagcgtctgcgcgaaatatattccgaccttacgtttatgaatgctttcggcaaggcagatgatacgttgtccatcgccgccaagagtattgcagaaatcatcaccatgcgtggaacggtgaacctggactttgcagatgtaaagaccatcctcaaagacggtggcgttgccatcatgagtactggcttcggcgaaggtgaaagccgtgtgacgaaagccatcgacgatgccctgcactctccgttgctgaacaataacgatatcttcaatgccaagaaggtgatgctgaacgtatccttctgcgaaagctcggaactgatgatggaggaaatgaacgagatccacgaattcatgagcaagttccgcgaaggcgtagaggtaatctggggtgtggctatggacaacacactggaaggtaaagtaaagattaccgtactcgctactggtttcggcatggaagatgtccccggtatggacagtgtgctcgaaaagcgcagccaggaagaggaagaacgccagcttcagctcgaagaagaaaaagaaaagaacaaagagcgtatccgcaaggcttatggcgaaagtgccagcggcatcggcagcaagaacattcgcaaacgccgacatatctatatcttcaaccccgaggatctggataatgccgatattatcagcatggtagaaagttcaccgacatacctgcgcgataagagcaccctgagcaccattaaaaccaaagcggctaccgaagggcagcttgctacggaagaggcacagggcagcgaagatatgggaggagtgattaccttctaaacctgccttaagacatctttcatccgcgtaatctgcggatgaaagattagtacacactatagcgtaataaacaaaaatagagtaaacttatggatttatttgaaagagtcagcgaagacattaaaaccgcaatgaaggccaaagacaaagtggcactcgaaacattaagaaacatcaagaaagtattcctggaagcaaagaccgctccgggcgccaacgatactctgaccgatgacgctgcattaaagatcatgcagaagttgatgaaacaaggcaaagatgccgctgaaatatacatccagcaaggtcgtcaggacctggcagatgctgaactggcacaagtgaaggtgattgaagtttacttgccgaagcagatgtccgccgaagaactggaagctgccctgaaggaaatcattgccgaaacaggtgctaccagtggtaaagatatggggaaagtaatgggcgttgcttccaagaagcttgccggacttgccgaaggtcgtgccatctccgccaaagtgaaagaattgctgggataaactcccacctcatttctgttataagccgtgtttccggaagatagaagaaagtaatttaacttctatcgcccgaaaacacggcttcttttcgcattttattgagtatcataatttttatttcaaatactatcattatatttgccacgcattttcaagggaatatccccgcataataataaaactagaattctggcacagcatatgaaaagcaatataaagatgtggaaattaatggtccttgcggggacaatgcttttcttgtctgacatagcttacgccaaaagccggacacaagacagcgtaccgggatataaaccggatacgggatacttcgccaaacgttttattcacagactgggcgtagaataccgcccggggtatatattccctaccagctcattcttggcgggggacaattcccaatggaaacctttcgaatggggctattccgcccacctgaaatattcattccagttcaagcccaatacatgtgccgaccggatttacggcagcgcctaccaaggtataggcgtaggctactacgacctcggaagcaaagaagaactgggaaacccgattgccgtttacgtctatcaaggagcacgcattgcgcgtatcacccaacggttgtcactcaattacgaatggaacttcggtgtgtccttcggctggaaaccttatgacgaacgctacaacccgcacaacagtgtaatcggctcgaaagccaatgcctatatcaatgccggcgtgcaactgaactggatggtttcacggcagatcgacctgattgccggagtaaccggtacccacttctctaatggtaataccaaatttcccaatgcgggtctgaacaccatgggattgaaagtaggcgtcgtctataacttcaacaggccggaagatgcgcttaccaaacctacgtactatgcacctgtaccgaaatttccgcgccacgtcagttatgacctgaccctgttcggctcatggaggcggaaaggcgtgtgggtaggtagcggacagatcgcttcaccggatgcttatacggtgcttggtttcaacttcgcccccatgtacaacatcggatataaattccgtaccggtgtttcgctggacggtgtatacgatgccagctcaaatgtttatacaatccccggaaacggaaatgagtgctacaagccgtctcttcacaagcagttagccctgggtatttcaggacgtgcggagtacgtgatgccctacttcacagtcggtgtcggtatcggtgccaacgttctgcatggtggcggcgaccacaaaggtatctaccaagtgttgacgctgaaagcggaacttacccgcagctcctacctgcatgtaggctacaatctgaagaatttcagtgatccgaactatctgatgctgggtatcggcttccgtttcaataacaagtatccgactttccaccgctgatacaacgcatccggtccgggagttcttcctcatatccctcatacatctctatcacatccctatttaatctcatgcaaaagatggcatcttttacatcaaaaggtggcatgttatgctacaaaagatggcatcttttacagcgaaagatggcatcttttgcaccaaaggtcagtgagatatacaggaaagggtttattgttctacgtcaaaggacttattaatccatatcaaagagctccttcagcacctcaagagactttaatacgggaaagtcaggcaagtgaaggcgataatattcattcattattgtaaggcagcgggtacgttcagcacggttcatggcaaagaggtgcattgtttcataattcatgcgcatcagcatcgtcagccgtgaagcctccgcaggaagtatataaaatgaatgaagctgcgggcgcaaaggagtgaaacaggcattcagcagatcaaagtaatcaccattctcataatcctccagattagggtacaatcccaggaagcgggataagcgcatcaggaacaccagatggaaattggcaaaactatcgcggcactcgtccagccagataatagaatgttgcagataagcaaacaacggacggttctcagcctcttcgcgcaccgcacgatacaggaactccgccaagaaaagcgctatggaagatttgtacggatcgtagggaatggaagaaaacggatagtaagacttcgcctccgttatcttatacatactggcgttcgaacggaaatccgcctccagctccaccaaggcgagtggctgaaacagcaccgatttcaccgcagccttccgcgaacggggtatctttacaatgaacgaagcacgtccggccgtctccgtatagatgtccgcaataagagaggtatcgttatatttcagggtatgcagcacaatccccagcgttttctgtaacatccgcgcttcaagctttggtttcaatccggtaacaaaactacgaaaaaagccggaaataacgggaataaaacaaggataaataaaaaaatgcaggcaaagaagcaaaaaaataaaagacattatccacctgatattcaggctacaaacacaaaaatatagaataaattctacaaatctttctatttttttctatagattattttgccaattcaaaaatagtccctacatttgcaaccgcaaacgagagataatctctctgcaagagcagaaatgctcaccaaaggatggcccgttcgtctatcggttaggacgcaagattttcattcttgaaaggggggttcgattcccccacgggctacaattaaaaaaataaacgaattaaaaaagattagtcgagatggcaaatcacaaatcatcactgaaaagaatcagacaagaagagactagaagacttcacaacagatattatggcaaaaccatgagaaacgctgttagaaagcttcgttctacaaccgacaaagcagaagctgctgcaatgtacccgggcgtaactaagatattggacaaattggctaagaccaatgtaatccataagaacaaagctaacaacttgaagtcaaagttggctctctacattaataagctaggataagctaattaatattacacaaaagatatacaaggaaagtcggactttttagtccgactttttctgcatctgcacctatcgccccaccccgttccagacaccttctgcaagaagctaaaaagctgtaaacgaatgaaatttatcactcagtttagtttcgtatctcacgaattttcactatatttgctctgttatttgaataaggaaattagattatgactgaagaacagattaactccaataacgggagctattcagccgagaacatccaggttctggaaggtttggaagctgttagaaagcgtcccgcgatgtatattggtgacattagtacgaaaggacttcaccacctggtttatgaagttgtggataactctatcgacgaagcgctcgccggctattgcgaccacattgaagtaaccatcaacgaagataattccatcactgtacaggataacggacgtggtattccggttgattttcacgaaaaagagaagaagtcagccttggaagttgtcatgaccgtattgcatgccggcggtaagttcgacaagggatcttacaaagtatccggaggtttgcacggtgtaggtgtatcttgtgtgaacgccctgtccacacacatgactacgcaggttttccgtaacggaaaaatctatcagcaggaatatgaatgcggacatccgctgtatccggtaaaggaaatcggaacaagcgatattacaggtacacgtcagcaattctggccggataacacgatcttcacggaaaccgtttacaactacgagatccttgctacccgtatgcgcgagttggcctatctgaatgcaggcatcaagatcactctgaccgaccttcgtgtaaaagatgaagaaaacaacgccaagatggaagttttctactcggaagaaggtttgaaggaattcgtccgctacatcgactcttcccgcgaacatctggtaaatgatgtaatctacatcaacacagagaaacaaggcacaccggtggaagtggctatcatgtacaatacgtcttataacgaaaatatccactcttacgtaaacaatatcaataccatcgaaggtggtacgcaccttgcaggtttccgccgcgcactgacccgtacgctgaagaaatatgccgaagacaacaagatgctggaaaaagctaaagtagaaatcgcaggcgatgacttccgtgaaggtctaacggctgtaatctctatcaaagtggcagaaccgcagtttgaaggccagaccaagacaaagctcggaaacagcgaagttatgggagccgtagaccaggccgtaggtgaagcactgaactattatctggaagagcatccgaaggaagccaagatggtggtagacaaagtgattctggccgcacaggcacgtgttgccgcacgtaaggcgcgtgaatccgtgcaacgtaagtcaccgatgtccggtggcggtatgccgggtaagttggccgactgttcaagcaaggatcccgaagaatgcgaattgttcctggtcgagggtgactcggcaggtggttctgccaagcaaggccgcgaccgtagattccaggctattctgccgcttcgcggtaaaatcctgaatgtggaaaaggccatgtggcataaagcgttcgagagtgatgaagtcaacaatatcatccaagctctcggcatccgcttcggtgtggatggcgaagacagcaaggaagcaaatattgataagttgagatataagaaagtgattatcatgaccgatgccgacgtcgatggttctcacatcgacacgctgatcatgacgctcttcttccgctacttcccgcaggtaatccgcaacggatacctgtatatcgctactccgcccctctatctctgcaaaaaaggtaaagtggaggaatattgctggacagaccaacaacgccagaaatttatcgacacttatggtggcggttcggaaaatgccgtacatacacaacgctacaaaggtttgggtgaaatgaacccggaacagttgtggagtacaaccatgaaccctgaaaaccgtatgttgaaacagataagcattgaaaatgccgccgaagtggattatatcttttccatgctgatgggtgaagacgttggaccacgccgcgatttcattgagaagaatgcaacgtatgcaaatattgatgcgtaagaaaaacagtgattaatgatttacgattagtgattagtcactgaataacacgtttttattaaccaacctcacatcttacaacgaagaaacgccggatggacaggaaaatcctgttatccggcgtttttcttttcagctcacgaaatagaaaaagacactccgtgagatggttccgtactatctttacaacagattctgtttcttcatctcttctgccaccaattccagctcagcataccaatcctcaccgaacttacgtatcaacggttctttcagaaacctgtataccggcagattctctttccgccccagcaatacggcggctttacacacatcccaacggttataattcactgccttataaactccgtaatttcctaccctgatcggatacaaatgacaggaaacaggtttgtagaaatctgtctttccgtcccgatatgccttttcaatagcgcaatagcaacaacctttctcatcataacaagtaaaaacacaatccttgttgttgacaatggaggtcaccagatcaccctcacaatcagtatacactaccccttgtttctctataacggcacgtgcctcgggagcaagttcttcccaaatcacaggcagtacttcttccagcttttctatttcatccagttccaccggagctccggcatctccctcaacacaacaagcacccttgcaggcatccagattgcatataaacttttcacgcagcacatcaaaactgaccactacgtcacctatttgtatcatttcctataaaaaattaattgcggatgcaaagataacactttgttccgcaattaataagcacagattacctatttatcgaatgtcaggatataagccccgctcttatccacgaagccgctcacataagaaccgtcatttcctacgcgagcatagcaatatgccagcccattaaaagagaagaagcataccgtcaaaagaagaagtatttcaacaaaagtaggaaaaactacatttacgaaaaagactttatgggatatgttattataatcaactgtttaccatcttcctcacacaactgatagctgccttggaaggcttccagatacagacggtttatggcatgctgaatttcacattctctttcgttttctacatccataagtagcggactgtttgtaaccactatcctcaattcatctatacttttataatccaacatatactgcaccgcatacggctcacgcctcccttttggtgacatcagaacggaagaaagcagcttcatgaagcggacggtatccacctgaacaagctgcgtatgcaaatcagtaaggaaatcaacctgaacagaaattccttcctgcaactctgcctgcatcctagcatctgtgcacaactgtaccatgtcatactcctgcacattaaatttcatcatgcccgactccaggcgcgaaagatcgaggatgttaaatatcaaatcgatcagcttctcagcatttcgccggataaccgccgaatattcctgctgctcctccatgctcagatcattcctttggcaaagagaatcagaaagagttacaacagaataaagaggaacactaatttcattcgtgatgttgtgaagaaagacttctttcatcttatcagccgcctgaaccacggcatacgattcacgcatttcacgctccgacttcgccagttcccgataaatccgggacactcgtaacactccccctacaagcaaaatgacaaacagagatgcaccgcctactgctatctgccagaaacgctttgcaccaatttccttttcaagcagggctttctgtatcctataattggcctgaacggtctcctcattcatacgcaacgtagccttattgatagaatcgcatttcagcacagcgactctatatgtttcagcagcttctttataccgtcccgcatcagcataagcatctcccataattctgcgtatatccatctcatacatcggctgagtgcctttaaaggcagacaatgttaattcaaattgcggaaaacatttatcccaatccttcgttatataataatagcccgcccacgaaaaattataagcaattacagtagaggaaaaagaatcatcagtgtagaactttgcagcttcgtccagatgcttcttcagattaggagcatcctcaacagccaaatagattttacaatacattaattctatttccaggattttactcctataagaatcaagcatcgcatgctgctcctttatgataccatcaatgattctccgttgagcctccaattccgctatcatttcaggatgtttattaaacaaataataagcacttgtcaaatattggtgaaccattagctcatcctccgtggaaagtgaagttaactccgctgcttttttataacattcaatcgctttttcatagttccgggcaaaaacatacgctttaccctctgtcacataagacagaaatatgccccgactgtctttcagacgaatagcttcttcacgcatcttttgtgattccaaaatcgctgattccgtatcacctctgctccccttaagttgaagcatgtaatgtaatgcggaaaagtaattgtcatagatcttagagcgataacagacttccttcagcaaggctaatgctttatccatattctcaccatccagcctgaaagtgtaatagcggaaatattcgtaacgaagcgccaattcactttccacatctttcatgcttattgcagaggctaatgccgaatcaagcaattcagccgaccagtctttatcaatattacgtacaaagagatccttcagaaactgagtccgggcagtatcagcaggcatcgaccgataaatccggaagatactgtcacgcaaattactgccatccgaggcctgggtagcagcaagcgaaaacgagctgactgcacaaagtaacaaaagaatcagctttttcatcgcaccacctcctgctttagaggatgaataaacacaaaccgcgcaccggcagtatagccggaatccacccagatttctccacccagccgcttgataatcaacttgcagatggacaaccccaagcctgcgccctgcactccctcattcagcttctcaaaccgaccgaagatcgtgctttgcctttcaagaggaataccgcaaccggtatccgtcaccgagaactctgcaaaaccctgttcatccaatcgcaatgcaagcgtgatgcttccctctttcgtaaacttagtggcatttaccagcagattcaccagcatttgctgcaaacgcccttggtccgtctctatctccaatgaagtcaattccgtttcaaaacgaatatccgctgatgtctgcttgatgttatccagcatcttcaccacattgcggcagagagccaccacttcatgcgtagtgatgctgaacttcatattcgctacatccaggcatgaaatatccacgacatcattaatcagtttaagcagcaattcggagttcaattgaatcacatcgttgcactgtacacgggtagcctcatcaattcccggcgtagtcaacacttccgagaaacccgccaatgcattcaggggagtcttgatttcatgactcatattggaaaggaacaagctcttgttacgaatggattcttcggccatggacttagctttctgaagttcatttttagaatgaagcaaccgcttccctacctttttcagatagaaaaaaccacccaataaaaaaacggcaagggataggatgatgataaaagagagttgtaacaaacgcttttgctgtgcactattttgcaattccagttcatcgatggtataatctttgcgcatatcttccacccgctctccggtgtatatacgaaacagagaatcaccaagcactatcatttcactataaattcgggccgcatctttgtactcttcttcttccattttctgttcggcattttgccaatacaagctatctactattacctcttctgcacaaagagatgacggcatcccggacaagacaaatatcaatagtaatatgagtagtttcattccatcaattgcgtgtattgtctgcaaagataaccttttagagagaaggactgccattgaagcacaaaaaaagagatgttccaagagcataaaatctcttgaaacatctcctttattgaatattgcaggcagttgcttacttaatcaagtcttttcctgtcatatcggccggctgcgccatacccagaatgtgaaggatagaaggagcaacatctgccaaaacaccattctcaactttggcattcttgttctcggttacataaacaaaaggaaccggattcagagagtgagcagtgttcggagtgccgtcttcgttcagtgcatggtctgcattaccgtggtcagcaatgatgattacttcataatcgttggctttggcagcttctaccgtatctttcacacattcgtcgatagcttttacagctttctcgatagcgctataaataccggtatgccctaccatatcaccgttagcgtagttcacaacaatgaaatcgaacttttgagtgttgatagcttccaccaatttatcctttacttcgtaagcactcatctccggtttcaagtcgtaagtagctactttcggagacggaaccaaaatgcgctcttcagcgtcatacggagtttcacgaccaccgttgaagaagaaagttacgtgagcatacttttccgtttcagcaatgtgcaattgagtcttgccttgagctgccagatattctcccaatgtattctgaacattttccttatcgaaaagaacatgtacgcctttgaaagatgcatcatacggagtcatgcagtagtattgcaagcccggaatgatgtgcataccctgttccggcatatcttgttgagtcagtactacggtcagctctttcgcacggtcgttacgatagttgaagaagataactacatcaccttccttaatggttccgtcgaagttaccatttacaatcggcttgataaattcgtccgtcacaccttcgtcataagattcctgcatagcctgaaccatatcggtagctactttaccttcgccgtttaccagcaagtcataagccactttcacacgttcccagcgtttgtcgcgatccattgcatagaaacgacctacgatagaagcaatcttacctgctgatttttcacaatgtgcagtcagttgttcaataaagcctttaccgctcttcgggtcggtatcgcgtccatccatgaagcagtgaacaaaagtattatccacaccatattctttggcaatatcgcaaagtttgaataagtggtcgaatgagctgtgtacgccaccgttggaagtcaatcccatgaagtgaacgttcttacctttttctttggcataagtgaaggcggaaacgattcccgggttctttagaatgctattgtcggcacatgcacggttaatctttaccagatcctggtatacgatacgtccggcgccaatattaaggtgtcctacttccgagttacccatctgaccatcgggcaaacctacattttcaccgcttgcctgaagctgtgagtgaggatatgttgccagcagactgtcccagtacggagtaggtgtattgaaaatcacgtcatctttcccctgatcgccgataccccagccatcaagaatcattaaaagggctttcttactcataatattaattgattttaaatgtacaatctttaaccttagcaaaaacgttctttatagagagaacgatttttccggctgcaaaggtacaaaaaagcacggttaaagcgtactgtttcaaatgatttatgtacttttgtcgcgctttaaaaaacaaaaaacaagaaatatggacgattcaaacccacgaacgtgcaatagtatttataattaaagcgaacagagacgttgtccgcaatgcctcagttcgttcctaaagaaaggaggccattacgatgagaacgtacctttattctgaagccggctttatagaaaagtcgcaatggatgcccaatagctgggtaaacgttgaatgccccgatgacaatgattttgatttcctcacccaagagttgaaagttccggaatcttttttggaagatatcgccgatgcggatgaacgcccgcgtacggaaacggaaggcaactggttgctaaccatcctgcgtatcccgatgcagagcagtcagcatggcattccctttattaccgtgccaataggcatcattaccaataatgaaattatcgtatcggtatgttatcacaagactgaactcatctcggattttatccaacatacacgtcgcaaaggtatcgtagtgaacaataagctggacttgatcctgcggatgatttattcttccgccgtctggtttttgaagtatctgaaacagataaacaatgatgtagccaatgcggaaaaagagttggagaaaagtatccgcaatgaagacttgctccgtctgatgaagttacaaaaaacccttgtctacttcaacacttccatccgcggaaatgaagtgatgatcgggcgattgaagaatatcttccaggataccgactatctggatatggagctgttggaggatgtaatcattgaactaaaacaggcatacaataccgtaaacatttacagcgacatcctgacaggaacgatggatgcttttgcctccattatttccaacaacgtcaatgctatcatgaaacgcatgacgagcctttccatcacgctcatgataccgacactgatagccagtttctacggcatgaatgtggatattcacctggaaggtttcccgtatgctttcatattcattatcctgatctccgtaatattatcggcaggaacatttatctggttcaggaagattaagtggttctaaactaccattaccgcatttgtttttgtatcaaagatgatgtagttacgacctcgtgactatcatcatcttcttcttttatttcctcttccgccttttctactttattcaccttgtcggctccggcagcagtaggtcgggttttccaggtaaggcgcgttgtcataacagaaggtttagtactggaaggtttcatgaagctgtccatccaagagtcgtcagcatcgtcaacattcttcaaattcgtagccgccgaagattgaagtacaggagattgggatgcggaagacatctgtaccggctgattcgaagcgttcagcaggaaagcatacgtattcttcgtatccttcaaggcactcgaagttttgaagaaagtaactagattcatgattaccagaaagacagccgcaaggggcgcaagagctatgataatcgccagtcggatcagcaacattataaacggataaaaaagactgtcaatgatatcattactgactacccgcattcctccagaggattttgcagatttaaacgccgagggaatgccgccaatacctgcatatatccacgcattcatggcatcaccggtagattgccagatagaaaaacccaatatcatgaaaaccaatacgaaaatgcactttatcagcgcccatactttccgcctacccaaagtagacatttcatcttccgcggctttcaaattacagtcgtggcacaaaggtttgccgtcataagagtaaatagaaccattcagacagttctgacataatcccactccacaagatccgcaggtggcaacagcatagtcattcaaatgtttgtagcaattcatagcagtgtctttctttgtgtacaaagatatacaaagaaagacacttagcctaatgcaacgtcagttttgtttttccgcttcgtatatttcctttacttcgcttgcactcaacactcgtgtatcataaacccgaagattatcaatactcatggaaagagcattcagtgttgtagtcgagtttcgtttcatcgtaccgccaagttggaatttaacaccatacccgtaatcagcctgactggaatttccctgactaaaaggattacaatattccgtagccacgcctacatattcaccatcaatatagagtttacttgtaatggtagcatcggaagttttaggataatccgaagtcaaagtaatcatgtgccaatcattatccaacgcagaatgttcaaaaggagtagatttatcataagacggatatccattaaagtacttagtcacagtgaacttcaatttaccatccaccattaaaaggcagaaattattttcattagtactcttgaccgaatggaaaatatgcccgtccgagagccccttggcccaaaaagatatagagaacttatatttgtcaatcaacccttcgggaatgctgatataactttcattcgcacgactgaaactgatagcctgactgccgttcttactatttgaaatataagtgggagcattcagagccgaagccgttaaagtcgtttctgtcacactcttggtatttccttcaaaagtataatatacatacagcccattacttactaccttggacgcatcttttttctccacaatcattgtcaatggaatttctttattaccaaggtcagtctgcaccactatgttgcaactataatttcctgcagccaaccctttgcggtctattctgacttccacgttgtctgtcgcagaagcagccactgtacccgagttcttactgaaagaaatccaagctacattttcttttgtggataactgataaaaagtcgtcccataataagagctgacagagaatgaagccttatcattgactccaaccgtcagcgattgcggattcacatcaaaactgcgctgaggtttctcttcagcactgatagttatttcctcagacaggccggcaacatttactttgatcgtagttcccatttgccctttcactttggaacgatccaaagtcactgtcacggtagcagacttgcccatacccaaagctccttctgccggagatactgttatccaatctgcattaattccggaaatattccaatccagcgtccctgtattacctatattcttaattgcaaatgtcgaagaattcagatcctgtccgaaatctattgcccttggactgacatccagtttcttatccgactctttcactttcatcgtaacaggtatttccaaatcctgcaagtccgaacgtacaatcaaagtgcaattataatccctggcctgtagtccttctcttgaaacagacaattccaccgtttccttcattgcagggttagcggcatcatattgcggaatcgtaccattcgttttcgacagtttcagccaatcggtatcgttttcctttattatcagcatgtaagatgtactgccataataggaacgtaaagtcagcgtagacttttcctgctctcccaaagccagtgtcgccggatcagcttctatacgacgttccaacttctcatccgccgatatttcaagcggtaacgactctccatccgcattaatcaaaatagaagtcttcacatgatcctttattttactccggtttaatgcaacctttacggcactggactttccctgttccgtctctcccttcatgggagtaatggaagtgatccaatctacatccagtcccgtaatattccaacttacacctccactgttaccgatattcttcacatcgaatgtcaagactgactcatccgtaccaaaatccagttttgaaggaatgatttcgattttcgatgttttcctttccacttctgccgtaatcttcaatgacacggactccttatcggcatttataataattgtcagttctttattctctgtcagtttctcacgcaacaaagagacttgtacggcacaacttttaccggcttccaacgctccgcttgcaggatttacttccagccaatccactttatccaaaccggatatattccagttgaattttgcagtacctttattgaatatatcaaaagaaagagacgtattggtcttgccaaaattcagcgtggatacccctaactctatttttgcatctttcttcacaggggtcaacgtaatatctcccatcgcatttttgccggtaacgacactgacacttttggtattagtgacataatctacctttcttgcttcaacctgatactgtcccggttccaaattcaggaattcataagttccatcatcaccggtcgtccgtgaaatacctccgggagtcaacgtcacagttgctccatgcagaacttcaccactctgcgtatccgtcactttaccatatatagagcctgtcaagtcttcctcatcctttgcacaggatatcacaagaagtaacactaataaatacaggcatttattcttaaaaactttcataattcacttagatttattggtttaaaaatgaaaagtcaatgctaatccattgcattcggtacccatcaccggagtcatcgacagatacttctgtcccgattgtatgcgtccacgcttcgcaccgttagcaatggcagcatccaccagattatagatataaagggcaaccgccgcaccaatacatacgttgcggcctgtctcccaattgtccgccttggaattgtaggtcttcgcatgcgcaggttgttccctcatcttttttacataagaagcacgggtattctcgcaaagcacgatagctgccgccaaagccgcttcacctcccagaatggaaagtccttttgccgtactgcctttatacaactgtcccacaccgggaattaaagaatacgccagcccacgaatcccatacttctttgtgaaagtgacttcttgaaaacgtaccttatccgcattattggccacttcaaacaatacccagcaattgtatatgccacttttgtctttttcccaataaatatcaatctgcgtaaaggctgttttaaaattatcaaaatcaaggttatacgtatagttatgctcgatattttccgtataaacatgatcccgactttccgcctttattttctcaatagctgtccccttcacagacactccatgcatacttgccaaatctccaaccagagtcaacactgcgctttcgcaagcatcagacagagttctgccctctccatgggcaaccttgaagtaatagctgttatcatgatttttaggaaaaactccattcttccaacgcggtgcaattttatccgacttatcgggacgggccgcttgcatacttatgccatacaaacagagcaataggaatacgaatatagttttcatgttattactctgttatttgtgttatcttgtcattgatgaaatctgaaatttgtgttgcatactcctgtctgagtttagattcctccaaagcagcattcaaagctttttttctgatatctaaagctttatcttcattcaccaagaaaatgatctggtattctttagccccattcatatccttatatacactataactttccgttaaggttcctttgtttattaaagtaccaagcgccctttcataagcaccataaaaacgatccagttcaccggtctccgaatccgccgtagcaacatcggaagtagtacgccctttgacataggaacttgctaaattcgcatacgtcacaatcgcattgttataggccgcctgacgacaaacattggtacgcatacaccctgatgatgtacccaccaattgcgtataattgccattctgcaatttgtcataatgttgtagcaaaataacctcaaaggatctcgaagtcgcatccagtttccaaccgtcttttttgtactctttcaacttagttttgtactctttttttagttctttctctaattgcttattttgtgctcttccactctgaggcattacacacaacaatacaattgtccaaactaccacccaaggtttcattgtaagtttcataatttttttttaattttaaagcagcaacattgtcactgtttcatgtttgttacttaatttatcaatctctcataaacaaaaaaaatcttttcacgttatgtaattaaacggaaagagacgaatcaactgcattctattggcttaactgatactgatatgagtgtttttgtttctttgcaaagataagcatgtattaacattggttatatccactatatttgctacatttgcccgataaaataagagtattcccctaatttttacgaccatggagactgacttgaagaaaatagtaggacaacggctgcaattgctccgtatggaaaagaatctgacacaggaacaaatgggcgaaaagctcaacttgtcgaccagtgcatactgcaaaattgaatatggggaaactgacttgactttgacacggttaaataaaattgcagaagtaatgaatatgtcggctattgatttattcagaaaaatagacgggaactcatatttcaacaattcaagtaccattggaaccagcatcggaattgccagagactgtagtactatcaaaatagaagcatcggaagatcttcgtgagttgataaaggccaacagtaaaatgatagatatgctgtgcaaaagaatagaaatgttagaaaataaaatccagtaagcaatccgattgcttctttattcccactttgctctattcttttatttaatctcactttctttcatccttcattatccccctgtttatcggcattcaggctgaaactaccggctgaaagacagggaaatgctttcaggcttatcattgaggacactcctcacctttcacccctcagcacttctgcatgaggcagcaaataagtaatattacaggtgaacaactccagtcggtcatcagtaaacaagcacgcgaagatcgcaaagaaagggagatctgcccgtagatactcctcgaagctatcttaatcatatatatgcgaagcggtaactccttctaactcttgattcgcataagtcactaaaagcagttcagtttctatatttttagcgcgaaatagagtgatttataacagaatgtagtaactttgtgatcaaagcaaacttcaaagactatatggaacagatacagagactttatccgataggtatacagaccttttccgaaataaggacaaagagatatttgtatatcgacaaaacggcatacgtctaccacatgacgcattccgcatcaaaatacatgttcctgactcgtccgagacgtttcggcaagtcattgctcgtctccaccctgcacagttattttgaagggaagaaagagttgtttgagaaccttgcgattgaaaaactggagaaagaatggacggcatacccggtgctacacttcgatatgagtacggcaaagcatgcggacaggaaccagcttgtcagcgaattggaaagaaaacttctgggatatgaaaagatatatggccgcggagaaggtgacatagaaatcaaccaacgcttgcaaggcttgatagaacgggcttacacccagaccgggcaacaggtgattgttctcattgatgagtatgatgcaccgcttctcgacgtggttcacgaagaaaagaatatgcctgtgctgcgaaacgttatgcgaaacttttacagccccctgaaagcatgcgacccctatttgcgctacgtgttcctgaccggcatcacaaaattctctcagctaagcatcttcagcgaactgaacaatatcgaaaatatcagcatggacgagccctatgcggccatttgcggcattacggaagaagaactgctgacgcagatgtcgggtgatttgaataggatggcggaaagaatgaagacgagccgcgacgaggtcatcgcactgctgaaggataattatgacggttatcatttcacctggccttctccggatatttataatcctttcagcctgctcaccgccatggccaaaggtaaaatcggctcctactggtttggcagtggtacacctacctacctgatagaaatgctgaacaagttccatgtaaagccccagcagattggaggacggaaagtattggccgaatcgttcgacgcccctaccgagcggatgaccgacatcaatccattgctctatcaaagtggttatgtaacgattaaaaatcaagattcattcaccggtctttatacgctcgatatccctaacaaagaagtccgcataggattgatgaagagcttattgtccggctatttaaaccaatataccgccgaaggattcactacagtggcacttctttttaaagcaattaccgaagaaagaatagacgacgccttgcgcttgttgcagacattcctctccaccattccgcaatgcgacaataccgactacgaaggtcattaccagtcattgctctacaccattttcagtctgctgggaatgtatgtagatgtggaagtacgtactcccgacggtcgtgtggacatggtgatgcgcactccatccatactctacgtcatagaactgaaactgaataaaacagcggacatcgccatgcagcaaattgacctgaaaaactatccggaacgctttgccttatgcggactaccgatagtgaaagtggcaataaacttcgacagcaaacgacatacgctggaagactggattatatcgtagcctgaataactcctttaactcctaccatgaataatgtaggggagacgcttacgatggctgaaagctgaaaatgtcccttcagaacactctttcagctgaaaggccggtaaacaaggaggttgcggaagctgaaggcactgaaactgtttaagaacaccgaaaaaacgacaacttaaatcacactcaaaaaaagaacgtgggcagtgttacttgagagattctcaagacaattacacatattctatcccttcgacctgaaaaattcgcaaataatacgtatgtttgcgccaaataggtcaatgaacatgaaaatacacagaaatctaatgcttgtatgcctgctcctcatggcatcaatctcttatgctcaatccgaaaccatcgttgtaggaaaaaaagcggacggaacggacttaaaagcacagtgctacacttttccgcagcgggtggaaactttctccatgagtgataaaggcgattatctctgcgtcagtttcagggaaaccactaaaagcggcaagtatctgaagaataaaggagaaataggtttctatgacacaaagagcagtcagctcctatggaaacagccgattgacttcagcaaatcacggataacttgtctttcggaaggggtcttgataactgaaatcggcagcaagatatcattgctcagtagagaaacaggagcgaagagatgggaagccagtttatttccggtatatgtggacgattcattgggattggtcttaggttataactcccctacctccaacaaactccgcgctgtcaacttgaaattcggtaacgatctgtgggaaaacaaaatacctcatcaatacggttggaacgaagttcttgatctggaacaaaataaacgcctgattgtagcggatgcgttgcataaactggatttcatgaccggagagttactgacctatccgggaaaaccgggagctcatgatacaaaagcggcattgttgcaaggattagccgctgtagcagtcggagtagccggtggcgtagcaaccggtggtgcctattattacagctatgttcccattgccaataatacaatcacggggttgacttccaatatactgtctcaggattcactttattactgggcagaccgtcaacacatctcctgtatggacacggctttcaacgtagtgtggcaaacagagtttcctgatgtgaaagcttcctgctctaaacttttcgtgcaagatgataagttattcatgctgaattacggctacggattacgcgaaggagcaagccgcaagaaatatgggcgcccatttatagcctgttataacttgctaaacggagaagaaatcttcttcaaccaactaagcgtaaagaaagatatgattgaagatgccctgcgaactgatgacgcactctacatgctgtttgatgacggaatggcttatcaggagttaatggactccgtcgtaaatattgtaccctgggataccaagcaatacggtaagctggaagcgatgttgcccggtacactctatgcagccaacaaagatacaaccgctttcaagtcgctcgttttcgatggagaacattgcctggtatataatgatcaaggagttatctatgaagtagacaaggatttgaacatcaggaatacctatgaacgggagcggatttacagccccagtatccaactaaaagattatttatgtatcggcaatcgtggagactattggttcattcacgaaatgggaatgcctgtagcccatcttgatacggagttcaaaaaagggcgggtgattggtaataagctgctgctacttaacaatgaaaaccaattcctgtttatcgatctggatgaagcgatagaataatcacttgaaatcaagtgctaactgcccgtcacccaatagattgaatgtcatgcggtgataaggcgtagttccacgttcggagatggccgcacgatgtttcttcgtggggtatcctttgttatggtcccaatcataatatggaaattcttcgtgaaggtggttcatataatcatcacgataggttttggcaagcacagaagccgccgcaatggaaaggtatttgccgtcgcctttaatcaccgtggtatgcggaagatcctgatatttcttgaagcggttgccatctataagcagatgctgcggacgcatctttaattgatctacggcacgatgcatggcaaggaaagaagcgttcagtatgttaatcttatcaatctcttcgggagatacaatgccaaccgcccatgccagtgcttctttctcaatcacttcacgcaaagcatagcgctgatgttccgtcaactgtttggaatcattcagtagttcgttcttgaaatctttgggaaggatcacggcagcagcatatacagctccagccaaacaaccacgtccggcctcatcgcaaccggcttcaatcagatctttattcaaataaggcaatagcatacagcattaatttagaggcacaaagataaatctttttgaaagcaaacctgacttttaaaggaaaataattacatttgcagaaacaacaaatatactatgaagcaagtactgtatctaatatttgcagtttccctattaaccacgatccccttacaggctcaagacagcaaacaagcccagaccttattagaacaagctcaaaaagtcctgttcagcaatcccaagcaggcatcatactatgcagctcaggcagctgccttatttcccgaagacgaacccaatgaaacccgtgcacaagctatgatactctattgccaagcagaacaactgttgggcaatttcgatttgagtatcaagaatttatacgatacacagagatatatcaatcccgcaaacaaacggcaaacagctcagctttattcactcatgggacgtgtatatagtaagttgggcgattataacaaagggatagaactaaacgataaggcaacctctattttcaagtctttaggagattcagcttcagtggccggatgttataatgagcgtggggtcatgcattatctgcttgatgaatttctggtagcagaaagatttcttcaacgggccttgactatcaatcgtgcccaaaggaacttaaaagagattgctaccaatctgaacaatctatgtctatatcaaggagatacggaaaagaaactgtccttcattcaggaagccatagccatcaacaagaatctggatgcacaatggtcattgggagagaactacaacaatatgggcaagcaatattacttcggcgagcaatactccaaagctttggaagctctgcagaaagcctatgaatacgcccataatatcggtgccaaggaattgatttgtgattattatgaatattcgtcctgggtatatgccgccataggtgattatgaccaggcctataaacggctcagtcaaatgtatgctttgagcaaggagctacaaagtagcaacaagttgcgtaacattgaacaggaaatctcttataaaagatatcaggatcagaaatatgctaccgaaatgcaggagcaaacttataagatagaactactaaagcgcaatctatggcttttgggcagtatacttgttcttggtttagccttcagtatattcttatataaatggtataaacgcagaaaaggtcttcaactaatagaagcccgatatcaactggaactgtcacaacgggaaatatccgaattgaaactgcaccaacaggaattggaactgcaaaatgtacagagtgccttagacaacagtcaacaagaagtaaccagctttgccgtatttcttagaagccgtaacgagttgctgggcaaaatacgtgagatgattaaggaagggtatagaatggacaatcaagcactggttccccacttaaagaaggtaaatgcttttatcagccaataccaaagcggagataagaccaataatacattgctgctgagtgttgaggagaaaaataaagagtttatcgaaaaactcgtaaagcaacaccccaacctcacacaaggcgaaaaatatctcgcaactttattacgggtgaatctctctacaaaagaaatctcaatgattactggaagcactcccaaaaccatcaacatgaaccgttaccggttgcgcaaatcactcaacttatccacagaagaagacttaactacatatttgcaaagtgtttaacctcatccttacacacaatagcattttgtagatataatcccagaattatatcactatatatcaaacaattaagaattccattgtagtacaaatatttcctctaaaaagcccttttgtagattaattatagaacccccagattgtgaactttgataaataacattcttatttgtggtgtgaaacacattttattaaccttaaaaaaccacacacatgggtagaattattaagaattgttccatgaagagagtagtcaagttagccttactctttgctttcctgattccactaagttctttagcacagaacattcaactgacaggtacagtaaccgatacaacaggtgaaactgttatcggtgcaagtgtacttgaaaaaggtactactaacggagtgattaccaatatagacggtaacttctcactaaacgtttcccctaaggcaattatcgttatttcttacgtaggatacactactcaggaaattcctcttaacggtgcaaaaaacattaaggtagtattgagagaagatactgaaatgttggaagaagtagtagtcatcggttatggtaccatgaagaaaagtgatatgacaggtgccatttcatctgttgacgtcgaagaactatccaaacgtaccaccactaaccccgccgaagcgctgcaaggtaaaatcgccggtgtaaacattatgaaagcaggtggtaacgccggtgccggcgtacaagtaaaaattcgtggcgtaaagactttcggagataacgaacctctttatatcatcgatggtttcccgggtgatataaatgctgttaacccgcaggatattcaagctatggaagtactgaaggatggtgctgccgctgccatatacggttcggttgctgccaatggtgtaatcatcgtaactactaaaaatggtaagaaaggcgaaacaaaaatagatttcagtgcatacgtaagtatgacaaatgtagcgaaaaaactcgacttactgaatgcagagcaatataagaaagtacatacacaaatgtatgagaactggaacgctcatgtaataaatcataagtcgcaatacgacccgaaaggtaacggtgcatgggaaaaacagatattggaactggaaccttacatgaccaagaataccggcatcgacactgactggcaggatgcaatgatgcgtaccggtctttcacagaactatatgttcagtgtaagaggtggtagcgaaaatgcccaatattccgtttcatacaatcacgccgatgacaaaggtattttccttggcaatgattaccgtcaggataatgcacgcctaaaactgcacatgagcaaatatatctttgatattgacgccaacatggctttcaaattcacagatagcaaacagcccgaatatcagctgaaagaaatgtatatgatttctccgctggtacctatctacaatgaaaatgaagaatatggcttcggtctgacaaacttcgataacctgcccaacaatcgtaatgttatggccgaccagcactacgagaaatctacagataagaagtatcataccaccgccaacgtagctttaactgccaacttcactaaatggttgagtttcaaaacaagttatgcttaccgtggagagcatcaacgccaaacttaccatacaccggcttacatttccgacgtaaaagccaagcgagactatccgtatcatagcgaaaccaccgcttactgggaagagcatgtatgggagaatgtactgagtttcaacaaagcattcggcaaacatgctgtcaatgccgtagccggtacttcaaccatggctcgcaaatatacatggaattctgtaggcgtagaaggtaaatcaacaacttataaggtagaggacgggcaattggtaatcggtgaacaaccaggaggtttcctcgatccgggcttctctacaatcggtgcaggtgcaggtggtacttacgacggtgacggaactaaatgggattacagacgcgtatccttcttcggtcgcgtaaattataactataacgatcgttatctgattcaggcaactgtacgttccgacggttcttccaagtttggtgctgacaaccgttggggtttctttccatcaatagctgtgggctggagaatcagtgaagaagaatttttcccaaaaggtattgcgctgaacaatttgaaattgcgtgccagctggggacgtctgggtaacgaaaatgccttgggatattatgacttcctcgctctaatttctacttataacaccaaataccagggatatgtaaaaggtaacggtgataatgcatgggcaggaagtattgcccgtgggctggagaatcgttcgttgaaatgggaaactacagatactaagaatattggtcttgacttcggtttcttcaacaacaaactgaccggtgccatgaactactattacaatcaaaccgaagaactcttgattacgaaagcacttccaccttctgccggcttgaacaacccaatcctgaatgtgggtaaaatccgcaactccggtgttgaagttgagataaactgggctgactcaaaaggtggtttcgattataacatcggtatgaatttcagtacaaccaagaataaagttgtagaactggcagacaaaggacaagtcctttatggtgaaggtttgaaatatggaactgaacacttcccaacccagacgcgcgttggcaaacctatcggtgcattctatctttataagaccaacggtttgttccaaagcaatgaagaagcccgccaatatgtaaatgcagatggagacgagtatcagcctttcgccgatgccggtgatatccgctatgtagatgtaaatggcgacggctatattgatgatgatgacaaagtatattgtggatcgggtatacctacactggaagttaacctgaatttctctgccggctataaaggcttcgacctttctgttgtattgggtagtgcatggggacacaagatttataatggtaacaagtacttctatgaaggaatgaactccggttccaacttcctcacatcatccttgaatgcctggacacctcaaaataccaatacaaacatacctcgcgccatcttcaacgacccgaacggtaacttgaaggagtctgaccgcttcattgaaaaaggtgactttgtccgcctccgtcaattacaattaggttataccctaccaaaaaaaataatgcaaaaagtattcatcgagagattgcgtttttatgtaagtggtgaaaacctcttcacaatcactggatacgacggcatcgaccccgaattctcacgtgtaagtgtattgaacaccggtattgataaactgatttatccgtttacccgttcattcactttgggtgcccaacttactttctaactcatttaacattgtataaacatgaaaaaagtaatatatatagccagcctttgttttgcatcgctctttgtgagctcttgcgatgattatctaaccttggaatctcccgaccagttgacttcgggaagtttctggcgtaacgaaagtgatgcacaagccggaatatcggctgcatattcgcaattagaatactacattgacacctgggaatttgccgaagttaaatggccggtggaagcttaccgtgaagacattatcaatatgggtaacgatgcacgtaactatcccaactggctggaactctacaatttcacttatacaaacggtaactcacagttcagcaattattggtggaacaactacaaaggagccagctttgccaatcaggtaatagagaaagtgacagagatggaagaaggaactatcgaccctactgtccgcacgcaaattataaacgaaggttattttcttcgcgcttactatcaccttaaattgcttttgaattggaaagaaattatcatccgtgacaagtatatcaccagtcaggcagaattaagcaaaggactttcaccgcgtcccgatgcctgggattttattatagaagatttaaagcgagccactgctctcccttcttcttatgacaacgacaacatcggtcgagccaccagtggggcagccaatgcctatttaggttttgcctatctgacacgcgcttacgaagaatctgacaagaagacagaatatctgaatgaggcacttacagcactaaacaatgtcaaaggctacgaactggtaaagaagttttcaagtatgtttgacgccagcaacaaaaacagcaaagaatctatctttgagttgcagacttccatgagtagtgccaatggtgctaactatcgcactcaactccaccgttggataggtacatccgaactttggggatgggatgagattcttccgagtaatgtattgatggaagcgtacatgaaagaaggtgagattgccacaaccggacgctatgactcacgcttgtatgagagtgtattcttccaatgtgattatttcaatgatggaagcgggcgtgtttacgggggcgattatgacaactggttctgtagtttcgatgataagaataaccctattcccggtacaagttacaatcggccttccttccgcaagtttatgcccaccgactatgatggcttatacaataattattgtgccatcaacattcctttgatgcgttatgccaatgtattgttaatgaaggcggaagtattgaacgagcaaggccatcccgagcaagccattccgctgattaatgaaatcagaaatgtacatggagacatgcctgccatgaaagggacttcacaacaagaggtacgtgagcaaatagaacatgaacgtatgattgaattcccgctggaaaactggcgctggtatgatttacgccgttggggcaaattagcgtcagccttggcagatgcaggacgcgccggctttaatgtagagaagaattcgttctaccctattccgttgactgaaatcaattcgaacgaccaaattaacaaataaattctctcttcactcaatatgacatcctaacgagacggtatttacctacagtgataccgcctcgttatattcaaatgaattatctttgccctcaaaaacgacatagatatgtttacaattatcggactgatgctcacaggaatgctgctgggctacctcttacggaaacggaatttaagtaaaatacataaggtgatcacagtgctgatctgggtgctgctcttcattctcggcattgaagtgggaggaaacgagcaaattatcaaaggactgcacaccattggccttgaagccgtcatactcaccataggtggaactctgggaagtgtgattgccgcttgggcactgtggagggccttatacaaacggaaaggaggacaagcatgaaaggaagtcttatcatagtcggcttttttgtgctggggacactttgcggagtctttcacctgatacctatcgacatcgtagtagatagtaaagtcagcttttatgcactttgcgcactgatgttcagtgtagggctaagtgtaggcaatgacccgcaaacgttgaaaaattttcgttcactcaatccacggttgatattcctgcctatcatgaccattctgggcacgttggcaggttctgccgcagtcagcctgatactgacacaccgttccctgacagattgcctggctgtaggttcgggcttcggttactattcactctccagtatcttcattaccgaatataaaggagctgaattagggacaattgccctgctcgccaacatcagccgtgagattctgaccctgctggctgcaccattactggtgcgttggttcggcaacctcgcccctatctctgccggaggggcaactacgatggacaccacactgcccatcattacacgaacggccggacaacaatttgtagttgtctccatcttccacggatttgtagtggatttcagcgttccgttccttgtgacactgttttgttctatttaatactgttttgaaatgacagcttagaagcgaattggtacgcggacgacacagacgaagcggacaaacgcggattttaattttcatttcagaacttaaagcaaattatcatgaaagccaaagtttatactttactcttttcctcattgctttgtgtttctgccctggctgataacgaaccttggcagaacccacaaatcaacgagataaacagagagccgatgtatgcgcacttcatcccatttacgaatgaagccaacgctttgaaacaacgctctctccccgccgatgtgcgtttcgatgtgaatcctgcgacagaaagacgagtttctctggatggaacctgggaattcctgttttcaaagaataacgatctttgtccaaaggatttccataaacccggatacaatacccggaagtggagcaaaatacaagttcccggaagttgggaactgcaaggattcgatgctcctatctatacggatacccgctatccatttcccgccaatcctccgtatgtgcccaccgattacaatccggtaggagcttacatccgtgagtttaccgtcccgaatggttgggaaggtatggatatcttccttgacttcgaaggagtggaatccgcttattatgtatgggtgaacggtgagcttgccggatatgccgaagacagccgtctaccgtctcacttcaacgttacgaagctgttgaaaaaaggcagtaataaacttgccgtgaaagtattccgttacagcgacggctcctatcttgaagggcaagactactggaaatacagtggcattgagcgggatgtatatctctatgcccgtccgcaaagccgtgtccgtgacttccggatgactgccgagttagtcaatgattacaaagatggggaactaaacctcgatgtattacttcaccaaccgaaagtcggagaaaccgttgaagtcaaggtattggataaaggcaaggaaatttacaaccggaagaagtccatcacttccatcactgatactctgttcagccaacaggagattttcccgaatatacgtgcatggaatgctgaaacgccaaatacttacacattagtagtcagcaccttcgacgcccagggaaaaccgctggaatctttcactcacctttttggtttccgcacggtagagatgcgcaacggaatgcagatgatcaacgggaaagcagtactgtttaaaggagtaaaccgtcacgagcacgatccacacaaagggcgcactatcagtgtcgcttccatgatacatgatattcagttgatgaaacagtttaatctgaacggtgtacgcaactgccactatccgaactactctgcctggtacgagctttgcaccgaattcggtctgtacatggtggatgaagccaatatcgaaagtcatggcatgatggatcataaggatggtacgttggctaattatccggactgggaacgccccttcatggagcgcatgagccgcatgatagcacgcgaccgtaactactcagccatcgtcacctggtccatgggtaatgaatccgggtatggcaaacattttgaaacgctgtacgattatactaagaaaatagatcctacccgtccggtacaatacgaaggaggcggctacgatgcaaaaagcgacatttactgtccgatgtatgcacgtatctggtcactgcgccgccacatcaatcagcgtgacaaacgtcccttgattatgtgcgagtacgcccatgcaatgggtaacagcgtaggaaacttccaggattactgggatttgatttataagtatgaccagctacaaggcggatttatctgggactgggtagaccagacattcgccatcaaagataaaaacaaccgtgatatctgggcattcggaggagacatgggctttgtaggcatcgtcaacgactctaacttctgtgccaacggactggtagctgccgaccgttctctccatccgcacatctatgaggtaaagaaagtattgcaatacattcacttcgaaccggtagcttttactccgaacaagataaaagtcagcaatcggcatgatttcatcggtttggaaggatataccctgcgttgggcagtagagtgcgacggaaaagcggtacaaggaggtgaaatgaacttccccgtaatcactccgggaagctctgccaatatagaattacccttgaaaacattgcctgccgacggtaaagaatacttcctgactctgcgcgcattcaccaagcatgaagctccgctgataccgaaaggacatgaagtggccatcgagcaatggatactccccacgactcaaatcaccggaaaggttcagcccgccaacagtacgttggcaacagaccggaataatgaagcgatcacactgaaaggaaataacttccagatagccttctctacccaaaacggtgagatgacagaactgatctaccatggaaagaatctgattaaagagggattacaacccaacttctggcgtccgttgacggacaacgatattcctaatggacatctcaatcgctgcgccacctggaagactgccggaaaggatgctaaactggagaatctggaagttacggagaaacagcagattgtcattgtaacggttacttataagatggaggcgcaaggctctacattgcaaacaatctatgatattcatcctgacggtgccgtccgggtgagcatgcacttcaccccgggcaaacaggcgctgaatgaaatgcctcgtctgggtatgcgtatgatacttccggcagaatatgaaatgatgtcctggctggggcgcggtccgcaggaaaactatgcagaccggaaaacaggagcattgataggcctgtataatgttacggtttgggaacaattccatccgtatgtacgtgctcaggaaacggccaatcactgtgatgtacgttggattgccctgcgcaatgctgccggagaaggtttactggttacgggagaagatcctctgagcgtaagtgcctggaacttcccgatggaggacattgaatatcgtccctcgcaggtagaacgccgtcatggaggaagtatcctgaaaaaggatataatttggctaaacatcgatcatcagcagatgggtgtgggtggtgacaatacctggggagcacaggtacatcccgaatacactatcacgccacacgagtggaaatacagtttcacactgcaaccgctcggagcaaaggatgatgcagcggaacaggctcataaatgttggttctgagagataaatgataatttatttttcatccgcagatgacacagatgacgcagattttaaagactgcgctgttacattgataaataacaatccgtgttatccgtgtcatctgcggatgaaaaattaaatgtcgaatggcgacaatcatttatcacctaaaaagaaatcattaattataaattagatcatgcgacataagtttatacacattatttgtattactctgctggttacaggcatcaccgcctgcactcccggcaacaaaaacactgcggaaaagcggtatacattcaataatatactggatatcgcctacactcccgataccttgcaccgctgctacggctggttcacagatgccggctcgtggatgggtttcactcttcccgagaaagagaattgggtaaacggtttctgcggcccattcagtctggatatgttccgccgccagtggatggctcaatccgctgttacagtaggttttagtcagaaagtctcggatacctttgtgcctgactccacctgttactatcccggagaactgtatatgtccgcccattccggcaacggaactatcacccagcggcttaacttcgtaagtgcctccaccgcattgctccgtatagaagccgacaaagcggaagaactgatgctgaccggcagccaatggggaaagaatataaccgtaagcgtagagcagaactctgtaatagcccgccatcccagtggagaaagcgtaactgtaacgttccctcccgatgtgaaacttaccggaacggataacaattacaccgcccttatccacacctctaagtatcccgtaaatgtagccatttccttcttcacctccgaaaaggaaatgacagtcggattacagaacctccccaacctgctcaataatcccgagaaagcattgcaagccaatgccgaacgttgggaaggatacctgacgaagatactgcgcaccgacatgaaacccgaatacgaccgcatcgccgtgaaagccgtaaccactcttatctccaactggcgcacccaccgcggtggcctgttgcacgagggtattgtcccaagccatgcagttggctactttgtaggtttctgggcatgggatacctggcgtttcagtgcggggactgctaagttcgatcctgaactggcaaagaataacatccgcgccatgttcgattatcagcaaccggacggcatggtaatcgactgtatctacactgatccatccgaaaacaatgcccgtgacagcaaaccgcctctggtatgttgggctgtagacgagattttcacacatacaggcgacacggctttcgtttccgagatgtatccgcaactgctttcttattataagtggtggtatcagaaacgcgaccataatcataatggtatgtgcgaatacggtgccactgacggtactctggaagcagccgcttgggaaagcggaatggacaatgccattcgttttgacgacgccatgatgctgaaaaacgacggaggcgaggatgcctggagtatggaccaggaaagtgtagacctgaacgcctacctggcactggaatgtaagttactaaagaagtttgccggattactgaatgtcccattcgatgctcccgactatagtaataaagtagccgattatttctttgatcccaaactcaacttcttctttgaccgccgcctgaaagacggctcatttattgaagaaccgggatgcgaagcctatactccgttgtggactcagattgccacgcaagaacaagtagacaagatgttgcccatgcttcaggatacagcaaagttctcaacgtatattcctttccccaccattgccgcagataatcccaagtataacccgcgcggctactggcgtggtcctatctggctagatcaaacttactttgccatccgcgggctccgcaactacggttatcataagctcgctgatgaatacaccttgcaggtattcgaccgccttaacggactgaaagaaggagcgcccatccacgagaactacggcactcacaccggagagcgattgaaagcgccacactttagctggagttcatcccatctattgatgatgtacgatgattacgggaagtaattcccattccctctaatagaaacgcccgttctcattaaggaaacgggcgtttctattagagggaataacaaacaggcttcttagaagaggctccacgcaaccgtcagccccgccatcacgatagctaccatactcatcagcttgataagtatattcaaactcggaccggaagtatctttgaacgggtcacctaccgtatcgcctaccacagtagctttatgtacttcgctacccttaccaccaaagttaccttcttccacatatttctttgcattatcccatgcaccgccggcattcgccataaagatggcaagaacgaagccgctgctcaatccaccgatcagcagccccaacacaccgggaacgccaaagataagtcccgttgcaatcggagcaataatggctatcagcgaaggaactaccatttcacgctgtgccccttttgtagaaatctctacacaacgctcgtaatccggttctgtctcaccggtaagtatacctttgatttcacggaactggcggcgtacttcatccaccatgtgagcagcagcacggccaacagcattcattgtcaatccgcagaaaaggaatgccatcatactgcccaggaacatacccgaaagaaccttcggattcatcaatgtcacatcataatgatgcataaaatcgaagaaagtggcatcctgaagggccacggagttaccatgaggaagcgttaaatcagtagttcccaaacgagtcagtccgatacggatttcttcaatataagaagcaagcagggcaagtcccgtaagtgcagccgaaccaatggcaaaaccctttccggtagcagcagtagtattacccaaagagtcgagagcatccgtacgtttacgtacttccgcacccagaccggacatttcagcatttccgcccgcattatcagcaataggaccataagcatccgtagcaagcgtaatgcccagggtggaaagcatacctacggcagcaataccgataccgtaaagtcccatacctacattattgaaatcgaaccctgatgcaaacaggtaggaagcaataataccgactaccacagcaatcacaggaatcgcagtagacagcatacccaaaccgataccggagataatcaccgttgccgggccagtctttccgctttcgctcaacttctgagtaggacgataggattgtgaggtataatattccgtagaacgtccgatgatgatgccgactaccagaccgactataacggcacaagatatccacatccagttatcaagtttcaataaccaaagaataaagaaagtagccacaacaatcagcactgaactcaggttcgtaccgaaagccaacgaagcgagcaggtctttcatcttcgcattctccttggtacgtactgcgaatataccgataatagaaagaagaatacctacggccgcaatcagcattggagctataacagctttgaactgcatggccgtatctcccgtatgaataaaggcagcagcacccagagcggcagttgccaagatagagccacaataactttcatagaggtctgcacccataccggctacatcgcctacgttgtcacctacattatcggcaatcgttgcagggttacgcgggtcatcttcgggaataccggcctcaaccttacctaccaggtcggcgcctacatcggcagctttcgtataaatacctccacctacacgggcaaagagtgcttgtgtggaagcacccattccgaaagtaagcatggtggtagtgataatgcagagtttatgagtcggagtcaaaacatcttccggtataaccgcattcaataacagataccagaaagaaatatcgagcaagcccaaacccactacgaccagtcccattaccgcaccgctacggaaagcaacacgcaatcccgcattcagtgagctacgggcagcatttgctgtgcgtgccgaagcatacgttgccgtcttcataccgaggaatccggagaggccggagaagaaaccgcccgtcaagaaagcaatcggtacccaacgattctgtacatcgaaaccataagccataatagcgaaaaggatcacaagtcccagaaatacccagccaactatcttatactgttgtttcagataagacatcgcgcctttacgcacagcggcggcaatctttatcatttgcggagtaccctcactctctttcatcatttgcttatggaaataataagcaaagcagagagctaaaacggaagcggccggaatcagccagaaaagcaaactgtccatggtgttaatcgtattaaaaggttgattgaaagtctaaaagtattgatttgaaacgaaataagcaaaggaataaaagaaaaatcaactcattctattaaatttgcaggcgaaaaccgtacccgattgagcacccatgttgtagtataagtaaaatcaataaaaacaaaggaataatgaaacgcacagattttacttttagaaaggcatggatgatatacacagtatattttcttctactctttacccccaccttaaatgcacagcaaacatccagactggtcagcctggaactaaaaagcgaaaagctatctgccgcactgaaacagatagaaaagatgggcggcaagaatatcctttttgcctatgaagagacggagaattatcacgtaacagcaagtatccgtaaacagacgcaagacgaagccatccgcacagtactgaaaggaaaacctttcaactgtatcgaacgtactgattacttcgtgattcagcggaagggaaaagatggcaagactacccaagtacgcggaaccatatacggagaccgaaatgaaccgttagcgtatgccaacgtcatcctgctagcagcagctgattccgcctttattacaggatgcgtcacagcggaagacggtagctttatcctacccggcaacaatgaaaaaaaacatttgctgaaagtaacctacataggctatcaacccctgacgcttccttgtcagccggaaaatgacattcacctgcaaccagacgcacaaatgctgaaagaagtgaccgttactgcctctcgtccgctgatggaacgcaagaatggcgctttcgttgccaacgtagcagggacaccgctttctatgctgggctctgcaagcgatatgatcggtcacctcccttttgtcaccggctcggacggtaactataccgttatcggacgaggtaaaccggagatctacatcaatggccgaaaagtacgcgacacctccgaactaaaccaacttcaggctaacgaaatactctccgctgagattgtaaccacgcccggagcacgttattcctccaacgtgtcatccgttatccggctacgtaccatccgcaagcgcgggcaaggtttaagtgccaatgcctacgcagactatacacagggacactcggcaaaaggcaaacaaggcgcctccctaaattatcgtaccggcggactggacatctttgtcaaagggcacttcaatgagtcggacacatactccaccagtcatacccaactgcaactgaacacttcctccgaatggaaaagcatatctgacaacgtcaatcgtgcacatgatgcaaacttcaatggcgaagtaggtttcaactacgaaccggatgaccatcagtctttcggtatacgctatgtacccaaaaccggactgggcgatcaggagctttattcgcaaggtgaaaccgtgatgctgcgggacggagaagaggtagatcgccttacatccgactcacacggtcgcaagcataccaactggaatcataccgtgaatggctattataacggtactttcggaaaatggaacatcgacttcaatgctgactacctctacggtcgctccggaggtgggcagaaggtagacaataatggtgaaacagatgcctcatccgacagtgaagtaaaaaaccgcctgtatgccgctaaactggtgattacggcaccgcttggccaaggcaaactctctttcggtactgaagaaactttcaccgagcgccacgacatcttcaaacaaagcggtttctccaatgatgccgataaccgcatcaaacagtccatcgcctctgcctttgccgattattccatagaactcgggcagttcaacctgacggcagggttgcgctacgaatatcaaaagacggattattacgaatcagatatctataaagaagagaaaagtccttcttatcatgacttaatccccatagtcagtattttctataaaaagaaagactggaatatcggtctgtcctatcgtatgatgaagcttaatcccagttacagcatgctgtccagtaccatcagttaccaaagcaagtaccaataccacaacggaaatcctgaactggaaccgcaaaagcataatgccttctcattggaagggggctggaaatggatcaatgccagtttatacttcgatcatgcacgaaacatgtacaccacttatgccaaaccctatgatgatgcaaagcaccccggcgtagtattgtggacaatggcaagcatccccaactcctatgcatacggaggcgccttggtactctccccaaagttcggctggtggcaaccgcaatttacggccagcctgttctggttccagtccaacgcccgttcactgaatattcagcctctttggaatgaagtgcaaccggatttcattttgaataacagctttacattgcctcgtggctggtttctcaatataaaaggaagactcgcatttggtgcaaagcaaagctatgccatcaaaaaaacagaagggactgtagatgcgcaacttaccaaatctttcctgaaagaccgtgcgttgcgcgtctcgctggtagcgaatgatatatttcgtacaggtacctatcactttcgtgtatatggcgaccgtacctacaacgagtttgaaaattatgccgacaaacaacgtttcggcatacgcctcaactatcagttcaatgccactaagaataaatataaaggtaaaggtgccggagaaagtgaaaaaggacgtctttaagcattgcagtaaacgagggataaaggataatccttacctttgcggactaaaaaaagaatcggagaatgtccttgtttcataaaaaagacacaaaaagagaagttttcggacagatgttcacggagctatatccccgtctggtgcgctacgccacccaactattgggcgacggagaagaagcccgtgatattgtgggtagtgtgatggagcaggcgtggaaacaattcgaaaagctggaaccggaaaaccggggagcctggctttatactgccgcacgtaacgcctgccttaaccgtctgaagcatttgcaagtagaagccaccaacctggaagcgttacgcgaagccactcgtatggatgtagcgaccgactaccgggaacatgaacgactactgcaacaagcggaaagcattgcccgcaacctaccggaaccaacctgcacggtattgcggctctgctattatgaacataaaacctatcgggaagtagccgaacagcttggcatcagtcccgacaccgtaaagaaacatatatccaaagctttgcgtaccttgcgcgaagctatgaccctgaaaggaggaaaccgatgatggaagagagaaaagaaaatgatttcaagatggatactgaagacctcagattactgaatgccttcggagaagcgctcggagacttaccttcggaagaagaaacccgcgcggcatggaatgcttttacctcccggcaagacgctcaaaaacgcagacgcatcatacagatgtggacttccggcattgcagctgccatcgtagtgctggtagtgcttatcgtgccccgtattaccaacgaagacacgattcaagatattgaaatctttgcggccctggatgtccccgaagcaatcatcacctcagagagcaatggtaggattactctttcgactcccccagccactaccacgcaaatcatcctggacgatggtacacaggttacgctcaacgccaattcccgcctggaatatcctaaacaattcccggcagaggggacccgtgaagtccatctgacaggagaagcacgtttcgaagtggcaaaagatagtgcacgccctttcattgtttcttccggtaagatgcagacacaggtattgggcacggtattcgatgtaaatgcctatccgggaaaagtagcggcagttactttatttcaggggcgcgtccgcgtcagcgacgagaaacaaacacagcagaaagacatattgcccggacagcaagctatattgtctgaagataatggtttcaccatatccgaagcacaactcaccgcaacggaaggatggaccaaaggagagttcagcttcgatgatgccgaactggcggagattatgaagtctgtaggcacatggtataacaccagtatcatctttcattcgcccgacttgctgaaacaacgcattcatttccgcttcccgcgaacaacttctttggaagaagtagtgcaagcgctcaatgatctgggaatagccaaactggaacaaaaaaagggaaaagtaatcatcagcaattattctcccaagcattgatacgcagaggaagagcttttcggctcttccccctgtatttattattctactgtcacagccgtaccgcaagcggttaccatcagcatactaccgcttccacctacagtttcatagtccaaatccacgccaatcacagcattggctccgagagctctggcgtgttcctgcatttcacgcagggcgatatctttcgcttcgcgcagcacttcctcataagagccgctacgtccgcccactacatcgcggatactggcaaaaaagtcacggaatacattggcaccgataatcgtctcgcctgaaacgataccgtaatagcgggtgatacgtccaccctcgatagttggtgttgttgttactaacataatctttctctatttatttaagttatttgcaccctattagacgcatgaatagggcgaaaagttgcaatggcgagagcttttatacctcttcattataataaaaaaacaaaaaagagagtacctatatatgagcaaagtcagcatttatctatctttgtgccgaagaaatggaaacaaagcattttatatttaaaataatgatgtatctggtcgtagtgctttttgctctgcaaccagaagattataattccttttccgaaaacgaacctccctttctttgcatcgaacaaaatgagcatcattcgcctgaagagtttaacgatgaagctgttatctcacgtacactttctttaaaccgtgcgcgtaagctctgtgcagagactacgactacttatactttctctactgagaacactaatttatatcaatatagtgacggcagccaaccgtacaacctcaggagcgtatattcacccgaacgctctctactttgtatatatcggctttagcacaagtccttctattaccgtatttttatattctatccgggacgaatcatacattcgttccgctatgtctaattaataaacttatatatgggacttgttttattatacttaaccctcgcattagctttatcatttttatgctccattcttgaagcagttttgttatctaccccaatgtcgtacatctccaccaaagagaaaacacacgggaaaagcgctatcttattaaagaagttcaaacaagacatcgaccggcctattgctgccatattatccttgaacaccattgcccacaccgtaggtgctgccggtgtaggtgccgaagcagtaaagatattcggagaagcttactttggtgtaatctccgccatactgactattttaatccttgttctctcagaaatcattcctaaaacgataggcgcctgctactggcgcacactggcacttccatcagcccgtatcattaatttccttattatcatctgttatcccctggtgtggttatccgagctgattacccgtctgttttcttccggcaaacaagaattatccgtaagccgcgaagaggtttcggctatgatttccatcggggtagaagaaggtgttttccagatgaaagaaaacaagatgatacaaaacctcattaaactggataaagtaaaatcacaatccattatgactcctcgtactgtagtagcaacagctcccgaaagtatgtctctgaaagagttctatcaggatggaaagtataagttttactctcgtatcccaatctataatgatagtgaagattatatcacaggatatgtgttgcggcagactgtactcgaaaagttagcagaagacagattcgatatgtgtctgaaggatgtagcccgccctatcctttccttcccggaaaatagttctgtttccacggtctgggaacagatgcttgaaaaaaaagagcatatttcaatcttgattgatgaatatggctgcttctggggaattgtcacaatggaggatattatcgaaacagccttaggttttgagattgtagatgaaaaagactccgtaacggatatgcagaagctggcacgggataagtggcagaagaagctggcggaaacgaagattagtgattaggggttagtgataacccctaatcactaactagaacatcttgctgacacgttcgatacctgccaccaaaacatcgatttcttctttcgtattatagattccaaaggaagcacgcactgttccttctatgccgaggcgttgcatcagcggttgggcgcaatggtgtcctgtacgtacggcaatgccgagacgatcgagcaatgtgcccatatcgaagtgatgaatatcacctacaaggaaagagatgacactccctttctcagcagcttcaccaaagatgcgcataccagggattgttttcaatcgctgtgtggcatattccgtcaattcatgctcataagcggcaatcttatccatgccaatggcagaaacataatcgagagctttcgccaatcccgtagtaccgatatagtcaggagtaccggcttcgaacctaaacggtaattcattgaaggtagtacgttcaaaagatacatgctttatcatctcaccgccaccttgataaggaggtaacttattcagccattcttccttaccataaagcacgcccacaccggtaggcccatacactttatgaccggagaatacaaggaaatcagcgtccagatctttcacgtccactgccatgtgaggaatggattgtgccgcatctaccaggaaaggtacatcatgattatgggcaatcttaatcatttccttgataggattgaccgtacccaaaacattggacacatgtaccacgctcacaatcttcgttcggtcagtgaaaagcttctcgtattcatccatcagaagttcaccgcgatcgttcatcggaataactttcagattgatgcatttccgttcagccagcagttgccaggggacaatgttactatgatgttccattacggaaacaatcacttcatcacccggatgcaggaatgcttcgccaaagctggaggctaacagattaatgctttccgtagttccccttgtaaatacgatttcatttatagaaccggcattgatgaactttcgcactgtctctcgacttgcctcatgcagttccgttgcctgttgcgacagaaagtgtacgccacgatgcacattggcattgacagaataatattcatccgttatggcatccaccacacaacgtggcttctgtgccgtcgccccattatccaaatagaccaatggtttgccgtacacttcacgggatagtatcggaaaatcggctcttatctgttgaatatcatacatgttgtttaggtattaatatattctcacttgcatatcgcacagccctggcacttattcagttcaccacggaaacgtttctcaaccaagagatgtaagcgatctttcaatgcatccagacggatggtatcgattacttcgttcacgaaagcaaacatcagcaataagcgggcttcacgtgccggaataccgcgctgacgcatatagaaaagtgcattttcgtccaactggccaacggtagcgccatgactacactttacatcatcggcataaatttccagttgcggttgcgtatacatacgtgcctcacgggtagcgcaaaggttccggttcgtttgttgcgaattggtatgttgcgcatccgggcgcactaataccaaaccggcaaatgcaccgactgactggtcatcgagcacatacttgaaaagttcattgctcgtgcagttaggtacggcatgatcgatacttgtattgttgtctacatgctgattcttatctgcaatggccataccgcaaaggttgatttcggcaccttcacctgccagcaatacttcggtggtgttgcgggaagtgccgttatgcaaggtcatgccattcagcaatacattgctgttggcttcctgcttcacatacatattgctgatacgtacggtacttgtatgcgtttcttccagttcgtaaaggtcaaagacagcattctcaccgacgaatacttctatcacctgggttgccaggaaattcacggcatccatggcatgatcacacaccagcatacgcgcctgtgcgccatcttccaatacaatcaatacccggcggttcaccaggaagttcacgtcaccacgcaggatgtttaccaactgaatgggacgttccaaagcgacgttcttaggtatatacaacagcacaccgtcttgtgcaaaagcggtgttgaatgctgtcactccgtcttttgaagtatctgccagcttgccatagtacttctttaccaattccggatgcttcgccgccatctccttcaaactaccgaagataactccttcgggcagatgtgaagcaggtagcgctttattgtaaaaagcatcgttcactacaaagtacagagaggtactcatattgggtacgtcacatttgaatacctcatagggatttaccggaatatccaggcggttcaggttcaacccatagtccggttcaaagaacttgctgacatcggtatatttatatttctcctgtttgcgggtaggaaagccaagccgctcaaagtcggcaaacgcagtcgcacgaggggtattcatcacctcggtgctgtgctggcatatcatcgcttctgtctgggagaaaagatctatgtattgttgttctgcattcatcttatatatatttttaggcgcggattacgcggattacacggattcatttagtaaagactttacgtttaaactctgcactatgaccaaagttcaataataatccaacttccagtccagttgcttttaaatagttaatcaattgccattcatgttctactctcaatgcctgtacagcttttaattcaagaataactctgttttcaactaacatatcagcaatatatctaccaacagtttcacctttatagtgaactaaaatttctttttgacactctaccttcatgcccctataacacaattctttataaagagcattttgataaacctgttccaaaaagccaaagcctaatattttatgtacttcataaaaggcctttataatctcatgtgttagttcctcatgcaacataatccgtgtaatccgcgtaatccgcgtaatccgcgcctaattaattactctcctagttccttcttaatccagtcataccccttctcttccagttccagagccaattccggtcccgcagtcttcacgatacgacctttgtaaagcacatgtacaacgtcaggtttgatataatccagtaggcgttggtagtgggtgatgacaatggtactgttctccggtgttttcaacttgttcacaccttcggctacgatacgcaaagcatcgatatccaacccggaatccgtttcatccagaatacttaatttcggttccagcatcgccatctggaagatttcattccgtttcttctctccaccggagaaaccttcattcaccgaacggttagccaatttattgtccagttccacaatggcacgcttttcacgcatcaatttcaggaactcgcttgcactgagagcgggcagatgattgtatttacgttgctcattcaccgctgcacgcataaagttaaccatactcacacccggaatttctaccggatactggaagctgagaaagatcccctcgtgactacggtcttccggtgaaaagtccaacaggttcttaccgcagaaagtcacgcttcccttcgtcacctcaaaggcaggattacctaccaatacagccgaaagagtactctttccggaaccgttcggtcccataatagcatgcacctcacctgcttttaccgacaggttgatgcctttcaatatctctttgccatttacactggcatgcaggtcttttatctctaacatctttatatttactattagactatttacaatttactatttaatgtcacttctccactattcactattactaccgaccttttacttatctaccattcatctgccgattgtgcagcaaaatagtaaatagtaaatcgtctaatagtaaattaccctacgctgccttccagcgaaatagccaacaacttctgagcctctaccgcaaactccataggcagcttattaagcacttccttagcataaccgttcacaatcagccctactgcatcctccgtagaaataccacgctggttgcaatagaagatctggtcttcattgatcttgctggtagtcgcctcatgctccacaaccgccgtctcattatggatatccatatacgggaaggtatgcgcaccacatttatcacccagcaacaaagaatcgcactgactatagttacgcgcattgtccgccttttgagctacacgcaccagaccacggtaagagttctcactatgtccggcagagatacctttgctgacaatggtactactggtattcttacccagatgaatcatcttcgtacccgtatccgcctgttggtagttattcgtcaccgccacactgtagaattcagccgaggaattatctccagtcagaatgcaggaagggtatttccacgtaatagctgatcccgtctccacttgtgtccaggaaagtttactgttcgcacctttgcagttaccacgtttcgtaacaaagttataaacaccgcctttaccttcggcatcacccggataccagttctgtacggtactgtacttcacctccgcacgctcgtgcaccacaatctccacaatagcggcatgcaactggttctcatcgcgcatcggagccgtacaaccttccaaataggaaacatacgaatcatcatccgccacaatcagtgtccgctcaaactgacctgtattacgcgcattgatacggaaatacgtggacaattccatcgggcagcgtactcctttcgggatatatacaaacgaaccgtcggagaataccgccgagttcagtgcggcaaagaagttatcacggtatcccactacggaaccaagatacttctgcaccaaatccggatgctcacgtacggcttcactgatggaacagaaaataattcctttctccatcaacgtttccttaaacgtagttttcacagatacggagtccatcacggcatccactgccatgccactcaacgccatctgttcttccaaggggatgcccagcttattgaaggtttttatcaactctgggtctacttcatccatgctcttaggcgcgtctttcttcttcgccaacggatcagcatagtaggaaatagcctgataatctatctcaggaatacggagatgtgcccatgtaggcatctccatcgtcaaccagtgacgatatgctttcagacggaactccaacagccattccggctcgttcttcttcgcagagatcagccgtacaacatcttcattcagcccacgctcaatgacttccgtatgtacatcggtggtgaagccgtacttgtacttctcctgcgttagttcctttacatatttattgggttcttcgggttgcattatgtattaagtatatattgttctgtaacttcttttgcagccgggaaaaatattcccgcgaacgactctataggataatataacacggattcctccttcattgttctatcaatcatcgtattatccgagtcgataaactcgacaacacagataagcagactcaccagcagcagaaacttcaacgcgcccagtccggcacccagccagcagttcagccaaccgagcgagactgcttccatcgccttcgtcagcaaagccgctaccagcaggaacaacaacggaaccactatccagattacgacaaacgccaatatctgtgcaaacgtcatagagtccgttatcttagaaaagactctctccgctaccgacacatacagtgcttttgcagccagcaatccaacaatcaatccgaggatagatgccagttgcttgatgaagccttttataaaaccgatgactgctcccgcaccaatcaccactaataagatgatatctattattgtcataactatatctaaaaaagacacggattacacggataagcacggtttttcttttaaaccaatccgtgaaatccgtgtaatccgtgtctaaaagattatttcgcttacagagtctgttttacttctatttcttcgtaagattcgatcatatcgcctaccttgatatcgttgcagttcgtcaggctgataccacactcgaagttggtacctacttccttcacgtcgtctttgaaacgtttcaaagcattgatagaaccggtaaagattacgataccgtcgcggatcaaacgggccttgtcgctgcgtttcacctttccggtcttcactaccgcaccggctacgagacctaccttggtgatattgaacacctcgcgtacctcgatggttgcagttacctgctccttcacctgcggtgccaacataccttccatagcggccttcacctcttcgatagcgtcgtaaatcactgagtacttgcggatatccacaccttcgttctctgccatctttgcagcggcattcgacggacgtacctggaagccgatgatgatagcatccgaagcggcagccaatgaaacatcggattcggagattgctccaacgcctttgtggattacatttacctgtacctgctctgtagacagcttgatcagtgaatcgctcaacgcctcaacagaaccgtccacgtcacccttaacgataacattcagttcatggaagtcacccagtgccagacgacggccaacttcatccaaagtaagcatcttctgagtacgcagaccttgttcacgttgcaactgttcacgcttgttagcgatttcacgtgcttcctgttccgtatcgattacgtggaacgtatcaccggcagcaggtgcaccgttcaatcccagaatcaataccggctcagacggtccggcctctttcaggcgctggttacgttcattgaacatagctttcaccttaccatacgctgtacctgccagtacgatgtctcccacctgaagtgtaccatttgataccagcatggtagctacgtaaccacgtcctttgtccaacgaagactcgatgatggaacctgttgccttacggttcgggtttgctttcagatcaagcatttctgcttccagcaatactttctccaacagttctttcacacccaagcctttcttggccgagatatcttgcgattgatatttgccaccccattcttcaacgagatagttcatacttgccagctcttccttgattttgtcagcattggcagtcggtttatcaatcttgttaattgcgaatacgataggtacaccggcagccatagcatggttaatagcttccttcgtttgcggcatcacgttatcatcggcagcgacaataatgataaccacgtccgtcaccttcgcaccacgggcacgcatagcggtaaacgcctcatgacccggagtatcgaggaacgtaatctcacgtccgtcttccagtttcacgttgtaagcaccgatgtgctgcgtgataccaccggcttcaccggcaataacgttcgccttacggatatagtcgagcaatgatgtcttaccgtggtctacgtgacccatgacggtaacaatcggtgcgcgcggttccagatcctcttcagaatcctcctcctctacaatggcctgtgccacttccgcactgacatattcagtcttgtatccgaactcttccgccaccaggttgatggtttcagcatccagacgctggttgatagacaccatgataccgatactcatgcaagtagcgatgacctgcgtcacggaaacatccatcatgcttgccaactcgttggcagtcacgaattccgttatcttcagcactctgctgtccgccatttcgcggtcttcctgctcctgcatacggctgttcgctatatcgcgcttgtccttacggtatttggaagtcttgctcttacctttggaagtgaggcgtgccaaggtttcttttacctgcttagctacgtcttcctcgctaacctcctgcttgatgaccggtttcttgaaacgatccctgttattgttgttacggttgttcttgttgccaccttggtgattactaccaccaccggcaccttgctgaccgccgcctgcatgaggtcctttacctccaccaccacggttgtcgcctccacgctggaagttggatgcattgttgatatccaccttctccttattattattaatgcggagacgtttcttcttgttggcgttggcatcggcatctttctccttgccatccttcgctttggtgtcttcgcgacggatttctttgatgatcgcctctttcatcagcttcttctgatcctgacgaatcttctccttctcttcgcgctccttacgtttctcctctttggatttcttcttagggcgtgtagactggttcaatgtcgccaaatcaatctgaccgatgatattgatcttagaaacaaactccggcttgtgaattgtgaagatttccgcctcaccactctttgcaggtgcttcttctgccacagcaggtttcgcctcttcccggacaggtgccgcgggagcaggtgtttctttttttactacttctttcgctactaccggagcggggttgggtgcaggtttttctgcaacgactgctggcttcggttcttctttcaccacaggagccggttcgggagccggagtcggcttcggttccggtttcggttcgggctttaattccggtctgggttccggcttcggttccggtctgaactcaggcttcggttccggtttgggctgcggtttaggttcttcctttaccacaggcgcagatgtttccactttcttttcttccactttttctactaccggtttccggttcagtttatccaagtctatttttccgacaggtttaaacttcggacgtgcatcttcgggaacaacagtctttatttcttcaactttcggtttctccgtagtctcagcttcgtaaccatcgatagataccgatgctttgttacggtctttattctgccgttcctgaatgaaacgttccgattcaagtctaagattcttatctgtactgaactctttcacgagcaaggcatattgctcctcgttaatttttgtgttggggtttgcctcaacggcaaatccttttttctgcaagaactcaacgaccgttgaaattcctacattcaaatctcttgttactttatttaaccttatcgtcatactaaaaaattaatgaataatgtggagaaagaagttagtgcaaacagaaacagatgtcgacagacactttattctgcctcgggctctgcctcaggggcaacctcgggctctgtctcaggcacaacctcaggtgccggttccaattcaggttcgccttcttcaaactccaaacttaaaatgcgtaatacctcgtccaccgtttcttcttccaagtcggtcttttcaatcaacaactcgcgcggagcgttcagcacagccttcgctgtatcgataccaatcgacttgatggcatcaatcacccaaccgtcgatttcgtctctgaactcatccagatagatatcttcatcctcaacagcctgatccaactcacggaatacgtcaatggtgtactcggtcaacatactggcaagtttgatattcaaaccgcctttaccaatagccagcgaaacctcttcaggcctcagaaatacttctgccttacgttcttcttcattcagacgaatagaagatatcttcgcggggctgagggcacgctgaataaacaactggatattggacgtatagttgattacgtcaatattctcgttgcgcaactcacgaacaatgccatgaatacggctaccctttacacctacgcaggcacctaccgggtcgatacggtcgtcgtacgactcaacggcaatcttggcacgctcaccggggatacgggcaatcttcttaatggtaatgagtccgtcattgatttcgggcacttccatctcgaacagacgctgcaggaatacaggcgatgtacgggaaaggataatcttcggattgttattcttgttgtccacacgggccaccacggcacgcgccgtttctcccttgcgatagaaatcgctcggaatctgttccgtcttgggcagcagcaattcgtttccttcatcatcgagcagcagcatttccttcttccatatctggtatacttccgcattgatgatattgcccaccttatcaatatatttattatagatactgtctttttccagttccaaaattttagaggccaacgtctgacgcaggttcaggatggcacgtcgtccgaagttcgcgaagattacttcatccgtcacttcctcgcccacttcataagaagcatctattttctgtgcttccgataatgcaatctgcaagttcggattttccaggtcttcatccgccactacttcacggttgcgccatatttcgaagtcgcccttgtccgggttcacaattacgtcgtaattctcatcggtgccgaacatcttcgcgatcacactacggaacgactcttcgagcacgctcaccatggtggttctatcgatatttttcagttccttaaattccgaaaatgtatctatcaggctgatagtttctactttcttggccatagtcttatttaaaactgattaagtatttagtatattttatttcatcatacgcaagcatttcgtcttcctgcaccagctggggacgcttggcgccttcgggtttcactttcttctctacagttacagtgaaatgctgttcatcggctgccttcagcacgccgcacaacttgcgtccatcttttctcagcacttccacttcttttccgatgtggttggtgtactgttgcaacactttaaatggctgtccgataccggcagaacctacctccaactcataatcctcatcctcacggttcaacttggattcgatgtatcggctcaactccacacaatcttcaatccaaaccccttctttgtggtcaatttccaccacaatcttgtcgtccgggctgatagctacttccaccagaaagtactcttttccgtccagccactcgtcaacaatctgacaaacagttttcttttctaccattgattaactatataagaacaaaaaaaggagcttaattgcccctccacctttcatccattgcggttgcaaagatataaataatctattcgactacaaaatattagagaaaaaaagaatgatttaacgctcctgaaagaagaaagtaatgcaaatgacttctgtaaaaccgcttcgatatggcaaggtcgattctgacattttgtattttatgcataaggagaatgccgtatatccgtccttccgccggtctgaatggaaatacgcaagtaaaaaagtgtatccggcagactgacagagggatacataaatacggacaatgctgaaaaataaaacagacgcggtttggcaaccataaactgttggtttgcattggatatatggatcgtaggcgttccatatatagatggcaagtattagatatatagatcgtaagcgttagatatatagatagcagacattagatatatagttttgaggcgtaagatgcatagttatcttgcataaagtctgtataacgactgtatattattcaatattccgtatttatattcctttagaagacagaacaagatgctatttccactcttttataaaaacggagcgtaagtaatacaggctttttactatctttctgcatacaagaaagccaatagttcgaaataaggaaactattggctctatccataggaggtaaaatgtacctgaacttttatatatttttatttattcggcgtatcccatttcctggtatccgtacaagtaatattcaaagtttgattacccatctgtatgcgaaagtcgcctttttccagaatccatttgccatcataacccacgaaagcaaggtcggagcctttcactttcagcgtaacggttttcgtttctcccggttgcagttctactttctcgaaagcacgcaggcggcggatatcaggagtcagggaagcaatcagatcgctactgaacagcagaacgctttccttgccgatacggttaccggtgttcttcacatcaacggtgaaagtaagtacatcgtcagccgtaaagttggttttatccgctttgagattgctgtaagcataggtagtgtagctcaatccgtaaccaaatgcccattgcacggacatcacggcatcgtaatcataagcacccgacatcttttcaaggtcttcgcacggcttgtagtcgtaagtaaacaatgaattgatttccttcggataagtgtaaggcatcttaccgctgaagttggcgtctcctgccacgaggtttgccaaagcatcacctccatagttacccggaagcatggtgttgataacagcctttgccaacggttctatttcgttgacgatgcgcggacggccttcgttcagaaccaaaacaaccggctttccggtggcagccaatgctttcaccagattgagttggctttcggagaggaagaggttgttcaggttacccggagtttcgcaataggagttctcacccacacaagcgatgatataatccgcattggcggcagcagctacggctttatctatttccggagcattttcttcccaccatgcaccaccttccttataagtgacacccggctcatagatgatattggaagcaccgaacttctgagtgaacgattcaagaatggtgttataatccgccgctaattcatccgccctgtgtccttgccaagtgtaagaccaaccaccgttgagcgtacgcatggagttggcattaggacctgtaatcagcagttttttatctttgggtaacggcaagatgtgatcggtattcttcaataagaccagagactcttcggcagcctgcaaagcagccgcagcatgctctttacctccgaacagggggaaatccttgtgattataatcaggtgtttcgaacaagcccaagcgatacttcatgcgcagcacgcggcgtacagcatcgtcaatgcggctcatcggcacttcgccttcttccaccaactctttcaggtatgtacagaaactccattcataaggcaccatcgacatatcgataccggcattgatagctatcttgatagcttctttcttgctgcctgcaatcttatcgcgggtgtagaggttattgatatccgcccagtcggtcacaatcatgccgtcccagttcaagtcctctttcagccactcggtcagcagttcgtagttggcatggaaaggaagcccgttgttcatggcggagttcaccataacagacaaagcacctgccttgataccttcgaggaacggagcgaaatgtttctcgcgcatatcctgcacggtgatggacgaaggggtacggtctttaccggaaacaggcacaccgtaacccatataatgcttgatgcaggcggccacttgttgctttcctatatgattaggatcactgccctggaaaccgaatacggcttcgcgccccatttcggcattcacgtagcaatcttcgccgtagttctcccaatgacggggccagcgggcgtcacgtgccaggtcgagcaccggagcataggtccaggggatacttccggccttggtttcataagcggagatgcgggcaccttcacgcaccagttcgcggttgaaggtagctgccatattgatgccctgagggaagaaagttccacccaatgtataagttgttccgtgtatctggtctacgccataaatacaaggaatacccatgactttcatcgatttgtcctgtatcttctggatgatttcttcccacttctctttggattgggcaacaccctggggtacattcaggatagaaccgactttgtacttgccgataacggtatccagcaaagcatcgtctatctgaaattcttgggtcgaattatcacgtttggtaatgacgtcaatggtaagctcggtcatctgcccaatcttctcttcaagggtcatcttcttgagcaaggcttctaccttcttttctattttcccgtctcttgggatggcaggagccactgtagtttgcgccgtagcggtcaacatcagcccggagagggctgcggataagattaattttctattcatggtattgtttttgggttttcggaggcaaagatatgtcaaaagttaccacagaccacacagattcacacagattatttatatatattgtattcaatccgtgtcaatctgcgtaatctgtggggataagtttcttatctgaacaacatcggaacgaactccgtcagataaatacgccagttcttccagatatgtccttcgtccgattcataataggtatatttatatcccttttcatccagcagtttacggtattcctcattggctttgtagaggaaatccgtcttaccgatggcaatccagtaaagggcgggatttttgtcaaactgcactttcagttttccttccatattctcgtatatcggtgaagacacctctttattaggcataatggcagcagaaaacagtccgatataattaaacatatcaggatattgcttggaaatatgcaaagaatggaaaccacccatagacaaaccggcaatggcacgaccggatttactctttatcgtacggtagtttttatcgatgaacttcacgatctcgggaaacgcctgttcataagatccctccattgtcttgggtaactgcattgtcgggggaaccattccacgggatgactctccaggagcagcctcctgtgaagcattgccgttcggcattactacaatcataggctttgctttcccttgtgcaatcaggttatccagtatctgtgcagtacggcccagggaaatccatgcctcttcatcaccacccattccatgaaggaggtaaagcacggggtagcgcttgccgctggtttcataaccggcaggggtatagaccgtcatacgacgttccagaccaagcgccggactatcataccatatccgggagacggttccgtgaggcaccggattgactttataaaaatcggcacgatcaccgcctatgataaatacgttggttaaggtggacacatcacggatcaggtagacattggcgggatcgttcatccgcaagccatctactatgaaagagtagctgtaaagctccggtttcagaggttcgggagtagtatattcccatacaccctcctgcccttccttcagatccacaattccgggagcctcaaacttagcattcttctgtacaggcaggaaatctcctgtaagctgtactctcaccgcttttggtgctttgaagcggaaggttacggtattgttgtcatgaatctcgggagataccacgggagcagtcccccaaagggcttgttgtgcaaacatcgtcacaccaattagcaaggcgacagttaaagctgttaatcttttcataagtatgtatatatcaatgttcacgaatatagtttataatcaggaaacaggcaggttcgagtactgtgccgtgattgaagccttgcaactcatgcagagttaccttcttattgccgatattcttcgctacggaagcgaataaagcgttctcttcccatcgatccgccatttccagattgcggtctccggtaatcagtatgacaggaggggtatctttacgcacacggttcaccggggcatattcatctataataggaataccgttcggcaacccgcgttctttacgaatcgtgaaatgagtcactgtttgtccgctgacgggaagataagccgccactttatcggcatccgcaccataagcttccatgtacttcttatccatagccaatatcagtgcaaggtagccgcctgcggaatgtccggaaacaaatatcttgtctttactgccgccatattcctctatatggttgaatgtccatgccacggcagccgcagcatcttcaatataagcgggattcttggccttgggacttagacggtagttcaccgccaccactgcaaagcctctgttcatcagttcctgggggatgtgttttccaccgccttccagaccaccgccatgaaaccatacgatagtgggaaaatcttttttgtccaccggatagtagacatccagtttgcaacgttccttccggtaagcgtcagtctcggacttggcaatatacggcaggtcttttacggttttatatacttcctgcgcatgcagggttaacatacagaataatagcaacagaagtgtcactttccttttcatggcatatttgtttaaaggtttgtagctgcaatattaggcaaataattttaaagagcggcttcttaattgttgaaaagattgtctgtacgttcaaaatcaatcatttttctcattcttcatatccgaccatctttcttaatggcgccaacaacctttccaacaaattcctatcagcgagaataatatctaccgtacctttaagctcctgcgaaacgggaagttgcctgccataattagtctttaatccatccggcaaactgatttctactacatacacatcttcttcagtcggaacaggcgaaattcttttcaccaggcctttgacataaccgaactcttgatcgggataattattcaaacgtatatgcgctcgttgtccaatatgcacttttcccgagccttgcaaaggaagtaacgccttccctaatacattcgaactatctgatggttgaatcacgaaaactgtttcacccaactttatattctgattacggctccacactttcataaaacagaccttaccactaacaggacttttcagtaaataggaatactcccaaacactcaattgagatgctaattgttccactgaatttttcagtttagtacgatgagtttgttcctcatcataggcctgtttacgtatatcaatcaaattctcttcatgctgtactaactgcatttcgacttgtaacaaattcattcgtgcactttcttctaaacgaagactttgcagatatttactacccgactcttcgaactcggtaacaatcattgcattacgggcatacaaaatagaatcacggttgtacatattccgtactaaatttacatttttcttaatcagcgcatactcttgctctgccagatggagatatgcacgttgtccttttagttgtttttcttgcacacatagtttctttgtataataatcttgtttcatgaaacgcgcatattcaaaaagtgcagtgataaacactgcaaaagcagattgtaactctcccaattgcaatcgcttacttgcaaagatttccatcccattcttccaagcataattaatcctcttccattcttgcatttgttcggataaccaatgcacatcttcccaaatagccgcattattaataactcccagattcgcaccctcattgaccaaacttccattcttgacataaagtttatccaactttccggtagcatgagccaaaacagaagcagggggatcttctgtggcaagagtaatctcagctaccaaagtatccggatacttaaatatccggcatcctactagtatagctaacagaatcataaacaaggcagtaagcccccacctcaccacccaaggtgaaatgtggttcattacttcttgtacttcttcgctgcgcaactctatatctttatacttcttctcccccatcagttacccaactccaattgattctttaccaactgataatacaatccccttcgttcagttaactccttatgcgtaccttcttccgctatacgccctttatcaagtaccacaatcttatccgcattcctcaccgtactcaaacgatgtgccacgatcacaacagtcttccctttgtaaaaagcttgtaaatgttccataattcctttctcattattagcatctaacgcattggtagcctcatcaaagaaaagatattccggattcttatacacggcacgtgctatcaaaatacgctgccgttgtccttggctgataccattcccctccatgcctatctttgtattgtagcctaacggaagggaatctataaaatctcgaatattagccaccattacagcgtgacgaagccgttctaaatcaacttgttcttcacctacagcaatattctgtgctatagtttccgagaagataaagccgtcttgcatcacagcccccgtcttggcgcgccaaagatgcggattaatactttccaacgatgtgtcattcacctttacagttcctttattcggtaaatagaaaccaagcatcaattttatcaatgtcgtttttccactgccgcttgctcctacaatagcagtcaccttccgttcagggataaataaagaaatgccatctaacacataatcccggtttgcaccatcgtaactaaaagaaacattctctacctttaaatcacgtttttccggaagaatggaaagtttagaaacaatatcccgctcttcatccagctttccatgcacctcattcaatcgttccaaacttatcttggcatcctgaaattgctgtgtaaagccgataaaagaagaaacaggagcactcaattgcccaataatataagtaagcgacatcatcatacccaaagtcatctgcccctccacaacagcttttgcagcaataaatgaaattatgatatttgtagtttgattaaaaaatactgcccctacctgttgcacctgccctaaagccaaacctttcacactaatcttaaataatttcacctgaatacgttcccactgccagcgcttctgtgtttcacaattattcaactttatttcctgcatagcagacaccatctgtatcaaattgctttcttcatttgcagattgttcaaagcgcttaacatccagttcacggcgatatttcataaataaaaggatccatcctacatacaagatatttcctataaaaaacatcattagtatataccaattataataagccagcacaatagaaaaaacaaagaaagaaatgaacgaaaatatcgtagaaatagatgagcccataaggaatgctctgatacgtccatggtctctgatacgttgcattatatcgcccaagagcttcgtatcaaaaaagtgtagtggcaatctcattaattttatcagaaaatcagagatcagagttatagagatacgcgcattgacatggagcaatatccaactacgaataaactctacagagagttgagagataaaaagaaccatttgtgctattaaaattaaggttataaagcctaaatttccatcacgaatccccacatctactaaggactgagtcagaaagggaaaaataagttgcaataatgaacctgtcagcattcctaatactaactgcaataactgtttcttatagggagtaagatattttataaagaaaatcaatttgtgcccttcttcaacttcagattcatcctcaaactcataaaaccgtgttcccggctctaaagctaatacaattccaagttctcttgattctgattttacagacagccaacattgtttaatttccttttctgaataaacaagcaagctattagcaggatctgctatttgaaaataatatctacctcttcgcttctttacgtcataacaaactacaaaatggttttgattccaatataaaatacaaggaaagggaacatctttttccaattgttccaatgtaatacgcagaccggttgttcggaatccaatggattcagctgcatcactaagtcccattaatgaaacaccttctcttgaaatataagaatgttcacgaagagtctgtaatgaatagtttttcccataaaactttgcaatcatgcgtaagcacgcaggaccacaatccattttgtctaactgtttataatgaggaaaagaactcattctattcattctgaacttatacgacttacatcaatagaaaagacattctcaggttcaattctatgctctaggaagccagaaaatgaaagctgttgacgccctcctacgacataaagctttccgtcaacataaaacaatccagaactctccaaaccgtccgtaaaataataagcacttacagtattcattctgatattataaatctgcaaagttgtgctttcatatatataaatcagatttccgttggatgcaattcccggacaacagaccccttccttcaaattacataagtcattccagccacctgtctccaaatcataacttctaaccttccacattgaagccgtgtattgaccaccaaaaaaataagcaacatgtcccaccaaaacacatttcataaaatcccttctttcttttggaatagcgattccggcatcataccaaacgccggtttgaagatcgagcatatgcactttatcagagtacacgttcttttttatagtaccacccatcatatacagacaattattataaatgaatgtagccggatctaccgtctgatgaggattcgtccaatctacatacagggtatctctatccaaatcataaatttcaatctgaggtgctgtatattccaatctacgattagtggataaatactttcctcccactatgaatacccttcctttataataatgtgctctatgcccattacgtcgggcaaacttttgcagactttctgtccaaatatctgtagcaatgtcataaacatacattttatcagaaagagtaccaccggttgccaaagtcttttcatctcctgatatgatatatatcttaccattttgaaagaaggagccggaagaaacaacagctaccggcaaatctttcaaaggttcataactaaggaagatacgtcctcgttctcccttcacactcacttccggcaattgctgagaataagtaaacattattacgcgatagctcgaatatctcaaatccttaagggttagtttaagagaaagataccccacatacgagaaaataatcgtatcatttcctgctatattctctatatctgcaatattgaaatgtccgttttcatcagtcacacctattcctacagaatctttttgcagatatatatttactccggataatggactattgtcttttccgtctataacatacccctgcgattgagatttcatagatagggaacaagttattataaggaacaaaaatatgattattttcacagtatgaatattaaatatttaacattaaaagggagaaagcttaggcctctttctcccaagaatcaagcaattaagtaggatccattctgcgacaatcatcatcatccagatggcggcaatctattatttcaaagtcgcattcaggataatccgcatcacaacgagtcacacactcatttgggcaacccatactcaaacaagtatatctcggacaacctttacttggacaagatgcaccagctctaatagactttagttcatcagactgcaatcgttgcagcctttcatccaaattcatttcttcactaaactctgtctgagtagaatttagtgaaatcatttctacactcttcttcataaaatcttttttagtaaaacctcagatatttcttaaaaatctcatttactcgttcatatgtttctaaattatatggcatgcattcttttaagcttttgtacaaagtatcatcatccctttctattatccaatatggattacgtccttcctgcttttgcactattctatcagcatggaactttaaatagaatatacaaatcattttatctattacagcgtacgtttccctctttatatctataagcgaagacggctttacttgcaacagattcgcgatacttgtcttcaactcgtcaataagaatatactttaatattcttcgcctctcaactatatctttaacaaaatatttcaaatctgtaataaggtccttttcatcatgtatgctacatacatctgagataaatgaaattggcatattattatagttcagcaaatattttcgttctttccgaagcagcatatctttactaaaactaaatatactgactttaatccctttataaaaaaaagatactaaaaaacttttccgacaatcttctcgttggaataaaacatcaacatcgctatcagccctatatgttccagccgcaacagaaccaccgactccaatagaagcatccgggtatgctttatgcaaataatccacgacctcactcaatactactttctgcattatcctacctccattaacattataggtcttgcatatttttccatatatatattccgcatatcattaaacaggattttgcatcgctgtaatttctcgatagagaaatccgtcgataacgtttctcttaactctaaaacataagacttcaataatacattgtcagcactcaatgcacacaatgaaattatctctgcttctattgttcctaaataaaaattcatttctgcattttccaagctttcaagcagattaaaaatgcctgaaactattgagaaatattctattggaacaaagtgttcaaatcggtattcctcactttccaacagatgttttatcattattgcatcatcagctttcatcaatccctttttttatttttttattatataattgtcgtatgccatacccaaataaacgaggataatcattgcattcaccagactttactttaccagttacccgatatgcgttggctaagcaaccaccaccgcagaaaaacacatatttgcaattaacgcacttttgctcactgactcttgaattaaaccacctatcagctgccccgttctctaaaacaaaatcaggcatgtaacgacccactctttgttctttttgccccacaacatcccaacacgaataaatatcaccaagtggatcaaatatgatattactagtctgagctccgcaaaaacagcttctatgacggacatgctttcctaaaagtaatctatttagcacagattgcacttcaaaatcttggcacataaaatgaccttcacttttttcacttaaatctttttcacagaatgtgcgataaaactcactttgagtaaacatctctttagatatattttcttttgtactatttattggaacatctttacgcaaaagagcacaataaggtttaaagttcttatactggaaccaatctttctctttaaaatatgacaacaattcatcaatacgctccatagagtaaggatccgtattaatacgaattgatatgggaatcccaatttttagtaaactatctacattcgatgctattttagcaaatgaatccttattcttataatgaggtttcctcttattgtgtatatcctctactccatctattgttatttgaaaagagaatattttagagttctcttttaaaaaatccaagtaattatctaaatcatatccgtttgatgttacagaaaacatatatcccaaatctttgcccttttgtacaatatactcaaggacttcatagttttctgccagaaagggttcaccaccatacaaatggatactcctttttcctgtcctatctttgtctttgtctttaataatttcataggccttatccacttgttccttggttattctacacttgggcaggcaagcacatccatttaaaacgggatcctcataacaataaatgcatcttagattacagtcatacgaaattataaaatgaaaaccgaaattcttcagacgaacttcatcatatatcttattcaaaagtcgttttaccaattcagtttcatcttctttcgataaagatgtcatatatccccgcttaacaagcttttcttttgtttcgttagaaatgtcccaatattcaccttgattcttaagatactgatatacattctgattcacaatatcaaaagcatgagtataactatttaataaggcgtagcgtcctgcctcattatccacttttactattatgttatatgatgaagttctcatagtttctacttcttacaattcaaaatagccaaaggtataagccccattttctccctttacctcaagcaaacaacgtcctgataatctttttgaaagagaaatactttcaaaaagattagattcaatattctcagatgaagaataaatagtcatctcattctgagagataataatttctatattacctatagcctgatagaactctaattcaatagtttgtttattacttaaaaaagcagaaataagaattggcacgaaaatagaacgttgttcttgatcagaacctttaggtttttgaaaaggtacatcattataggataacatgattttcgttccactagtgaaatcatcagaatcagccctaattacgcctattgataataggcagaaccagctcacaaggcaaaatacaaatttcgttttcatgtattagtgtttttagtgttttcaaaaatagcgcaaataccctaaacacacaaatttacaacaggacactttttttcgtcattatcaactaataataaggaacttatagaagccactaagcttttagcaggacattttacgaggatagtaagccaaaaaaacatccaaattcaccttgttatctaagccaagtttattttttagccgttgtttgcgcttcctaacagcctccaattcactatcaaagagaatcactaactcctccgaagaaaagcctaatttaatgaaagctgccaataacaaattgctctctttcaacctgtactctgtacataaacgagtcacaaagttatcaaaaagaaaatccacataacctaaaaattcccgcctttctattgcggtcatattctcaacgatcaataacccttcctttaattgtctcagtacatttaacccgtcagcataagaattttctaagttaccccgattcttctccattaaaattcgtatttcctgctctaacctcacaatttgttctttagaagcttctactaccgatacttctttttgcttcaattcttctacttggcaaatatactggcttattaattgctcattggtactaataatctccctacttcgttttgcaaattcctgcaaactttctcgataatctcgctcattacgcttcaccatctttttgcaaaaaaacagccccaaaagaaataaaaaaaataaaagaacaatacctcctaacagttgtatcaagttatcttgctgaagtatatctttctctttttgctgtttctctatctcgttcttcttctgtaccttcaaaactttatttcgtatagcttcattctgagctatttgtaataaggaatccgacatctctttataataaagagattttccatactctacttttttcttttctaatagataaaaataattataagcacccgacaagacaaaaatatcatttgaggacaaaatatacttaaaacattcttctgctttatcgaatagactaagtttcatataagcatctcctaacgacatataataataaggaatagaatcaacaactttctcgcacctgatagccactaagaaatagcttacagcatttaaataattcccgttactactctctgcaactcctttaatatgcatcagtgaaggaaaaacagatgaagtgctatcaccatttaatagagagaatccagcttctacatacctatttacactatccatattttgcctaaccgcataaatccaggctatattccgataagcatagataatgcctaatgtattatccgcctttttgttataaaaaatagacttttgatagttatccaatgccatatcatatctttcttgatcatcatttattcgtccgacatattcttgtatccaagcctgtaatttatattcttttgcaccttccaacctttcttgtgcatccaaataggcttgcatggccttttcataatctccttgtaaagcagttactttaccataatagaataaagccttaccccctcttaccttatcatcactatcctgataataatctaccgccagctttattaaagaatcagattgtaaactatccaaatagtttttatcgcgtgcctgagtcaacagtaaagcataatcagcacattcctttccttgaagtttttccggttgtgatatttgatttaaaagcaataatgcactatcaggacatgtttccatatacttctctaccctatcaaaaatttcagatgcatctttgggagtacaagagaaaagcaagccataaataaacaagttccaagctaatagcagttttctcatattttctacttattgatatttgttcttcatatcttatcagcaaaaagactatttattcatagcattcagaacagagttctcattcctgacaaccaaagatacgaatattgtagtttaataacatacaaacataagggaaaaagcgctcaatcatataaaataattaccatcatttcaaaaacgaaatattatccattccaaggctacaccctttccagaaaagggctataccttttatcggaaagggtgtagccattccgaccaaagggtgtagccctaagaaaaaggctttgtagctatctgtacataggatagtaattacacatttgtccaacgatgagtgcattcatcagatacaaaactcctaaaatattacctaatatagggtttattcattacatttgtaccattcttaaaactttatccttatggcacaccacttgaataccaacaaacaatttatggtaggcaacggcatcctggcctttgcagttattttcgttgtcgtcatcttcatttacatgagcctgcgcctgcagaagcagaaagatgaagaccggaactttatcgaaacgtacaccatcaccctggaaaaaggatttataggagattccctgtcactaatgattaatgacagcgtgctggtgaataagaaaataaccgaagaaccattcagtatggatgtgaaacgttttgccgaacagagcgcattgttgattgtggataaagcaacggatcagctatccctgtttgaactgagtgagaaaggtggtaactaccggtttgaaaaagagaatggggaagtaaaacagttggcgcaaaaataattcaccacagagtagcacagagtctcacagagtttaatctattgaaataaaactctgtgagactctgtgctactctgtggtgagaacttatttcacctgaaaatagaacttatgcttcagtgattttcccggcatcttaaatgtcagttccacaaagttctcttcatcttccagacagtcttcgctattataagttatcagaatgtcttcgccacatggcacagctttcagttgggaagcgcagttagaagtaagtttcggcatagcagccgtagttatcttctttccttttataaataaggagactatataagcatccttgccgtccgactttccttcggcagtgataaaggttggcaacttccgatagttctgaacgacaccttccgcccattcacggcgtgtcttatcgaagaagtattctacggcgggacgcatttttgtgatgcactggtctatttcttccacagaagagatatcagaaatatgctcttccatcttctttatcaagtcctccatcgcacggtcctgctcttcaaactgacggaccaacgctttatgttcgctttcagggaaggggtagcgtatcgcataagcgtacgttatcttaccggacttcttatcacggcgtttctcccagtacgaaccatcaactttagaaagtgagattcccttgataaaaggcaaagaagctgcacgggtagaaccttcggccatatactgatcgacaaactccgtgatacggtcaccgttaccggaagtctgtttcactgtatgcgaatccgagaactcgacattctgtgccacagcttgaataatctgtctcttcacgctttccaggcattgctgacgcgcctcttccatcgaaccagtctcagcagaagccacgatatagccggactccgcagactcataccagacgggagctttcttatcactcttctcaacgactttatatgcctgggcaaacaatgaaactgttcccatgcagaaaagcaaggcaaccgtaattcctattcttttcatcttcataagcggttttcctttctttatttccaatcaacgggcagattatggataatcactttacagttatccaccgtcatttctacatacgaaagtgtagcacaaggagtactgacacctttgatttcgaacaccttacctattctgacacctttcggcatcttgtttccataagtccaggaagtacagccattcgtctctatctgagagaaattagtaaaggtcgcaccatccggatcaatcgccgaagtcatacgaatagtcgcactgttattcgtcacacctgtattggtgaagcgggcatagacacgaatactttcagccgtttcattgccttcacaagacaccagttcgaaagaaaggtcattgcaggaaaccgaaatcttacattcgggcaaaggagacttctcaggctgcacgacaaccggttcaggagacgtcacaggctctgcgacaggagtaggttgcacttccggagcaggttccggggaagccggttcttcgggagccggttcaggagtaacaggtgattcttgcggctcccgcttccctatcttttgcaatatacccaacacttcatcgtagcaaggtaccgtttcgggaactatagacaaataatccgcagcttcattcaagagcccggcatctatcagcacctccgcttttttaatgatgacaggacaattctgctggtagaaatcagcaatacgcttacgtgtagtgcggatgaaacgtacaaaagccggatcggtaaccttgatgccggagataagcgaagcaatcgcatcgtccttactcccagtagcgtctccctgtacctcgataacggccgttccatatacactgtcgtcatacttattgcgggcagtcaatgaaaattcacctgtaaccagcgtcacgtcccgcagtaatccttccgtcttcttcgtctctccgagaacaagttcaggctgaatgacgaacgcattgtaaagtgaagcagttccggcattattgcgggcaataatttgctccactttcagtttcagtgcatccatgttcttctggcttaatcccttctgcgtgggcgtacccgccacaaaatgaatgttatcctgcgccgccgcacccagcgaaacgagcagcagtaaagcccatagaaatctattcttcttcataaaatgcagatttatttaatggttacagtcaacccttgccccattgtaactacagaggcaacatattctccccctaatttctcatcgaggaagttcttcagttcggtactgaagcgggaaatggtataagcgcgtccctgcgcttcatcccaaattggcacttgtacggacatatcgatcaccttgtcgttgctgcggctcatatcgtaaacaccattcaaggcgtgaacctgcaaccagtcttccaatacggtcttgaaacttgcgcttccatcgggcaacggctggtcaaaatcccagtcggtgatagatttcgccagtaccatttggatagccatctcacgaccattcttcacaatgtcattgaaagaagcctgcaacttggtaaagaactcatcttttacctttttgagagcatagtccgtcagcttaatggtatctgtagtgacgtacttaccactttggaaagtggcgcttgccagattgcctgccgtctgaaattcagttgccgtcagctccagcgacacttcgctttgacgtctagtatcagtggttgtcatcactttggcagtcacaatgatatccgcacccatattctgaatcatcttagttacggcatcagactgagtaccggctgtcagcacgtcattccgtttcgcccgtttcagttgggcaaggaaatctttcgtcttatatccgcgtgaactgaactcactggtcattttgctcacggcataactcaacatctgattgtgatccaggatagcacgtatatcttcatcttccctggtataaggaaccaccgtcaccgtaggcaaacttacctggctgttgggagtgcccactgccataccaagattagtctgcaccttattccggttcagatctttctgcaaagcatcgaacagaatagtcatttccaccgtgcagcggtattgcttaccttgtttttccggtccctccgtaactgtatagtccttaacaaacacggaataacggttttcatcgaaaaagcggcggtcatagtcaggttttgcagtagaaaccatcggatttcccttattgactccatccacccccgtatagaataaggtatagaaggcagacttcaatgccatatttgccgcctctttcttcttctcactgatacccagggcacggacagtcaatgtgtttccctgctgttgcagaaagaccacttcactggaataattctgtccgcaaagagtggcggacagaaatattcccaaaagaaacataaaacaatgcttcataataactgtatggttttattagttgaaaatcccgcccatcaatgtctgttcgcgggaaacgatctttatcggttgctcatcacggatggctttcatgatttcttcaccacccttctgcaccttacacaaagagatatcatctccttcaaccgccttcacggtcaaacggccgatttccttcttggcttcgcgtccggcaacttcacgtatggcataaacagtaaatttctgggcttctttcacaccattcatggagccgaggttaatgtacacttcctctgccttgcccttcttctcgctatttacttcaaggatagttccttccattttgaagtattcatccacaaagtcgcgcatgctgtataccgcacttttgatagtgttggcaatggcttcttccttattgccaccggttcctccggtcagtccgctgtgctggaacgtctttgtaccgatcaatgtaccgttcttcggattgataactttcagtgtataagatactgagccatcataatatccttttccatctcttgtcttataagcagcagtcatagaagatacctgacctgtaatgatgaactgtgcccccaattcttccatcactgagaggcggtccatttcattatcgtcacccgaagagatattagcagatgagcgacgttgcgattcaatacgcaaggcatcctgtgcatccacatcaatcagaatcacacgttccatcttctgtataccctcaatcaccgtattacgcaagccctctacccacgagaacggtgcatcgctggatcgtttgaaatagtcaatgaataccgtaggttttcccttcggctcatcaaagttctggcaataaccggcaagtgaatataccacacaaaacactaagagtacaatctttctcataaacttcttgaattatataatttaaacttctgaacttgcatcttactttaatttttcaaaaataaacatttgttatcaaaccgcaagagcgtttacgtttattaactcaaaaaagaaatacaatcacggaaaacagtgacaacccctataccgtgtaccgattgtatcagaatcatgtccgcatcgtacccgaaccgtatctgcaccgtacattctccactcagaggtacctctgaccgaaggaactacggagttggtacggagcaagtacggctcagatacagtttaagggtaatccaagtcgtgataagtgagtcggtaagttatggtaagtcgtggtaagtgagttggtaagtcgtggtaagtgtacagtagcaatatgtggcacgacttcaagtggttaaaactccgtgcgatattgcctcaattctttccgcaaagcttgggcttttccttccgtcaattcatcgagaagtgcccagaaacgctctccgtgattcatctcacgagtatgagacaattcgtgcagaagcacatagtctatcagatgtttcggcaacaaaaccagatagtaagacaggttgattgtgcgccgtgccgaacaactcccccagcgtccactgctggaattgatttttacactttggtaaggcagattgtgtttctgtgaaagcatatacagacggggtggaagaatgatctttgcattacgacgcagagcctcctcgataactttacgtaaccatgcttgtaattccgcatcagtaaaatcagctcccggcggacagataatctgcatctctcccaactcggagcgtgaaaggaaacgttcgcgctgtccgcttacaagacttaatttgaagaactccgtatcaatccgaaaatttaagtctatcagaggacgagtatattttttccgggccacccgcaaacggggacgcagttcttctatcgcattctttatctctttaagtgtagttccaggcggaatggttacatagatagcgtcttcccgcgtacgaaaagtcaaacgccgcgcacgggtattcactttaataagaaagcgtccaagttcattatcttccaatacattttccaaaacgacaaaacctcccaatgaataaacagacaaataaacgaaatatcgttcgaatatacaaatgactagatacccaaaaacggacaagtgtccgaaaatgaacacctgtcctaaaagaatgcacactaattatcagcactttattagattggcatgaatattgagttataagatgtaaccggacgttgccaaaaaagtttctgaaaaaagagaaaaaagtatgcaaccttttttaagcaacttacgtctaatagataaacaggaataatataaatgaataattataaaactaaaaaagttatgaaaaagttagcaagcctccttacatgcatctgtttaatccttagtacaacagcgtgctcacaaagcaagaactacagttcaggcaactggggtagtaaaaaagtgatagccagcaacaaatacgtaacaaaggacatcaaggtagataacttcaagaaaatcagtgtagccggtagccccgatgttacgtttactcaaaagtcgggacgccccgaagtagaagtctacacctcggacaatattgttgacttgctggatattaaagtaaaggacaacaccttatatataggtttcaagaaggatgtcaatgtgtcttacaagaaactggaagtacgtgtatctgccgaaactctgaatgggatttctgttgccggttcaggggatgtcttcctgaaaaacggtctccagactaatgacaatttatcaatcaatgttgccggttcaggagatatcaaaggcagtggcatcaaatgcaatgatatgaaagtatctgtagcgggatcgggcgatatcaatgctgataatattacttgtaataacctgaaagtatccgttgcaggatcgggtgacatggtattgagaaatgtaacagctacgggcacggaagcaagtgtggccggatcaggctcggcaactattaccggtacaacccaaacagctacttacagcgtagccggatcaggcgatttacttacagaaggttacgaggctcaacgcgttaccgccagtgtagcaggctcgggcagcatcaaatgttttgcaaccgagttcctgaaagcacgcaccagcggcagcggaaagataggctacaaaggaaatccggaactggattacccgaagaagagcttgtacaaactttaagattctctcttacgattattataaaaaggatagtttaacaaacatcaagcgaaaggggttccgggaggaagcccttcgttgtttttatacaatggatatatagatattgcacatccagaatagtttatctgcctgtatttagcatcttgtcgcatctatatggactatttgtcgcctgtcatttctcttttccagctaataaataatgtttatggcttaactttgctcgctatatttctaaacataaaaagaaaatgaagatgaaaagaatttttaggctatctttatgcctgcttactgtgtttttattgggagcttgttcttcggatgatactccggttgccaatgttccgcaactttccggaaacataacgtttgaccgtacgcgggtgggagtaggccagcctgtgaaaatgagttttgctttgcccgcgtcagtcagcccggacgtgttgaaagcagagtactctttcaatctgggcggtatagccgatttgcccgtagaggcggagaataatgtctgtacctatacgtacgccttcagagaagcgggtacatacccggttagttttaaggtacgctacttattcaactatcctgatgcgacgggcgaaatctacagagacgatgtcataaagaaagatttgcaggtagtggcttgcgatgtgcgtaattctttctggggtgataaccttgcagagacgcaacggaactgtggcagtgtgctggagaaacaagaagggaataccgacctgtatgccgctgtcttgagtagtgagttcggttcttcagtggagggaggtaaagagacgactgtcggctacaccttcaagaatgataagctatatatggtgcaggaagtaaacctgtttgatacacaagtgcctttcactttagtgttccaatattatagagacataaagaagatgtatggtgaggctgttgagataaactggagttcggacactgaaaagaataatggctatttcgacgcttacgtgaatggtcgtgacaagacagctctagaagcgatgaatatattcttgacaacggaaaaaggaggatgggttgctttcaacttcgagaaagaaaacaccatgatggtagtgcagtgttacaagagcaacgataagtgggtagtgaaacgcgcttatagagagaaagaataacaggaattgaaagtatttgaaaatagtccgtctcgtaagccgaaaagcagatcgcaatttgggcatacgagacggactattttcatcttatcttagcaacagctcagagggaagtggaattcccgtgattttcgttacaggaagaaattgtctgcccttctcctatcaaaggtagggtgttaccgcgggcatctatacagcaatcctttatggaagcctgtgaggtggctttgcctgctatgcttccacgcacggttgtttctttgtcggcattgaccgacagaacggcgtggttattgcaagaatgcagcgaggcactacctgatacctggccgcaaatgccgccaacgtaggtacatccgctaccgcgatgtatgtcggcatagttgtcgcagtagcggcaatcgaggttggtggaggaagaagagtaaccgatgatgccgcctgaaccggaactgacagcatcctttattcggaatgtgccgtaattgctgcattggctgatggttacgtttgactgggcatagccgatgatgccacctacatacgtctgggtgctgctgcttgcggcattgtcggtggctgacacagaaccacggttgatacaaccattcatagtgagtggagcataagtgcttcccatcagtcctgcaacgtgattccctcctccggcactggtgattcgaccgttataactgcaattgctgatgctgtagggcacagttccgcttatgtaggctatcagtccggcggtatgggctgcttgtgcagtgcttcttgggttattttccacatccgccaaaatatgcaggtcctttacgctcccttcacttgccgcacctatgaatgcagcggtaaaactctggcatttcatgactcctttgactatatgcccgtccccgtccaaatgtcctttgaagtaaaagaatttaccgtctaccccggtttcattgttgtgcccgccaatcgggctccatttgtcggaattgattaagatgtccttggttaaccggaaatacttcccggcataatcgtccctgttgacatactgtatcagttgttgcagattttcggtagattcaatgatatacggatctgcttcagttccgcttccattatactccataggagttacagcatgaggatcatcatattctattatttcctcaccgcttttgctgaggctgaagttcatggcgcggtagcgtttgcctgcctcgtaggtgacttcagaagagagcgtttgcgtcttcacgtaacgcgtgccgttccggcaaaccacagtggcggtaagttcgcctgccggcaaggtggtgggaaccatcatgaagtagacgcgtaacccgttggcaggcagggtttccgtggcttgcgaggggatttctatgttctccaatccgacactcaggtttctcgtccggctgtcggcgatgccggcggcggtggaggcggaaagggtttcgtagaaaggcttttcgccttcgtagtggagcaggaagaggcaaggttcgccgtcagctttcgggtcgtagccttccagcgtgaggtcgaagcgcatgatggcgagcagatgctcgaagggaacgagggaggattctattccggtaataccggtagcacgcatgtagtcgtaggtagagaggtgagcggtggaattgttgccgttctgcacttgtcccgtcagagaggcttgggcttcctgccacgtgtttccggtgctgcgggcagcaggatagaagaggttgaaagaggtgttcgcatccacatcttcggcaacgtttcccgtgaactgggcgtgagcgttgtcaccggttgcggaagcctcgctataggtgaacagggcggatgtttcctgtcccactacttcctgcacgtgcggtgtggtatagaatcctttgaaggcgtctgtcggttgccagctcagggccatgcctgcctcgttgttgtcctcatacgccatgcgcgtgtcggggcttggacggttggcatcgggagttgcgtccgggttgccggtgttatcgctggcggatgctgcggtactgatgcttcttgtgcgtagttccctcattcttaccccttcgttctccgtacaagaggaggcgatgatcagtccggccatcatcgcgaacggataaatgaactttctcattctactttgagtatttttttagattgtcagttttctatagtcagtatatcatttatcaggtcttccagttcgctggtcgaggcatttcttccacggttgcgggccgaagaagaagagaacatgctgccgtcgccgtagccgggcaccgagaaactgccttgcatcaccggttcgctggtttccaacggaatgatctctatggccggagccgtgtatggctctttggaggatgctgttttcaagtgattttctgtattcatactaattattcttttgatgttgattatttgatagtttttatcctttatactcagattgtttcgcatgccagtccgtttgttgcgtcaatagcggaaagaggaactgcgcatataaagaaaccgagttccgcttgctacctcgtccgatgtgctgcattcggttgtcttattgtatgtcatggttataaattcaggttcgctggcactgttcctgccaatgatataattgctagaagcttccaatccgctttgcctgtcggaatctctttctttaatgttgtatttccggtgtaattcttccagatccttcagtgtcttttcttgtgtaaatatctcccaatcctttggcctgtcggcgaaagctaccatcgggttacccgaccacatattaggacttgccacaaacatatacggaccgtatttatagaacaatcgaagctcttttcccaaactgtataaaatagtttgccttaatacatagtcggccgaataggtttctgtgctgtcggtgggggtgatgtccaagtcaccggcgttgtaataaagtgtgggatattcgcttcgtttccctataggtgtcaaagtacattccaagtctttccataggatacggtagagcgaatcgcttgtcacagcaagtccttcgttccgcacctctcccgatatgatggggtagaaagaacggagcgcatattgttttccctttatccatatatattcggatatggtctctacgatagcctggtcatcggctctcagatattccaaccaccattgattatggtatttcatatcatccgttatgagcttctggcagtcgatctgccggtatttcttgtcgtacactttcgggaacatgtcgtcttcatactgaatctctatgccaagttgtgtaaagacgaagttccgcgctttttcatcggttatgaactcgtagatggggaatagcttgaagtctatcagttccacattgttctttacggggtcttgaagatcaagacggatggatttataccatttgtctacaatattgtcgccaagcacgtctttttcgcaattgatgatttccgttatgtaggtcacatctcctccacgcgccgagatgctgcgcgactggcgggtcgatgtctggctgtaagtattggtctgtccctcttccattttgaatccacacatgttgaggaatgaggcttcggcggctacggaaagcgttgtcttgctgtctaaggcagcacgctcgaaggtggaacagaactcaagttttccgcccaaatcggcatgatagatgacatgggtaccgtaaatgcggaatagttcgtccgtatattctgtagcctcgtcaagattgtcttttccaatggcatcactgattttattaatacagtttcggaagccttcggtcaatatctttggattatcccgtgctatctctatcagactgtaagggtcgatatgtcgggaaagggctttatagttgttcatgatggtgcaaaatgagtaggcattggtcttgagatcactacgtgcatagctcccctccacgtgtgcttggaagaaaccgacatccagtcccaatccggcatgggcggatagcgacttgaggagttgttcactgtcttttccttccagaatggtggttaccatatcgggcgcggagtcatccacgatacatgaggtcttgttctcccgttcgtacagccgcaaggcaggcaagcttatcacttggtcgcgtacgctgttgtagcttgcatatttaccgaaggcatcgtagccatagcccacaccgtatgaacgcatcaaggctcccgaataagcttctcccaccgtctggctcaggctgcttgcctgacgcaaggagtaggtgcggattatcgcgccttgccggtcagtgaactcaagttcaccgaggcgttcctcttgataaggattttgctccacttcgatggtgagtggctcaccgctccgtacgatggaatcggacaggaatacaaaaccttcctttgcccgtatgcggcatccttccaatccggccagtctctctgccgtcagagtgtaatcagaatatccgcgtttcaggagaatctcattttccgttgcgatatgaacttcattctcctccattggaacttgaaagttctcatcttggcaggcagtcagtacagccaggataaggatatattgcagcttaagaattttcataaggttttgttggtgttatttgttaatcaaaagtttcagctaccatataaatcggtaaaagcaaggtagcacaatcggtggaacctatcgttgctaattgataatctttcatggatatccggctggctcttcctgatttggttattctggcaatgtcgggaagggaacactgtttggaggtcatgtcccggatggggaagacaatagcttccgtgtcaaatttatcataagaactaccggataaatggcgaaaagcccctttgccccattttagtcctaataaattgcttagattgccgggatttagttcgaaaagaaccttttcgtttccgttacatactttcatcagactgtttatctgattgtcagtggggagataatgattaatgtcgggccaataaaatgcttgatatagatcgttcgttggcttgcacatgtgaaatttattggcaccttcggacttattgaaaggaacataatctgtattatctataatatctctcttttgcaggctataactggcttcgaaccacatcaagggacctaccttgattaaatagagcttgtcgttctcgtcgtctcctgcgctatatattatctttttagatgaggccagaagagggtgtacggaggttatcgaatgtatactatcttctacgatgtatttgttgttttgttttgggggcattatctgtacggcagcgttatagaaatataattgtttcagcgatttgctatttgcgtcgaacaaatgcgcaaattgggcattgtcgtacctgacagaatcgttgggctcatagaggcaattattgcccaaccagcgtactgcacccggatggttatccgcatcgcctatgaaaacaccgcaataaaagtatggtttctcttcgatgaatgggtaagctattatgacggcgtcatcacgacggatggccggcacatactcctttacaaatataaagtatctgtttttgttgcgggtatctgctttcaaggcacatgaactttgtctttgtaaccattccttgcgtacaatatctatttctatccgggccggtgtatcttccggctttggcgccatctccggtgagttggtatatttggaaaaagcaatctgcaccaatctgcgcttgtcggggtcgttgattatctcgtatatgggtatcaggcggcatcccaccatacccacattgtactcttttccggtatcggcggggtcaatattgaacgatgcctgccatttctttatctcgtcaggggtgatctggcgtttcgcattgactgctgcctgcatgactccgtgtgtcttggagtctccgcctacgcaagtcaagtcggctttgtagtcgatgcctatctctccttggtaggtatcgtatgattggctgctttgtcctttgttctttccgaacaccttcttcgtgacggtagtgaccgaatgctgcgtttcgatggaggtttcgcgggtgatcgttgtatgcagttcgaggcttccccccaagtcagcagataccaccaagtgggttctgaatttattgagaaaagcgtaggcgttgttttcattaagttctctcaaggcgttgcggaattcctttgagtagagcggggaatcatcgctcgtggcttgggaacggagcatacctatatcaatggtacgtgaggaaataatctgcttcaagcgcacaagaccgcacacctcttcgatagtcttggtacggtagatgtcggtcttggtatccgagatctttccacagcctaaaaaggtagccttgctatccatgtttcttgtcagctttccagccagctcggtgatggtggtaccagagaatatctccaagtcctgatagtggcgacggtcttcggagatgatggtgatacctttggcttcttccgcttccaccaccttgtcataatccaataccggattgtcggaatagcttccatccgacgcatactctttcatgatgtcatacccatatcccatacggtgttttttctgcatatctcccgtcagggtggcgttatcctcgtcgttgtagcccgactgacggatgcgtacctgcaccctgtaagtgtccggctccttggcatcggcaatagtaatgaccgccacgcgggcaaagggttccgtgttctcttccacatcgaaacgtatatactgcgactcgctcccttccgtaggcgtgagggtgagccattccgattcgcaggtggcaatccagccgctgccctgacactccacatagaacgcgtaatagtccgccgcactcttgatgcgccagggattttcgggcacggatatgcggatgggtcccgaaaccagttcttcgggcaggtcgataagtccgtcgtcatcatcgcggcaagaggttgtggcgacggcaaggcacaacagcagggtgagaggaaagagtaaacgtttcaacatctttgattcttgatttatgagtctcttattttcaggcaaccgtcggttgcaatcttctatttatcatcttcttttttatccaaacttccttctttgtccacataggctttcagtgcatcgtgggcggtctggtcgttgatgagcaggtagatgggcaccaatttcatgtctatcatgacagctgtggaaggctccacgctctgttgccacgacagcacttgctcgttctccaatacacctcccgtcgccaggatgcagacctcgttcacgttgccgccacgtatgttcactttggcttcggtcttctccaggatattcttttggtcctgactatagtccccttcgcctttgacgtcgatgccgatactgactttcagtttgaattcgagcgcgcctccggcggtcataccgtctttcagcaatgacttgtccacggagatgtagtagtcgagcacgcaccccatgacggacttgctgatgaagcagggtcccacctcgctacagaagtccttgcaaagtttctcgatggtggtctgcgaattgcctgccgcctttatgtctttggtgaattcctctaccttctggatgaatcccggcgcatagacttcgtttctcagttcgggtctctcgttcaccaacgccaccatgttcatatagttaatttcgcgcgtgaactggtagcttttcagtcgtttcacgccatattccttgtcctgcgtattggtagacgaactaccgtagtgtccctttacgtcgatggcgaacgcattgaagttcaggttgacggaagcggccacggaaagttttcttgacaggtcttcttgcgaagtagcggtgctcacctcttcttccacctgcgggtaatactcatcggtgataagatcatagcgtatcgcctgttgcagactgtcgaggcgtcccaggttgaagagctgcatattggtgcccaggcagtagttagagttaggctgataggagtagcccgcccctttattggaagaaatcattttcttaacggcttccatatcgggtgtagccttttggctggcggcacgtgtgaaggtgctttcaccgttgcgggtagcggctccgttgaggtgcagggtgatgttcccctgccgggcttcgctccaattgcatcccacgtagatgggtatgaggtcgggaccttcgccttcggtgcgtagtggcgccaagaaatctttgtccacttccagtttccacggaccttcggcatttacttttatgaaatattcgccgtattccgaagaaaggttgtctacggcattccccccaccgtccaccaaggtaaacggagaagttgcgggaacttcctcttccacatcgggatactgcacgaacgacgtatcactgccgcatgatgtgatgccgactgataccgacaaggcaagtatgcctgccgctaagtattttttcttaatcatgacttctatgtatggggtgaagcaggaaggagtgcgcttaaacagctcctccttcttgctataggtaatcttactgttgcttttgctcttcccccggcaacttcggtggtaccgtcgctatgctttcaagatatgactgcaaatatgtttttgccgcctggtcggagatgagcagatagatgggcaccaacttcatgtcgatcattacggccgatttcggctctatgctttgttgccaagccagcagggcctcgtttttgagcgtgccgccggtggtgaggatagacacttggcttacatcgcctccgcggacgttgatcttggcttccacattcttcacggaattctttttgttatcatcgtatgcaccgtcgcccgttacgcttaccgaggtctggaacttgatatccagcgcaccgcttaccgacatggtgtccgtcactaaacttttgtccatggagatgtagtaatcgagcacgcaacccattaccgacttgctgacaaagcaaggaccgatttcatctacaaacgatttgcaatacttcttcacagtctcctcgttgacgggcgttgcagctatcgccttcttaatgttgttcgtgaagtcgtttctcagttttacgaatcccggtgccagcaatttcgcttccatttcttccgaactttctgccatggcgataatgttcataaagtcaatttcacgggtgtactgataacttttcatacgcttcacggcatactgcttagtgttgctggtgccggatgaactgttgtaggctccctttacatcagcagagaaagcgttgaagttcaagttgacagatgcagctactgacagcttgcttgacaaactttcttctgaatcggcagtagtcacttcctcttccactaccggatagatttcgtcagtgaggaacgtcacgcctgtcgaatcgcttattgccgccagattcttcatgttgaagagttggatgtgcgtgcccaagcagtaattggagtagggttgataggaatatcccgcacctttgttggaagagagcaggtctttcacatcacttgggtcaaatttgctggtctggttgacagtggttgtggttccgtctccttcggcgcgggtggaagcggcatcggcgctatatagtgtgacaccgcctgtgcgcgccgctccccagttgctacctaccaagagcttcacgcgggcaggaccttcgcccgatttccggtccaatgccaggaaaggagttgtactctccagtttccatttgccttgtgccttgatgtccaggtaatacgtaccgaaagtaccgggaaggttgtttacttctttgccactttcgttcaccaaagcgagggtcggcttgtcgaaacctgccgtaacgtcttcgtccggtgtcgcagctacaaacgtattgtcgctgcaagatgtgctgaggcacatgccggcaactaaaaggcctgctgctaaaagattgcttttcttcatactaaaacttaatttaattgattaataattatataaatatatcgatcattcatggtgccataccgttttttttccggcttcgttccggtcatttgattttgtcccaattgtttatctgcctttttatctcttccctcaccttaccggtgaacagttcggtaaacgccaccagcttcacgtcaatcagagctacattggcattaccggcaatcatgcggtcgtagctgatgctttccaaccaacctttatagtcggtttggctgatgctccccccggagttgagtatagatatcgcctgcacatcccctcccttcacgtgcacatacttgcggtagtgttccttgatctttttcatcgtctccacgtatttcccgcctgcgtccgcctcgatgatacctgccaacgacgcttccagtgccagctcgatggtgaggctctcgctcagcacggacttgtctatctccatttcgtagtcgatggagcctcctaagcaggagcgggaaacgaaacaggccccccacttcttgagaaaacgggtgactgcttgctcgtctaccctccccgatgattcattcatgtcctggagcttcttccagtccacatagaagcctgccgcaaatagttccttgtcgccggccatgacatcggcaagcacattccggtactgaatgtcgcggctgtaaatgatgcgcttggtgcggctcatggcaaactgcgtgctctttgcctcaagtttggagtagtccacgctaccggtcagccctgcctggaacaccttcaccaggtccagtccgatggaagcattggcactgatctgctgcgatatctcctcttcggtcttgcccgtcacgaattcttcttccaccatggcttcattatcgtccatcacgtagaacttcccgttaagcatctgcttgtagtccatgtgggtgatgtcgaacacctgatagagcatgcccgtgcagtagtccgcactgacatcatagctgtaacccgcccctttctcgacactcggcataccgagcagtcgcgaagccccgttctgtaccacgttgacggcaaacatcttgtcgcttcttttcaggcagacactgatggtggcataacgccgttcaggcacgggattagctcctatattgacagtgacatcggcattaccggtgccttcggccctattcacggtgagccactccgcatcgacactcactacccattcggcgttagaagcaacggaaatgctcaactcgtgcccgtccctgtctatcagatagtccgtctgctccggtgtttccaacaggagttccatctcgtctttgctgcacgatgtcagcaggcagagaattagaaagacggaggatgttatcttacttttcattcgtcaattcttttttgcaggtattccttcatgttgttacggtacacggaaccgtagttcctctcattatatatttgtacgtgcgacccgatagtggtgcggaacaggctgtagtaaagctcccgcaaggctatttccggtcgggcggtcagttcggacaacagggaataggtgaaccggttgctcagccagacactcttgtaagggatatccggtttggaggtttcccattcaccggaggctgtcatacacatgatacccggtatgccttcgcacgctttcgccacactgcctgcatagcaggtttccacaaaccacaacatcttacggtatttccgctggcggtggagggtatcgaacagttctgctgcctgccagtgactgaagttatcgacatctccccacgacaggttgccctgcatgccatggccgctccagaacacgagtacattgtcctgctcaccggatgagacaacgtgaggcaaacggtcgctacgttttccacagaagatgtccacaaggtcggcaggcgatagttcggatagcttgtagtcgatgaccgcaccttcgtaaacgtctgtaccatcggggctgatgtacactttaccgggatcgaagttcgacgggtgtccagctatgtcgtcttcttcaatcagaatgatgtgctcgtcatcgtatccccggcttttcagcagttggtagaaagccagcgcatcggcctggtgacgatagttactccatccgcgcgatgctgcgatgacgactgcccaacactccttcaaagccgggtattcgggctctttcagacccgaatcgaattcctgctccttttctttcttccagttccagcctgccagattggcattggtgcggtgcgaaccgtcggttgtgtgataatccagtactaggaagtttttacggtaaatcatccagtggcaataggtactgtgtaatacgttggtatatacgttcttgtcgaaagccagcaacccgcttgctccgttcagacaggtgtagctctggaattgaatccctaacatcttcacccaaagcagcccgggcatccatgcaccttgctggttgtcagtattctcgtcggatatcgtcatttttctcagggacgtgttcaggtcggttccaccgtttacctggaggtcgtaaacacccatcagtgtcaaaaaagcggcatcgtacaggtaggcttcccaggtaggtgcttcgccgaagcgtactttataggcgatgtcgaagcctgtctccgggtcggcacatgtacccaccccctctatctcctctgccaaatcaccgcacgactcaatgacggaagtctggaaggcattgtccgaaaaaagcaggcgcgtagcactctccttgtcatgttgttcaagcatctttcttacgtccgcaggcttgcccggcacgcagataagagcttcaggtgaagtgctcaaggcttcgcacatggctgcttccggttgccctatagtgtatttcaatactttgtctacgctcacgcccaactcgttggcctggaatgcaaaccaatcaatgaatgtttgcccatagatatcatcggaagcgatgagggatatacgacgacagccctcttccaaggcaatgctgagcaaagtttcacattgggagatatcggtctccaccagtgaccataagaagccctcctgtgcatacaaccgtaccaggtcagcggaagaagcggtaggggcgataagcggcttatgggacacagcacattcacgggctatgatttccacattctgtgaggcgtaagggccgataatagcatacaagtcttcgcggtaggcaagcctcatagcaagttgttccatatcttctgtatcctcattgtaccactctacgtccagttgtacgcaattctcgtcaccaaccgtcaactcgtagatggtctcctgagcccatgccacggtgcgttcgcacttttctttggcggaggtgtccgaaagaggcatgatgaccgccactttgtataggtttaccttcgaaggagcgggggacggtatggcagcctcttcatctgtcgacgatgaacaaccggagagcaggctgaacaggcaacacagccagaggagtgtttttgaatatataaggtggatatcagggtagtttctcttcatatatctgttctttttcattaacgattggacggtagtattccacaaggtctttatagctggattggtattcgtcaacaagggcaatatcagcgtgcccgctacctatgccgtaggtggtatgcagagcgggcaactccttttgttcgttccatgcggtgaggtattccgcaacagcccgatcgatatgtttcaccgtcgagaacacgatatgtgcggagtatgctgagaggttgacgtccataccagcagtatagaacttgtcagggttttcgcgcgaatagcgatataccccctgattggagccaccggctataggatatatgaaacgatgggtctcggtcagactgtcggtcagctcgtatgctcgggcctgcatggaatagccttcatggttgtcggagatgtagcaagtggatacggaagtccccccgttgtcgataaatccttcgctgaatcctgttatgctccgctgtatggacagatcttgcgcgttggcagcgaggacggcggcctgatatgaaaagagggaggcaatggaacctgctatataagatgcgccatacatgttgatgagaaaggtatgtatgggcagatcggtgccatttgtttcgaacaggagcacgtcgtctccaaatccatcacgcagtttcttgccttgcaaccattgccgggtggcctcttcgtattcgttacctgctatgatggcaaggcactctccttttttcgcagagtttatgccgtcaagagccaaattgagcatcagtatgccttcttccatatctataggggcgtagagcatcgtatagaacccggctttcttctgtgcttcaagaataccggccagtacgaggtcgttataggcatggtctcccaatgcgttaacgggaaaaataacatacacgaacttgtcgggggattccggtgagacttccggaatctcctcttctattttgtctttatcatcgcagcctactgtcataagcaggaagcctcctgccagcaagaagtatattaaataaataagaccggatttgagtatagcctttgaacttgttttcaccacccttgtcactgataaatgttgtctgcaaatgtaataacattttatatggaggatggtgacgtttgaaatgcactactgacatttggtcaaaaagtgggcgacaattagtccgtaggaggctccaagggctgctttccctgtatatgcctcttatattcggagggtgtcatatcgtatgctgccttgaacaggcgctggaagtggcgggtgtttgaaaagcccgatacctcggcaatggcctgtatggtataattgggatgttgcttcaattctgtcaaggcatgtttcaatctcaaatctgtgagatattgcgagaaggtcatgttggtgttctcctgtagcatttgggcaaagcggtttttgtcaacagagagccgtgctaacatatcttgccttactagttcgggcatcagataaagtttttcatctttgataatacgttccatttttctgaacaaatctttattgatggaatcttccctttcttgttcttctgctaccgatattttactttcgtctatttgcctatgcagtttttccaattcctcttcatacgacatcaggctgtccaatttgcctgctataagttggtttttctttttgatggtatttatatggcgtacggcaagccacaataaaaccaaagccaatgcgaaggcgcaccccaacaaggtctgaatgatgaaagagttgcgcaactgttcgtctttctgacgaatgtgccattctttttcttgcagtttatagatagtggccagttctgccacttcatttttccagttacgggcgttcaggctgtcttctattacctgcattctttgttggtattggagaactttctgaaagtcgttcattcccctgtgtgcttccgacaagttactcaatattccgatgaattcctggcttatcgtatctgctgtcagttcggttaggtctgttttttggtaataatctataatttgtttatactgcttcattgccagtcggtaggctgtgatgtctatgtgagcagctttatgctttgagtatcgagtcgcagagaatttctcaaaatgcgttgaggccttttgtagtattcccaattgggcatagagataggcttgcttgatatacaggtagcttagctgttggtctatgtaaccttgtggaatacctttttgttttttcatttggttgataagatcttcccgtttgttagagatggcaatagcttcattatatttttgttctccggccagatagttggtcaattgtccgtagaaataagagagggtaggtttcatacggaattccttttcattttccagtagctggatggcttgttcgaaacaatcgtatgcttcttgtctttggtttaatgcataatagttttctcccattgtaaacaagaaatcggcctcggtttgtttatgtccgatttctcgagaaaattggatgccttccgttaagtaatggatactttgttcgtagtttgccaatcgttggtatgcagcggctatgcatgacatggtttgcaggtaatacagtcgttctctacgcaatgcagtatcctgaagggccttcaaggcgtaattcacactcatttgtggctgccttttttgtgaatatgacaaacttcgttgggcatttatcaggcatggtttttccagttttctgttttccattacatccagcaacttcaaggcgctgtccggaacagcaacgtgtattttcatgacgtgtttcagtgtgtggatggaatccggagcagtattggccttcattccggtcggtacaaatataaatagtatacctatgatcgataattgtaaaaagacatttgtcattgtgaatgatattatatcggattgtttataaaaatcaggtgtgaattgttgctccgtccagcagtttcatatgcgcgttacactatcggatgtcgttcttccacgtgagaagagctcaaacgggaaaaacgcgctttgatttcgtaagagatatgttttttgtatttctgcaaacaattcctaattactgtaactctcgttgggcttattcaaatcaaacatcgggctgaggtaccggacattattacctttacggccgattaccataccctgcaactcaatataattctgccggtagtctgccgctttttctttgtcgcgactaagagaagggatcgcaatcagagacttgaggactccggttgcttcagaaaccattgtaggtatatcgtaagtcatatctttctcaaataaattatcaaaatgcaaatttatgaataaatcttaatatatgcttaatttacatttggcaagtttgtaatttacgggtgatattacaaccacccttcttcatgaattcaatatttaggattgttttttcgctataaaaccacaattttaaaaaatgtgtgtaacaaggtctaaagaaaaagttaaggaaatacgcgtctgcgcgcatgtatgcgagtgatgaatgaatctctcaacacaaaaaaaatagggaaacctcccggcctccctattcgtattgttaactttaatattaaatgcagagtatatctccatttaatgcctttatgccttagcggatggttttcaaacctttcatctccgctttatcagcctctttgatactgatggcaacgccaccactggcggctaatttctgtttcagtacactcttaggtgtcactactaccttacgtatacgatagctttggggattggtgtcccaatctgcatccttgccatcttcgtaaatggtagcgatatattgttttccttccggaagccaagagaaaggaatcgtcgccgtacgactattctcatcagtaatgccgccaacaaaccattcgtttttacctttcgccttgcgggctacggtgatataatctcccggttcagcttccaggtaccagctattgtcccaatctaccgcaacgtcttcaatgaatcggaaggcatccgggaaacgggcgtaattggaaggcaagtcggctaccatctggataggagaaggcatggtcatgtagagtgccatttgcttcaccaaagtggtatgcacacgttcgttgggtttctcaccgttgtaataagacagtcttgtctcgaaaatacccggggtatagtccatcggaccacctttcaggcgggtaaaaggcagaatacaggtatgatcgggatcattgccacccattgtttcgaactctccgccacgggcagattcctgagccagccagttagggtaagtacgacacaaaccggtggggcgtactgcctcgtggctattaaccattactttataatcagcagcgcgacgggctacatggatgtaatggttgttcatccattgggaagagtggtattcattacgggggatgatataacctacgtaaccggttttcactgcatgataaccattgtctaccatgaactggaaggcctcatccaattggcgttcgtagtcggcagcattggcggctgtttcgtgatgcatcaccatttgcacgcctttttctttggcgtaacgttgcagctctttaacgtcgaagtcgggataggctttgttgaaaaggaactgacggtctttccggtaagaagcccagtcttcccaaccttcgttccagccttctaccagtattccgtcgatgccatgggcggaggcgaaatcgatatattccttcacatgggcggtattggcggggtgatgaccattgggttccagtttggcataatccgtaatgccgggcttggcctggtaaaaatcactatatgcccaggtctttccttcacctgtgaacatttcccaccacacgccgacgaatttcatcggacgaatccaagaggtatcttcatattggcaaggttcgttcagattataaatcaattgagaagcaagaatgtcacgggcatcatcgctaacaataacggtacgccagggagacagcacgggcagttgcaagtaacctttcttacctaatttatcgggagtcaggtgggcactcagtttaaactgcttatcatctacatttagcaacataccggcataatccactaaagcggcttcatggatattcaggtagatgccatcttcgcttttcatcattaacggggtttgcactgtcaggccgccttcggctttagattcataagatttcttggcaattcttttctccatatccactgctatttccgatagaggggcggtggtataggcaaactcattggtatcatagtcgccgggaatgcagaaagctttatgatttcccgtgagattgaattcggttacttcatcttttacggtgaggtagttcatcttgcgttgcaaaggcagttcgtaacgaaagcccagaccatcattgaacagacggaaacggatatttaggatacgtcccgtttccggttgttctaaggtgacggtcatttcgttataatgattccgtacccggttgtactcaccccaaacgggattccagtagttatcaacagaagcacgttcaaggtttgtttgtttgaatcctcgggtcaggtcggcttcttccgtcaggagacctaaacgaccggaagttaaaacgggtttgcctttatagtccagccggtatgccggaacgccgtctgcctgctccataaactccaatgacaggttaccgtcaggagaagtgagttgctgggccgaggcgaacgaaccgaggcaaaggaaaaaggcaatgaaaagagaatgtttcatattctattatggttttagtatgatacttttaaacactaatatcatctcatcaatacttaaagattcgatactgataagggcacaggctcagttctgcttccagcttctcttctgttccactatacatatctttacttggatgtccgttccactcttgcggaagcgtcacatttacttcacgattacgtacatttacagcaaccaacacacgatctttaccatcctgtttctcaaatagtagcacatcgggttgcgggtatgttgtcaatccccctttacggatagccggatactcgttgtaaagagccatcagacggcagtattcctgatacagttcactgttccccgtccaatccaccggaacatacgtaaagaagttgatagcttcgggataacccgcttcttgtgaaccataaatcaacgctcctccatgcagataagtagtcagcacgaaagctgccatagagccgcgcatatctccgaattctttaataggcgacatctttgccgactcatcatgattggtggtaaaacgcagtttcacttttcctacggggatagtgtcatactccgctttatccgtagcaaacagttcctgtgccggagcatcttttacgaatacatcgcgaagtgactccagaaagtcccaggaataattcatatcgaaacctgcatcaaagtggtcgcgtcttttcccttcagccagcatcagcaacgaacgctcggggatggcacgcaaagaatcgagcgcctgtttccagaagtcgaaaggaacaaagtccgccgcatcgcaacggaagccatcaatgccgatttcagtaacccaaaacttcatggcttcaatcattgccaggcgcatctcctgattatcaaagtttaagtcagccacatccttccaaccggttccggcaggaaagattatgtttccggcctcatcctgcgtataccattctttgttggcaatccaagcattgtcccaggaagtatgattggctacccagtcgataatcacattcatccccttctgatggcaagtggcaaccaaggccttaaactcatccagtgtaccgaactccggattcactcctttgtagtccttcacacaatagggggaattcactgatttctcctgccccacttcattgatcggcataaaccacactacgttgattcccaatgcctgaatggaatctaagcgacgttccaccgccttgaatgacttctcaggagcaaacactcgcggattgacctgatacatcaccacatcttccacagcaggcaatgccgcaatttccaccgcagcttcgccctgccgcttacctgtacaggcagcaagcagacacagcagacttacaataaatatatatttcttcatattatccttctattttccagatgtaatattgatagggctccaacgtaatcgtccttggcaacacggtgctttcgccggtccagagattcttcgcactatcccctacccgttccataggcagattcaatctttcctgattgccactggtatttatcagtaccagtatcttttccgtactggaaatacgataagaacatatcgctttactcgtctgataaagtttgatctctccattctgtaaagcaggagagttgcgatacaactgcatcagtttggtataatccgcctgataatcggcattagagttccagtccatcgcctgatagccaaagaaagagagagccttgtcataagccagttcctgcgaactataaatcattgggcagccacccatagaaatagaggccacaaaggctgagaaagcaccttccttggtttgataagcctgcacgggcgatttctcggaagccatatcatggttggtggaataacgcataagtaaccgtttatctgttaccgaagcaagctcactacgatgtgtatcatacaaattagccacagaagcgcttcctgcatatacatcctgtagtttataagcgaagttccaggcatacagcatatcaaaacctgcatcgtagagtgcggtttgtgaaccttcggccagcatcagcaaggtacttttggcggcacgaagcttcgtgatagtttccttccaaaagtcattgggcacaccttcggcatggtcgcaacggaatccgtctatgtcagcttcggtcagccagtaaagcatagcctcctgcatggcggcacgcatggcagtgttgtcataattcaaatcagccacatcgtcccaacccattcccgggggagaaacaatattgccgttggcgtcctgcgtataccagtccttatgttccgtagtccaggtatgatcccaggcggtatggttagctacccagtccaggattaccaacataccttcggcatgggccttcgtaactaatgctttcaaatcggacagtgttccataggcaggattaatagcccgatagtctttcacacaatacggagaaccgacagcattcttttcaccttgctggaaaatgggcatgagccaaagaacattggcttccagctttttgatacgcggcagttgggcagtcagtccattcagtgcttgcgtttcaccgaagagtgccggattggcttcataaatcaccattccgtctgtagtaacgtcatctgcgggaggcggcatgtcaggatcatcatccgaactgcatccggtaaagctcaacagcaaaaggctggagcacaaaatcttaaggatatcctttattctcatatctatttaattaattgagatagtataagttataatttcaaataatctgtttcaagcaatgaaactaagagtttctcggtgtgaaacagagagtttcaagtaatgaaactacttgttccaaggcatgaaacaaacggtttcccatcttgaaactcaaagcatcttagggcttgggcagtttttcataagaagtagctgtgatagagaagtagatatctcctatcaatgctgtatacagcccgccatcttctatttgctgtccgcctccattgttattgaaaatcagattcgaatacttacccacgtgctccgataaatcaaagtacttataagtaacaccattgatctccctcgttccggttacttgtatgcccggccaactgtcgccaattgcagcgtcgccccagccatagagagtcaaagcttcccaaccggagttatcctgtacatacacggtgcaatcttttatttcactacaacccgcttccgagatgcggagatagtaatcgcgatctatcgtcagattatagtctttcaactgatttccaacgccgttatcattgaatatcagattgatattcttatttgtgcaagccggtgtcaaatggaagcacttatacgttgtaccgttgatttccttcgtttctgaaacctgtatgccgggccagctgctaccaatagccgcttctccatagccatacagcgccaacgcattccaaccggtattatcctccacataaagggaatagcttgtaccgtgtgttgcaggatctatctcctcacacttctcaggagttatgctgaaatagaaatcgcggctgaaagtgatgttctttacgaaagacagcacgagtcccggatcgtcttcctttttgttattattaaatgtcagcttcagactctgattcatcaattccacatcggtttcaaagtatttataaactactccgttgatttccttcgttccggcaggttcgagtcccggccagtcttcattgttatcacctgccccggagatgtaaagtgccaaatctccccaaccggactggtcatccacatagatgcaataacttgcttccggatctatctcttcaaagcctttatcggtaatgcggaagtagaagtttctgttgagtgtcaccaccggaccgtcaaactgctttccatcattattattgaaaattagattcacaccttcataaccatccagagctttccccatatcgaagtatttataagtaatcccattgatcacttccgtacctttcaccgcaatacccggccaagctggtgttacatcaccggcaccggcccaaccgtacaagtaaagattatcccaaccggacttatcagccacataaaccacaaagccatcatgtccttcttcttccgtattaaagtaagcctcccagcggtctacccatacattggtacgggttcccacctttacatccaactgatgcaccacagcttcattcttcaccgaacgttcctcacctttcgaggccgatacgaagtaaaaaccgtctgccagtgtctttccatctttgaaagtagaaggtagcagatagattccccacttggattcactaccggtagctttctccaactgccattccagattacctacagcagcttcggctcctccgttgaagtcgcccacaatgtagtattcgtcatcggcagcactgcctttcggcatgatgacttccagcaatatagcgttcgccttgatttcgaactgaggcagttcatcatcgaatataatcgtatctgtatcgtcgcacccgttgagcagagcaaacaacggcaacataaacagccaataaattatctttttcatggattttctgtttttgagttatttataattcgggttctgtatcagtccttgattgacaagcaatgcagaagcaggcaacggataccactcatatttacgatcacgcttggcgggataaagttgaccattgtccgtggcacgtccgaagaaccaccactggccttgcgtgaatttgtcgaaacgacgcaggtctgtacggcggcggcgaccttcattcaggaattcaacaccccactgactcaacatccagtccatatcgaaagcagtgaagccacggcccggtttgtctttcacgtctgcccagtcgccggcactgaagtaacgtttacgtacttcgttcaccagttctttggccttgttggcttgtccggcacgcatttcacactcagccagcatatagtacacttcgctcaggcggaattccacttcatcgatgttctgaaagtcgatggctgcggaagtaggatataccggatacttcaccagacggaggccggagttcgtctcaccccaacgcggtgacatgacggtttccaggttgcgtccgaggttcataaacgtacctacctggtctacatacgccaagtcttgtccgtcacggtcggcatcggctttcaaggcttcacccttaccatagttagcttttatggtacctttcaggaagataccgctgtagccgttcttcttatcataattatagttctttttacggatgtcgcggtcgtcgaagcgttcatagactgcacccagtttatcaccgtaagccgcatcgaggaagcaggtagctccctgtgtacctcccaattcattcaccgttcccgcattgtcatacgaaggaaccagacaagtacagttccaaccactctgactgtaagtgcctccgaaataatcccagatattataaggatagaaagtcatgcgcatccatcccatattcagtttaccgtcttcgcaggcaaaagccatgatgacttcgggacattccgtattattgatagagtaaatatcgcggtaatcctttgccaattcatattttccatatttaccgctgattatttcacggcacagttcggcacattcggtatagtggctttctttgatgaacacttcggcattcagcaacagacgggccttgatcatacggttcacagccttgttcatgcggttcacctgattttcgaccattccttcgtagcaatcatccagctcggtagcaatgaagttataaatcttcttgcaacttgtatcgaagtccgggtcggcagtgggtggcaattcaccgtctacggtggccggttcaatattcagcggcaatgcaccaccccagatttcaaagatattgtaataagcccaggcacgaagtgtacgtacttcgccttcataagctttcagtttctcatcagtcatcttcaggtcggcagaagttagcttccccatatcagccaataaggtgttacacaggccgatagtggtccatgcattctcccaggcactacggataatcttggcatcgggagtccaattctgaatggagaagataaacttttcaccttcatcatatccccactgaccgccattccatacacgccaggtcacttgatcggcaggaaattcctgcatgtaccagaagtattcggcataactggtagcacctgtggaataaatagtagctaccgcactcttcacactattctcgtcctgataatagacgccggagtctacacggtcgaacacttcttccgtaaggtcaaagcaaccgctcaatgaacaacccagaatgattgccaacagacatttatatttcagatatttcataattcttttctgtatttagttattaaaggagttgacaaggcttcaggcgacaagttgacaaggggaaatgactctcttactaaacgaaactattatcctcgttcccttgttaactgcaaccttgttaactatatctatttgaaacggatattcaagcctacgctcaactgagtagccgaaggataggcactgttcgtatctacacccggagtcagtccgttgatggcaacagctgaaggatcgttaccggaataaccggtcagcgtaaacagattcttagctgtcagataaactctcatacctttgatgaacttgttttctttcggggtgatggtatatcccagagtcaggttatccagcttaaagtaatcacccttttcaagaaagaaagaagagattacaccgccaccggttgtaatatccgcatcttttccataagcatcgcgcagcacattgtccgtaccgcaacctttcagacccattccgtaacgacgcatattgaagatttcaaaaccgaaagcaccgttgaacatcaggctcaggtcgaagttcttataacggagcgtattactccaggaaagataagaggtcggcgtaccattaccgatatggcgtttgtacttcacatctgccttggatacaggaactttttcgccttcatcggtataaatcatcatatcgccattctctacaccggcatactcgtagccatagaactggccgatcttgctgccttcttccacgcggaagaagtattcgctcgtacctacacccggtttctgatacagttccacataagaagctttgtacaggctgttggagagtttatccagtttcgtagtgccgtaagagtagttgatacccgttgtccattctacgggagttcctttgaaagcgtcgccttccagagaaacttcgataccacgattcacagtggttcctacgtttaccagaattgtagagtagatgtagggaggctgtggagccgtatagttataaagcaagtcgcgtgactggcggtcgaaccattcaacagaaccgcgcaatctgttccataaggcaaagtcaacaccgatattcatactgacactcttttcccagcccagtttggaattggcattcactgaaggagcataacctgttacccaggcaccgtccatcagataggtatccgtaacattcaactgggcatttttatgagagccgtaagtggctaatgactggtagcaatcgaagtccgaacgacctgttacaccataggaaacacggggtttcaaactctgaacgatgttttggtggtctttcaggaaacccatattcgccatttcccaggcaagagaaagagatgggaaagcaccccatttatgatctgcaccgaatttcgtagagccttcgtagcggatggaagcggaagcaatcaacagattcttccaattatagttgatacgtccgaagacaccgatcagtttggcaagagatttaccagtacccatgcttgcttttcctttggcaagataagaaccgcttccaaggttattccagagaatatcatcgaaattgaaatcactgtttccggcttgcaggcgttcccaggtggtttgctcatagttataaccgaccattgccttgaagttgtgatcacccagatccaacgagtagttacccaaccactccaggcgggacgtgtaccacttctggtaagtcacttctgcacgtccgttataaccgttccagtaggattcaccggcagtggaaggggtataatagtgctgtttcagatcgttatagtgcaaagagtagctcaatgaagtattcagcatttgcctttccgaacggatcaggttgacttttacctcagcagtacccagcaggtaaacacgctggccgttattgtcgatttctttcagttcctgcaccgggttgcgtgctccggtaggagaagtaggctggaagtaagttccgtcctcgttatacaaaggcatggtagggttcatgctcagggcagtatcgaacataccgtcgttaccccatacttcattcacgcgacgggcgttgagtgaaccgttcagttctacgattccatccatcatacgctggtttaggacgaagcgtccaccgaattcttcacggctactgttcagatcgaggccggttgctttcttataattaaaagaagcgccgtagtatccgttcttggtactgccgtcgatagaaagatattggttgttatcataagagaaatcacgcagcaagaggtcataccaatcagtagaatacccataatccgttgcacgacgggaacgacggaattcgtctgcactcaaaatatccggaccgctctttgccagattcacaccgaaccagctgtcgtaagtcacttgggcacgtccggcttctccggctcccttacgtgtagtaatcagaatcacaccattggcaccgcgtgttccgtagatggcagcggaagcggcatctttcagtacggtcatcgactcaatgtcctgtgctgccaggttgcggatatcgccacctgccacaccatcaattaccaccaacgggtcattggatgccgaaatagatgttgcaccacgaatctgaagagaggaacttgcattcggattggctgccgccgtattgtttacggtcaaaccggcaactttaccggtcagcatctccatcggattgttcatggaaccttgcaggaacttcgatctgtctacctgcacaatggaactggaaagttctttcttgctcaatgagccgtagcccaccacaacgacttcatccagtgcctgagcgtcttctgacagcactacattgatttcctgacgtccactacaggggatctcttgtgttttgtagccaataaaggagaaaacaaggacggaagaaggcttcacgcccgacaaagtgtaattaccgtcaatatcggtaatgataccattagttgtacctttcacggttacgttagcaccaattacagtttcgcccgtggtatccgttacttttcctttcacggttaaatcctgggcaaaggatgccactgcaaaaagtaatccggccataagaagaagagaccggcacaaacataactttgttctttttacattcatactattagtttttagattagcaatcattctgttcacctccacaggttgaggcgacagtgcaaatgtctgtaaaaagaagggggaaagaaaagaggactaaagaaaatctagattagtaaaaggagtaaaatattatatatcagcgagataaaacaaataaagggcgttaaaaaactaaatgaaaacaaagaaagcagaatagaaaaaacgggattttgggttatttcggagggggtatgaattaattcaccacagattaacacagatttccacagaattttatttctctgattttaattgattaaactctgtgagaatctgtgttaatctgtggtgggcaaattcattactataccatatagctcactaaccagcaaaagacccaatcttcatcacctcttcctcaaaattatcacggcaaagagaacgattcttcaatttggaacgataggtataaatagtagtaatggaataacgcaggaagcctgcaatcttggcactgtccgtaattcccaaacgaattaaggcaaatatacgaagttccgttgtcagccgttcatcctgtttaggaataattctttcttcttccggcaacaactcattaaagcgtttcacaaaatcagggaaaatactaaggaatgaattatcgaagttttgatagaattctttcagttcttcatcgatgaaacgggacgatttcaacgttttatagagttcttccaccttccccgaaactgcctgtttgttaagcatccgacggtatccctccaacttgtcaatgtatgtggaacacaatcccataaatcggccgacatactcctccttaatatgattagcctccgtcagtgagtcattcgtttcgtgctgtctctgatttacttcgatcaatctttcattcagaagtttcagctcttcattcattgccagcaaatcctgtcgcgcacgggccaacttcttcacctgacgaattacataccagaccgcacatgccagaaacagcgtcagcaaactggtaacaaccaggaaaatctgtaacacctgctgatgcttctgtttctccacctgataggcatggtctatgaccggaagcatccttgaagcctgcacattccggagacgggcattgtagaaattggcatcttccatgctgcgcttcatataaacatccgcccgttgtaattgcccctcttcatataacagttccgccaatgcacgcaaggaattattttctttcaccacaccacgaatatcggcaattgcactctttatcaaatattctttttgcttttcccgctgtcccgtactctgatagataaaagcaagaatagaggtcaccactgcataatcccgtgtatccggtgaaagtttttgatgataaacttccaacatttcaatggcttcctctcctcttccttgttgcagaagttcgggagtataagctatgacatactgataagccccctcttctaccatctgcaatacagagtcgcggtagatatacaggttattcagatattcaatctgatattcgtcatccatcgcatactctgcatgatagagataaatatcttcaaaagtgatgtaatattcaatgagttggtctctggaaagttgcttgctatctatagacttcaacaaggccacgccttctgcatacagacctgtctttcccaagatacttgccttcttcagtttggcctcattcagccactcttgattgttgtgctgaagggcaatctcgatattgcgattgatataatgtcttgctgaatcgcaaatatacgcttcatattcatcaaaaagttgttgattgatatggtactcatcagatggagaagtacttttacgagtccggaaatattctttaatctgatcaatgcgtttcagtctggcctgctcatattgagcggtgttttcaattgtcctgtccagaactaccagtaaagaatctattttctcctgcgcttgcagaaggcaacagaacagcaaagagattacaaaaagcaggtaccggtctttcatgcttacaaacgtttacgaacaggacaaagatataaaatcctactataataaccatcttaccagttcgtttttaataaatcgtctcagctttgaagagcatatatacataaaagggacgctgcatctcgcggcgtcccatctatcttagttagtttttataagaatttgagagaattgaaacttcacagcctcaatttgttgttttaataaagcacactaactatatttatgtttaaagcaaatgaaaatgttattcttaaaagcaaatgaaaacgttacttcttcagttccaccttcctgtctacccgttgcagactatccagaatctgttgttcatgggtaatcgtcacgtctcccgagagagctaccgaaggtgtggtaatttgtttgcctatcgtatcggctgcggctacttcttttatatcactatagaatgaatgttgcatcacattccctaatgaaagtaccactgccactactgcggcggccttgaacagcggaatgaaacgtgcggtaagcgtcaagcgttttgccttcaccaccggagtctccacttctgcaagcacacgggcatcgaaatctgctcccaaccccacttcttgttgcagttgctgatatacgaacaaatctttgtagcgaagcaaatgctccggaacgtcgcttccgttaaagaaagcacgcaactgtgcttcttcctcaagggaagtctcacactgccagtagcgttctaaaagttgttctatatatttacagtccataaccatctatatctaaataccgttgttttactttttgcctcgccctgaagaggttcacttttacctgttcctccgtcaaatgcaggacgaccgcaatttctttataactcttaccctctatatcccgaagctgcataatcagcctttgtttatcggggagttcattgaccagacgatggatgagtgtcatttgctctttatccaccaagtgatcgtaagggttggatgctccggaagtctgttccatttcaggtgtcagttccacggtctgagcatcttttctttcgctacggtctattgccagattctttgccactgtcaggcaataagcctcgatagaaccgaatttcgtccactcatcacgtttgttccagactcttatcagtgtttcctgcacaacgtcttctgcctctgctctgtcgaaagtaatccggagagccaaccgaaagagtttgtctttcagagggagaatgtcattccgaaaactgatttcttgcatctctattaataatgacggttaagtatatggaaagttacagttgatcactactttttttgaattattttttgatgcgggttccgctattctcgttaattgctgacgctaaggtaattaccacttcagttactcccgcattcaaagcttcaaaagaattctccagcttgggtatcatacctccttgaataacaccgtccgctacatattgtttgaattcggcaggagtgatctgaggtatcacgctatcgtcatcgttctcgtcacgaagcacacccttcttctcaaaacagaataccaatgtcacatcgaacaaagcagcaagggcttttgcagtctctcctgcaatagtatcggcatttgtattcagcagattgcctgcaccgtcgtgcgtcagcggagccattacgggaactactcctttatggatcaaatcacccaaaaactctgcattcacttgctttacatcacccacaaagccatagtcgacgtcttttaccgggcgtttcacggaacggattacatccatatccgcaccagtcaatcccagtgcattgacaccacgcgcctgaagtccggctacaatattcttgtttaccagcccgccgtacaccatcgtcactactttcagcgtttcggcatccgtgatacgacgcccgtttaccatctgactttcaatgcccagttgggcagccaattttgtggccgaacggccacctccgtgtaccaagactttgtagccctcaatagctgcaaagtcatccaacaacttatggagggtagcttcttcctccacgattttgccacccacctttattactgttagtttttctctcataattcagttgacaagttttttagttaacaagttgacaaggggagaagacaaaatgaacaaagcaataaagcgcagctccttgtcaacttgttcccttctcaactcgtcaacttttcttattccaaataggtatatccgtacagaccggaacgataattggaaaggaactctttaccttcttccaacgaaatacgtccctcttttactgattgagtcacccaagtctccagtgtacgcaccagcttcttagggctatattgaacatagtcaagcacttccgctacagtttcaccatcaatcacctgttcgatggtatatcccttctcgttaacagatacatgcacagcattcgtatcgccgaaaagattatgcatatcacccaaaatctcctgataagcacctaccaggaacacacccatataataaggttccttactctttaaagaatgagtgggcagatagtgtgccacattcttagtcgagataaagttagctatctttccatccgagtcacaagtgatgtcctgcaaggttgccgcacggtcgggacgttcatccaggcgctgaatgggcataatcgggaatatctggtcgatagcccaggagtccggcagggactggaacagcgagaagttacagaaatatttatccgccaacagtttcggcaatccgcgaagttcatcgggagcatgcttcaagccgcctgcaatctggttcacctcacgcataacagaccagtaaagacgctcaatctgtgcacgtgttttcaaatccacaattccatgactgaacaagtcgagcgcttcttcacgaatttgctgtgcatcgtgccaggcttccagcatcttattttgattcaatgtatcccaaatgccataaagttcctgcaccaattcatggtcttcctcggttacttcttcatcatcgtcccattcgggcaaagtggtggtttccaagacttcaaaaataagtacggaatgatgggcagtcagtgcacgtccgctttccgtaataatattgggatggggaataccattcttatcactggcatctaccaaagtggaaatagagtcattcacatattcctgaatggaataattgacgctactttcgctactggacgaacgtgttccatcgtaatctacgcccaagccaccaccaatatccacgaattcgactttgaatcccatagcatgaagctgcacatagaattgagatgcttcgcgcaatgccgtcttaatacgacggatctttgtcacctggcttccgatatgaaaatgtatcaatttcagacaatcttttagtccttttgagtctaaaaagtcgagtgcttcgagcaattcactggaactgagtccaaacttgcttgcatcgccgcctgaatcttcccatttgccacttcctgaagaagccagtttgatacgaataccaatattaggcataacattcagctgcttcgccatcttggcaataagttttagctcgttcattttttctactacaagaaaaatgcgtttacccatcttctgggcaagcaaagccaactctatatagctctcatccttatagccgttgcagataatcaacgagtcagaatctgagttaatagcaatcacggcatgaagttcaggcttcgacccggcttccaacccaagattgaatttctttccatggctgataatctcctctaccacagggcgcatctgattaaccttgataggatagatgataaagttctgcgctttatagccgtactcctcagcagcctgcctaaaacatgaagaagtcttctcaatccggttgtccagaatatcgggaaaacgtatcagcataggagccgccacgtctcgcaattgcaattcatccaccaattctttcaaatcgacgccgacaccgtttttacgaggtgttaccactacatgacctttgtcattgataccaaagtacgaagtgccccaacctgtaatgttgtaaagctcttctgaatcttcaatacgccattttctcattttttgtaactcagatgtttgttgtttgattttaatagggcgacaaaaatacgataattctcgatatttattgcgttttccacctaaaattacacatttacaagcggttaaatgctcagcaagttacgtaactgctgcacagaatccgcaatttgccgacggctttccaactgcccggcatcgaaacggtatcttgccttaccatagtgcggtgcacgtttttccaaggcttctataatgaaaatccgcagttcttcgtccgtttttccttgcagaataggacgttgctgcgtagccactcgcaagcggcggaacaaaacgtcaggatgaacatccagaaaaacggtctgcccatgctcgttcatatactccatgttatcgaaaaagcaaggagtaccgcctccggtcgagataatgacgttttcaaactcagccacttcatgcagcatggttcgctccagttcacgaaaagaggcctctccccgctcaatgaacaattcacgtatggatttgtgaagacgttcttcgatataccagtccagatcgatgaacggtatattcaattcgcgggcaaaagcctttcctaaagttgttttaccggctcccatgtagccggttaagaaaatacgtatcataagcgcttacctttgtacgcaaaggtaagcaattctattctgagagatttactatcagataaaaattttaatgcgttcgctcaaatcatcaaattccttcccgcccggttcggccacaggagtaccgaaaggcatctgtgcaatcaactgccaggtttcgggaagatgccacgtgctgcgtacatcttcgtcaatcaacgggttatagtgttgcagcgaagcgcccagacctttatcttcgagcatggtccagatggccagctgatgcatggcagaagtatgttgcgaccacgtcgggaaattctcatgataagtagggaattgtttttgcagtccttctacaatggaacggtcttcaaaaaagagtatcgtgccatatccgcaagagaacgaagtatcgatcttcttctccgactggcgatattgttcttcggacaggcgttcttccaactggtccttcactattctccataatttctgatgttcgtcccccagtaacaacacaatacgtgtagtctgcgagttgaatgccgaaggcacatgctttactgctgtacggatgatgtgtacaatttcctcgtcctgaaccggagagtcgttactgatagaataatagctgcgccgatgctccaatgcttcggcaaatgtccgttctctgaccatatttaatcctttcttttcgtaattatcatttttgtcttatatagtgaaacaaacaaaaagagtaagttgttcaaaaacagcctacaaatcaaagcacttcacctttgagataggattgatacagataatcaggattttcaaagtacaaactactattaaaatcctctattttacgagaaagccatgaattatatacttcaataagagtttcaataggccttttatcctgcttattacacaactcaattatcaaccgtttatagactttccctatatcccaataggtaggaagtgcatatttagcgtctgcaatattatcaaaaactccaagttcgatcaagcaactatcaataagttcatcagctaccttatcaatattttcactatgatagacatcggccaactcataaatatgttgtagcttctcctttcctattgcgtttactaccacattgcgatgatttttggtctttctggctatatattcaatcagactacaaacaaaaaacaaatcattatactctttcttttctcttcctgtcatattttaacctcctcacttttgataaaagtcaaacatttcaacgcttccggagtacaaaagtttatttggtgtgtagggcgtttaaatttcgctaatacccaaaattgctctcgtgtaaggacaccactaataaaatctgaaatataattatatatctgatcattcgccatggcgccaactacgatatcgtaatcatgttgtactccattacggcaatctacgataaagtcgagccattcttctgtcatttctgcaaaatacaaaacattcaatgcctgattcatatcgaaactataaatattgactatgggtgaatcataacgccttgcccagcgaatagcttgatctcttaattctgtacaataaaaccctaccccaaagtctttagcatattttccttttatgatttcaggagtttttattgagcaatatcctccatgatatatttccatattctaaaaaatagtattgtttatacagcgaaagataaggataatctcactttcgacaaaacaattactcccttttcttattcttacctgtaaataaaacaagctacgccttaaccataaaaataaacagtatattttggtacacctcctagtttgcattacctttgcacccaattatgagtaaagagaagttttacgttgtatggtcaggcgtcaatccggggatttatacttcctggacagactgtcagttacaaaccaaaggttacgaaggagcgaaatataaatcgttcgagacgcgcgaagaagcggaaaaagcctttgaatcttctccgtatgaatatatcaaacgatcctctccgggtgctcccgcccaaaagaaagatgtgaatgctccccttccttcatctgtcgtagagaatagccttgccgtagacgctgcctgtagtggtaatcccggagctatggaatatcgcggtgtacacgtagtcagccgacaagaaatattccatttcggcccggtatatggtacgaataatatcggcgagttccttgctatcgtccacggacttgccctactgaaacagaaaggcttcgatatgcccatctatagtgacagtgtgaatgccatcagttggatcaagcagaagaaatgcaaaacaaagctaccccgtgaacccaaaacagaagaacttttcaaactaatagagcgtgccgaaaagtggctacgggaaaatacgtatactaccaaaattctaaaatgggaaaccaagcagtggggagaaatacctgctgacttcggaagaaaataagcctgtacagggcttgaattaaatgatgcatcatcctacacccgctatttttgagaaaattgaataacacttgaaaacaaatagtgttatggtccggaataagcaatgttacggatgattagattgcttgttctcatccacaacaagcaatctaatttcagacaagtctgatttcgttaagcgaaatctgtaagcgacatatgaaaagcgagtaatatatgcgtacaaacactccttttgtacaaggggaatttgctgttgattatcaaggtgttgcaaaggatcaatttcttgccgacaagaagttgggagtttgttgacaagaagttaacttcctgtcgtcaaactcctaacttcttgtaaaaggagaaatagctgttttttcggtttccttacacagcgtagttgatagtacgaatggcctatgtgttcaatcatctgtattagaaaggctgaacgcttttctttcatcttgcctcgtctagcatctatatatcggtggtattggatatatagatactgcatgtccgatatatagatgtgacacgtccgatatatagatgctgcacgtccgatatatagctaacatattcagaacatgagttttgaccaaaggaaatgtacattaaaagccaagaaaaagaagattattcttctaggaaacaggaggtaagcactgattcaaaacaacatgaagacaggcacagattccggtggtgtaggcaaatacctttcctacacccgcatataattttgcctacaccacacaccgttctattaatgagacgattaagtctccgggtgtaggatgtaggcagaattaataaatctttctattcagaatcgttttttgatcaagacagagattgcatatcattcaaacgtttatagtatccattcttctccaacaaagcttcgtgcctgccacgttccacaatttctccttcatagagtacgcagatttcatctgcatttttaatggtagaaagacggtgggcaatagcaattgtagtacgggttttcatcaaacgctccaaagcttcctgcaccagacgttcggactccgtatcaagagcagaagtagcctcatcaagaataagaataggcggattcttcaaaatagcacgggcaatactgatgcgttggcgttgtcctccggaaagcttgccaccacggtcaccaatatttgtgttgtatccatgctctgtctccataatgaaatcgtgcgcattggcaatcttcgccgcctccatcacctgctccagtgtggcgttttccacaccaaatgctatgttattaaagaatgtatcattaaacagaatcgcttcctgatttacatttcctatcaggccacgcaaatcatgaatacggaaattcttggtactaacgccatcaatcatgatttcaccgaaatgtatgtcatggtaacgcggaagcaaatctaccagcgtagattttcccgacccggactgcccaaccaatgcaatcgtctgccccttcggaacaacaagattgatatgtttcagcacttccctcttcccatcataactgaaagaaacatccttaaactcgatttgtcgattcatgccatgcagaggaagcgggtttacgggttccttaataggattttcagccttcagaatcttatccacacgttccatggaagccaaacctttcgggatgttatatcctgcttttgcaaaatccttcaacggattaatgatgctatacagaataaccatatagaaaatgaatgtaggagcttccagcgaagaatgctcatcgcccaaaatcagcataccgccaaaccaaagcaccaatacaatcaaaagcgttcccaggaactcactcatcggatgagccaacgcctgacgaacggccactttattggtcgcatcacgcagttcattactgcatctggtaaagcgatccaccatcttatcttctgcaataaacgctttaatgatgcgcaagccccccaaagtttcttccaattgtgacatggtatcactccatttgccctgcgcttccaaagattggcgtttcagcttcttgccgacctttcccatcagccaccccattccgggaagtactacgatggtaaacagggtcaactgccaacttgttataatcagcgttgtaaaataaaacaggatcaaaatcggatttttcagcaacatatccaatgaactggtaatggagttttctatttctcccacatcaccactcatacgggcaatgatatctcctttccgttcctgagagaaaaaaccaagtggtaagtgcatcactttcgaatagaccatgatacggatatcacgaacaactcctgtacgcaaaggaatcattaccgcagaagatccaaagtagcaggaagttttcagcatcgtcataagggctaggaacagtcccataaacagaagtgtcattatcgggccatgaacctctattaactgagtaacatagtaatagaaattatttattgctacatctttcaagtcatcgctgccccactccatgaagtgatatactttctctccgctacccgtcttgaacagaatattcagaattggaatcagcagagtgaatgagaatacattgaaaacagccgataagacattgagcacaatcgcccaccctatatacttcttatatggcgacacaaaacgccgcatcaattgcaggaattccttcattgcttggtattaatgaattaggggcgcaaagatacaagaaatatctttaagataaagaagataaatttaatattaacgagatttatctatacaaccctcaataaacaagccctgtagctcatttatatagatcacagaatgatatcggaaaaatatattgtatctttgcatccggatataaaacaaacgctttattatgacaaagatcgataagtccgtactgacattcggaatcactattttcctgaaattcatgttattcgacatactatggtgtatcccgactacttttgcttctctttctacagttgaatgttatacaacaaaactgatagccacacttatattgcttatcccttacgccttcttccgtatgtggaaaacagagacgctcatcatgttcctgctggatttcctgctgatagccaatcttatgtacttcagaacctattataccgccattcctctgaacagctacggattatcaggaaacttagccgatttcaccggaagcgttttcgactctcttcgctggtatgatatacttttcccattatccacccttgcagccgccgtcgttcatcggcgtacaaaaactgcacatcagaagcgtcccgcaccggtgcttgcttattctgtggtacttgcagtcatcatctgcatctttggcacagtgaccctgattaaaggcggattttcaaatgcatacaaggaatatcgcgacaaagcatatttctgttcaagcggcccctcactctataccgttttcggtagcctttgctatgatttggcaggccagcaacaaaagttaactcctgaactggaagcaaagatagaagaatggttaggtaaaaagcccaaacacgaagttgccctgccggacaatagtactaatcgccgcaccaattgcattatcattctggcagaatcattggaaagttgggtattagaaaaagaagtggaagggcaggagatcaccccctacttgaacaaattactgaaggattctaccaccatctatgccccacatgtactgacacaggtaaaaggcggccgttccatagatgcccaacttatactctgcaccggactactacctatcaacagtggtacgtacagcagccaatatcccaaccatgtttacccttcgttgcagaaagccatgcacgaaaaaaatcattcgcgcaactatctgttaaccatagataagatatccacctggaaccagggtcccatagcccaaagcttcggcatggatacgattatcgcctatcatgatttcgaactgacggaagctttcggtacccacaaacgtaccggagacggctcattctttgctcaatgtcaggaaaagatagaaaaaggggagatatggaaagaaggggaaaacgcatatatgcagcttattacctattccggccatgctccattcatattaccggaatatctcagagagatttcattctcctctgacattccggagaagatgggtaactatatgatcactgcccgctacacagataaagctatcggtaaattcgtggagtatctaaaaacactccctcaatataaggaaacgctgattgtaataacaggagatcacgaaggtttagcgtcttatcgtgcagaactatgcgaaagtcccggtggcaaaggtatcgtgtccgacaagcagtttactcctttcatcgttgtcaactctcccataggtatgcgttacgatgaggtgatggggcaaatagatatgtatcccaccctgctgaacctacttcaacttgacggctattattggaccggcctcggagaaagtatcctcaatcctgaaaagaaaggatttgctgtaggttcacagatgaatgtggaaggagaaggatatagtccggaagatgaggattttgcaaaggaggcatatgatatttcggatgagatgatacggtttaattactttggaaaaaagtaagataataaagaaagcgttccatgtttttaagaatctttgtttggagaaacagcagaaagggcgtacctttgtttgcattcaaaccaaacttctaaaaaggcatcagttatggaagaatatatagcaccgaacagaaaacgcatcccctacggcatgatgaacttcgccgtgattcgccgtgatgattgttattatgtagacaagacccgctttattcccataatagaagacgcggataagtttttcttcttcatccgtccccgtcgtttcggcaaaagtctgacggtaagtatgctgcaacattattacgacatagccgccaaagataagtttgatgctttgttcggtgatctttatatcgggaaatatcccacgcgtgaccgcaacagctacctggtgctctatctcaatttttccggaattgtcggtgaactgcacaactaccgcaaagggctggatgcgcattgccaaaccatgttcgactacttttgcgatatctatgccgactatcttcctcagggtattaaggaaaaactggatgcaaaagaaggagccgtagaacaatttgagtacctgtttacggaatgtaacaaaaccggccaaagaatttatcttttcatcgacgagtacgaccactttaccaatgccatcctcgccgatcctgagagtttacatcgttacaccaacgagacacatggcgaaggctatttgcgcgccttcttcaacaaggtgaaagcaggaacctattccagtatcgagcgctgtttcatcaccggtgtcagccctgttacgatggacgacctcactagcggcttcaacatcggtaccaattactcgctctccccaaaattcaacgaaatgataggattcacggaagaggaagtacggcaaatgttgacctattactccaccaccagccacttcaaccacactgtggacgagctgttggacataatgcaaccgtggtacgacaactattgctttgcacaaggacgttatagtgaaaccaccatgtacaattctaatatggtgctctattttatcaaaaactaccttgacaacgatggtaaagcaccgcagaatatgatagaaagcaacatccgcgttgactacgagaaattgcgcatgcttatccgtaaggacaaagaatttgcccacgatgcttccatcatccagaccttggtgagtcaaggctatattaccggagatttgaaagaaagtttccctgccgtcaatatcaccactcctgacaacttcgtgagtctactctattatttcggtatgcttaccatcagcggcacatatgaaggtaaaaccaaactcaccattcccaaccaggtggttcgtgagcagctttatgcctatctactgagcacctacgatgaagctgaccttaatttcagcagttacgaaaagaacgagctgtccagttcactcgcctatcgtggtgactggcaaacttacttcggctacatcgccgactgcctgaaacgttacgcttctcaacgcgacaaacagaaaggggagttctttgtccacggcttcacccttgccatgacagcccaaaaccgcttttaccgccccatttctgaacaagatacgcaagccggctatgttgatatattcctctgtccactgctggaaatctattccgacatgaaacacagttacattgtagaactgaaatatgccaaatataaggattccgaaagtcgtgtggaagagttgcgtcaggaagcaatcacccaagccaaccgctatgctgatacggaaacggtgagaaatgctattggcaacacgatactacataaaattgtagtggtgtataaaggaatggatatgcccgtatgtgaagaggtataatcaatataggaaaccaacaatccagattggcaatttatgccgataaggggtttctatatcatctgccaatatgaaagtccttgcatctcataggaaatacaacacttggataagttggcaatcacattcagtatattaaataaagaagatgtactaaatacaactcgcaaatcaggagacatatcataaatctcctttatttctttgctccattattataatttcagactataattataccattattcttcctgcatagtctcaattaaatctatggctttctgaatatcaacaataccacaaccataaggcagttccggagcatcatatctatttgctgactttttcaaaatctccaataattcttgattagtcagccaagggtaagcttgccataaacaggctgccaacccacatagaatagggcttgcataggatgttccacttctaaaatcaatcctcccctcaatatcaattgtacataccgaagttccaagagctacaacatcaggcttcatccttccatcaacagtcataccatatgccgtaaaatcgcctatcccaccagtagtagtaacagaacctaccgccaatacattaggagagtctgccggagtcccaacccaactcccatcattaccagcacaacatgcaataaaaatccctttatttgcagcaacattagccgctcgtgttggcaatgcagtttttccatccatctcttcatactcgtacgaaggaaaaggccatctattcccagtataatacaatgaagtattcacaacatctgcccctacactatcagcatactctatggcagctacccaataatcctcttctaccggatattcaccggacaaatcttccgaacgtagaagccaataattagcttccggtgcagttccgatataatatcccggcttatcagtcgccatacaagccgtgacccaaaggccatgctcatcgctattataagggttcgaatcttcatatacaaaagacttggcaccttgaatatgcatagtatttaaagtaggattattaagcaaatccataaatcctgcatcaataactgcaatatcaataccctctcctttgaatccacgttcatgcaatatttgcccattatgaagaattatatttctccacgcctctccataatcttctgaagaataacctgacatatttccccctgctgaagagctaaccgaagaaattattcgtttctgtttttccgtttcacctcgccatactttcacgatatcttcaacaaatggtaactctttatatttgtcaatctgtttttcgtcttcacattgcacacaaacagttttcaaccatttactttggcaaactatttttcctccaacctgttctatttgtttcagataatctttagatatgggtagatctgaatcatctatagcaatatttctttttcgccgcctttcaattgctttagttgataaaaacttttctggctgatttaacaaatagtcagcacttcctttatctttaagaatcaggcgaaatttataattatactcttgatacaccgtaatcgggcatatagcatgaaaaccctgcactacagcttcaacttgtaatcctgaaataaactcattctggaaaacagccgttactttaccatcctcatctacattaaccaaattactatttgattcccaacgcactttacttccgtccaatggaatcccattcaatttagcaatcaattgacacgattctcccacagccaacacaactgaagcaggttcaatagtcagttcatctggcacaggaaactcctcttgcatattatctttttgacaagctaccagcaaaagaacttcacaaataatgcataaaaagagtctgagttgtatcatacaaaaaaattatataacttttattatattgctagaagcgaagttgccatttattgtaaacaacaactcagccaatcaactgttgaactaacataaattacctcataaaagaaataactacaccaatataatgtatactctaaaaaacataaccaactataccttcatttagccaacccaatgaataagaatttgtattataatgaaattttccatttttttcaaattgatacagtggaataagttcatcataaattttacttggataaatataacatcttaccccttcattcaaccaacctaatgagtagacattggtatggtaatgaaactcaccttttttttcaaattgatataaagggatagcatcttcattacctttttgaagtagcacataacacataaccccttgtctttcccaacctaatgaataaagatccgtattatagtgaaaactactccctttagcaaattgatacaaaggatgcaaatccagcacatcaatctttttactatcaatatacctaaacacagcctccttcatttcttgtttctttataggatcagaaattagatcataaataggatacgtagcattccagttgacatcaaataatctagaatgctggtcatcaactgactctgtccatgctcccaaattaatactaaaacttggtccttgctcaggcgcgagcgtaatagtagtacccgaggtagaaccaccaagagccttaatatagcattcccaattagaatttttcttattgcgctcctctacttccgttttgctccatgaaccgtgagcatcaagcccaatattgctcaaattatattttgcccctgcactgacaatctctgtcttttccgtactactattctcttctattatagcagatttataatatgcagtatatttccctccaactgttatattagttaaaacatgcgttccatacatttccacaattttatccgcagaatatttatttaaatcttcaacaaaagaagacaacaagtatttagataaggtttcaatatctgtattcagcaaatatctcctttgctttttaaaaacctccgctcttgcaaatgagtattttgaagaatagaaatattttgagcttgttttgaatcccgtcgttatagtccctgagaaaaagccctctttatcctttttctcaggtaaagatcctacagaaccactaaaattcgtatcggttattatctgagataaaaaagattgcgcatctgctcctgcaaaacatctctgatcaattacccctgaaaattgcttatcaaatctgttaggatttgctttcacaaatgcttccacatctaagattttcaaccttgttgaattttcacccatgtagtcatcggttatatcataaccataacctaatacatcatacactccatctccagctgcccttgttgttacatttgataccgaagattcaacatttggtaaatcctctatttctgaacaagaatagaaaagaggcaaaaagcctaataaataataatatgtaaagattaacaattatcaaaagtaagaaataccatcattttacccaattttaaaagcatgtttataagcacaacaattgcacattatttcgaattagcgaaacttatatatcttttaggttcatcatagatatactacattttccagataatgaagtaaataagccagaaaaactatattaatttacacagactacgtttcttacaaaatcggtaaatttttctaagaaatgaacagttattcagaagcacttcacttctactctaccatatttataagataattaaaaaatcacataattacaacatttaagctatattacaagctaattactccgagaaacaataaagcattaatgcgaagcaaagtaatccatacggagtaaaatatttgaaactttccaacagtcctttctatgctgtttaatagtttctgaaacgccagtaccaccagcttccaaacctgtccggaaagttgcatagttgctaatattatctccaaaaacattgtctcccagccctctgaaagaatagtcactgcaccccatcaaagttaataaggaagggtatatatctacttgtccgataacctcatcagtatgttttgaatctaaaggagaatttataatcaagaatggaatatagcaatcctctgccctcaacttttcccgcccttcatatgtattgaaggtcatttgttcatgatcacctgttatgacaataatactattatcatataaaccctctcttttcagtccatcaataaattccataattcgtatatcaacaagttgtatagctattaaatagttcttaatttcatcattaacaaatttctcttggattaatggagtatcaagtaggctaggctccatatatggctcatgactggataaagtaaccaattgtgcataaaatggtgttttcattttctgcattgtcgaaaggcttgttttaaaaagattctcatctgcatattttctctccctgtcaccttccattccagcatatagtctatcaaaaccgtaagcaattgttgtcgcttcctgattccaatagttcttctcatcacatatgaaagagactgaagtataaccttgcatcttcaaagctgcagccaaagatggaaaggtatttgctgcacacaaactggatgccgcccctgttgtcaatggtaataagccagtatttatcaataactgggcatcacttgaacgtccatctttgacttgaggaataactttacgaaaaaagactgcatcttcctgaattaccaacttattaatattaggagtgcactctacttcaccaacttttaagccaattggccaactctgcagagactccactaaaattaaaatcaaattctttcccataatagttggtaaacttttggccaagcaactttcttttttcgacaattgctccataaagatacaagcatatcgttcatcatctgaagaaacactctgaaaagaagctatctgataaatccagaagtgtattattccatatttcttaaaagctccaacttctgtagtactaaaaagataaagaggatctttaccagacaatcgtttattgaataaataaggagcggtaactccagttgctattatcaaaattaaagtcattatagtatttcttcgtagagatgaagaat

SEQ ID NO: 6283 - DNA, 77567 bp, Unknown
  gut microbiota DNA sequence
gacaaagacaatgtgctgttcaaggacgtgaaggaaaatacacaggtgtggatgagtcacggagacacaattacggttatcccttctaatttcaaaaaaatagcttcgacggataaggtggcgattgctgcttatcagatagagaacgaaaaggtgtggggcgtacagttccatccggaagtatttcacagcgaagatggcacgcagatgctgaagaatttcgtggtggatgtttgtggttgcaaacaggactggagtgcagcttcctttattgaaacgacggttgccgaattgaaggaacagttgggtgatgataaggtggttcttggtttgagtggtggtgtggattcttccgtagctgctgtattgttgaatcgtgctatcggtaagaacctgacttgtatcttcgtagatcacggtatgctccgtaagaatgagttcaagaatgtactgcacgattatgaatgtctcggtctgaatgttatcggtgtggatgccagtgccaagttctttgcagaactggcaggtgtaacggagcctgaggaaaagcgtaagattataggcaaggggtttatcgaagtatttgatgaggaggcccataagattaaagatgtgaaatggctggcacagggtacgatttatcctgactgtatcgagtccctttctattaccggtacggttattaagagtcatcataatgtaggtggtttacctgaaaagatgcacctgaaactttgtgagccgcttcgcttattgtttaaagatgaggttcgccgtgtaggtcgcggattgggtatgcctgagcatctgattactcgtcatcctttccccggaccgggtttggctgtgcgtattttgggtgatattactccggagaaagtggctattctgcaaaatgcggatgatatctttattcagggcttgcgtgactggaaagtgaaagaagctgatggtagcgaaacttctctttatcatcaggtttggcaggcgggtgttatcttgcttcccgtgcaatcagttggtgtgatgggagatgaacgtacgtatgaacgtgccattgcgctgcgtgctgtgacttctacggatgctatgacggcagactgggcgcatttgccttacgaattcctgggtaaggtttccaatgatattattaataaggtgaaaggagtgaaccgtgtaacctatgatatttcgtcaaaaccgcctgcaacgatagagtgggaatagggtagtacgttttaatactatatttgaatagcctcaacttgtatagagttggggctatttttattggtggcaaagaaacaaataaactttgcacttttagttggtttagatgtattatttgaccaaatatcgcagtttgatatttgggtcaaaaagtatatgtaagtggataaatagtgcaaagcttattcttttaaaggtttttattttgcgagaaattactttcagacattttttagaatggaattgataggccttaaatttcaataaagaagagaatgtaaaccaatcgtaatattaatgaaaacaagaaaactaaaagcaatgagtaaaaacaaaattatcctgcttgtactctcattcttaatgacgagtatttggaatacctatgcacaggtagccactgtgagtggagttgttcaggacaaatcgggtgagacgattatcggtgcaaacgtactagtgaaaggaacggctaacggagcgattactgatttgaatggcaagttcacgatttctggagtcagcactaatggtacattagtagtaaactacataggttacgtctctaaagagattgcagtgaaaaatcaaacaaattttatcattacactcgaagaagatagccgtgcgctggaagaggtcgttgttatcggttatcagacagtaaaacgtaaggatcttaccggttctgttgcatctgtttcgggaaaacagattgcggcaatgcctgttgcaaatgccgcacaggccttacaaggaaagttatcgggagtgaatgtcacgacacaagatgggcgtcctgacgctacagtctcaattcgtgttcgcggaggtggatccatcagccaaagtaatgaccctttggttctgattgatggtgtaagcggttcattgaatgatatttcagctgatttaatagaatcgattgatgtgttgaaagatgcttcatcaactgccatttatggcgcccgaggtgccaatggggtaattcttgtcactaccaagggagctaaagaagggcgcgttgttgtgagttataatggttatatgaagtacaatacaccaactaaatatctggatgctctggatccttatgattatctggcttatacgtgggcaagcggggcttctgtaggaggcaatagttacacagagccttttgaaaaattgtatggcattggtcgttacacaaccactaatcctaatggaatagaaagctaccgtaacatgaaagctgataatattcagaaaaaagtatatgatgattcgttctctcacaatcatgatctttctataacgggcggtactgagaaaacaaaagtcttgtttgctgtgaattatacagatgaggatggcatgaaactggcttcttattacaaacgtgccaatgtttcattaaaggtaaatcaaaaaatagctaagaatgtagatattagcctggatacccgctatacaaatactaaaaaaatgggggatgaaggagttagaaatggcagtggttccgttttgtcatcttcctaccgttttcgtcctattgcaactgaaaatattttgggcgatctgaatgctatgaatgagggtatgatagaaaactatgcaaagcaaagtcaatgggacaggtacaatccggtaaatcgcattaatgataattattcaccaaaagattaccaggcattgcgcggaattctatcattgaattgggagatagtgaaaggattgacgtatcattcggacttgtcactcaatcagtcatggaatcaaaataaaacgtggacaggagctattgtcaacagttacatggatgataatacaggagaaatcctttatgccggaaatgcggaactggagaaaagcaataaatgggggcttcgttggagcaatacattaaattatgattttagtttaggcaaggcgcatcgatttagcattttggccggttacgaagtttctgattcgggtggtgatggtttaaaagcttcaggaacttactatcctgcaaattttaccaaggagaatgcatttgctatgattaatcagtatgatggtacacaaggggtgggacagttttcttcaagtgtttctattccgggacgtattctttcttttttcagccgtttgaactataatttattggaccgttatttgttgacggtaacatttcgtgctgatggatcttctaaattttctcctaataatcgttgggggtattttcctgctgcagctttgggctggcgtatgtcagaagagtcattcctgaaggatatagagtggctggataatcttaaacttcgtgtttcttatgggcaggttggaaatgacggtataagttccagtctttggtcgcagacttggtcagctacaacggacgtgaggcaacaagatgcagtaaacaatacgcttctgccttcttattcactggctacagaattggcgaataaagatttgaaatgggaaaccacaataactcgtaatattggttttgactttggcttttttaacaatcgtctgacaggtacgattgatgcatattggaatactaccaaagatttgctgatgaaaacaactattcccggtataacaggtttcactgcaacttatgccaatgtcggtcagaccagcaacaaaggcattgaaatagctcttcaaggggtgcttgtacagacaaaggattggaatgtaaccgcaggtttcaacataaacttcaaccgtggtaatgtagatgaactggccgataatgtgaccggactttatggaactcaatgggctagtggatccacttttccttcttctgactatatcctgatggaaggaaagccggtgggattagtgcgtggtctgattgctgacggattctatacaaccagtgattttacatatgcgaatggcatatacacactgaaagagggaattccggatatttcttctgtagtgttccccaattatcacctgcatagtggtatgaatgagcgtcctgccggacagtctgcttatccgggtatgcccaaatttaaagatcgggataataacgggattatcaatgacgatgatgtagaggttattggtgatatgacaccggtacatactggtggtttcaatataaacacttcatataagaattttgacttgggattatattttaactggagttatggtaatgaaatatacaatgccaataaattgggggcactttatggatacaaggaaagtggtgtttacgaaaacaaactttctttggtgaaggattgctataaaatttatgatgtagttggcggccagctggtagctttaacaactcctgaacagttggatgctgctaatgtcaatgctaaattgccattggcttatagcgagaatggttatgtttctacgttaggtattgaagatggttcttatttgcgcctgaatacattgacattgggttatacattgcctaaacaatttatcaagaaagctggtatcagcaacctgcgtgtttacggaagtatttataatgtctttaccattacggggtattcgggtcttgacgcagaagttaataccaacacttcaacaagtgattatcctaaatgggggttggattgggggacatatccgcgtgcccgttcattcgtcttgggtgtaaatataagtttctaatcattttattttaaaagaagaatttatgaataagttaataaaaatggcatttgccgctatctgttgtttggcatttacacaatgtagtgattttttagacacctcttctccatccaatattgatgatgaatttgtttcttccagccctacggaaacattaaagattttatcaagaggatatgccctttatcgtgagtcatgttttggcgcgtataattggaatgatcattttggttctgatattgaatattttcctgaaaataactcgtccaacaatatcaatgctaaattagttccggaacagattccttgtgactatatgaaagatccttttaattctttatacagtgttattgcttatgcaacgaaagcggtaaatctgatctctgaaaaaactcaatataaagaggatattgctgccggtagaactaccgattggacacatctcaaaggtgaagctgaaacatttcgtgctatgtgctattttgatttgatcaagcactttggcgatgttccgtatggctatgagaatagctatgtggatgattacgaaattacttctcgttttgcaatctacgataaactgatagaagctgtaaaagcagtcgaaccttatatgtataaagtcggagaaggaggtattaatggtcaacgtatctccagaacatttgcaaatgcactcattggtaagatggctctttatgccggtggctatcaaactatccgtacggatatgcctgaactttatggagaagtacagtttgaagtccttagaactgatgcaaaacgtaagtgtgcttacgctcgtcgtgcagattacaaaaactattatatgatagctcaacaatacttggagatggctatttcaacgaatgccggaacaactaaattagttactacggatgaacgcacttataccgacaatcctttccaacgccatttccaattttgtatggatttagagcagagtcctgaaactatttttgaattgggcagtgtacaaaatagagtgggcggtcgattttatagttatgatattggccgtggctgtaatggaggtaacaatacagctcccaataaggtctttgcagcagtacgaatggtacctactttttattatggcggttatgacaatgccgacaagcgtagagatgtcagtgcagtggtcaccggattggatggcaaaggaaatgaaatagtttttacttttaaggccggtgctaagacagatggaggtatttgcttgaataagtgggatatttgccgtcagaatccttactttgtaggtggacagggtagcgcgggctttagtgcaccgattatgcgtgttgcggatgcaattcttatgttggcagaagtgaaagccgaactgggtgcagatgctgaagccataaatttagtcaatcagattcgggaaagggcttttggtaataccgaccataatattgcaggtttatccggagatgcgttgaaagatgcagttcttatggaaaggaaattagaactttttggtgaaggacatactcgctacgatatggttagaagtgccaaattctctgaggaagcgttggaggtacgtaatgagatggaggctcttgctattgatttgaagactaaaggctattatgaatttggaaatggtaatgtattaccagcctatatatggacaaaacaggttgagggtgctactttgacttatgattgtacggataaaacagatcctgtacaatttccgggatggcgcggtgtgttggattttgcaaaattgggattaactgttaatggaacgacccataacacagcaattaagggcttatttgaatatattgatcctaatggtacaattgctgctcaattggaacaggaagggtatgtgaagaccgcctggggtagtactcttgcagagaatattgatatttatttgagtaatattcttccgggaatcacatccaaagaaagtgttccttgttattattgggctattccgtacgaaacgattagtcaatctaaaggaaaagtaacgaatggttatggattaccgcaacaataaagaaaaggactattataataatcgtcaataggtatcagaaaatttcagaatagtttttttaccctgtattattcatactcatcagtaaaggtattttgaataatacagggtaaatagtattttatgatttaatgaatttcagagaaaaggaattcacgctgtttcatgctcttggcattgcccgttacagaaaaaaagctgtttaagcgaatgtcaatggaagaagctcctatctttatttcatattttccaggcattatgtgccattgcttttcaaaataatatgccaattggtctaacattaattcagcttttactttctgggtttctccgggtttcagtgagattcgtttaaagccttttagctgaattggctttagaggttgtccatcaactggtgataggtatagttgaatgatttcggtaccttccatctttccactattggttatatcaaaagagaacttgatacttttatctgtggtgcagactgttgatttctgtattttcaaattgctataagtatatgttgtatacgacagaccatatccaaaggggtaggcaactttactaagtaactccggttggttgttataacatatattctcttctgattctgttttggggtaactgacacataattttcccgaggggttgacattgcctaataatatatcggctacagcgttaccaccctcttcgccgggataccatgcatgcatgatagcagcacagcctttttctatttcatcgataacttgtgggcgtcctcccattatcaccaatacgacaggctttcctgttgctattaactcttttacgaatttctcttggtcgccgggtaaatcgatgccttttcttacgcgagcctctccacaaagagctggattttctcctacggctgctactataatatcactctctttagccaatttgattgctgcattccagtctgtatgatcggctgattctaccatcattgcggttaattgactggtacgaggatctacatcgcctgatgatttaatagtggcttctcccggtagactccattcgcagccacgttcgtagcctactatcatagagcctggttttctgttttttaagccatcatacaatgggatcaagtaaggattttgtccatccggtttttttcttctccagaaagcaagcatggaaggataagcataatcaccaatcaagctccaaaaagagtttgcattaggaccaactaatgctatcttggctgtcggtttaagcggtaacacaccgttgttctttagcaatactacagactggcatgccagttcgtaggctgtttgacgataatccggagtgtctaagtttaagtgacctttttcaaataacttagcattaggagttaacattcctaatcttacttttagggttaaagcacgtttaaccgcctcttcaaatcgtgcttcactcactattcccgatgccattgcttccggtaaatgaggataacatttaccattgctgaactcaagatcattacctgcattcatagcttctgctgcacacttagccaacatatcatctcctttgtatagacggccgatagcaccgtagtcactaaccactataccgttaaaacctgttctcccgcggagatagtcttgaatcaaaggtgcacttgctaccaccagtttacctttataggaatgatatcccgtcattgtgcatttgctgcctgcacagcgaatgatagcttcatgagggaaaaggatctcttcggttaattctttctccggagactcactacctccaccataaccaagaaagtgtttactacaggcagcaactcctttggctaaatcattgccttgcaaaccctgaacgaaagctactcccatagcaccggataaataactatcttctccataactttcttcgatgcggttgaatgtagaagtacgtacaacatctaccattggtgacaatgccattgtgctacctactttacgcatagcttcggctgtttgccttgatttttcaatcattaaatcgggattccatgtgcaagccaatcctaactgttgaggatatacggtagctccttttgcggcaaatccactgatagcttcttcatggcaaattgctggaatacccgaaggtgtgtttttgcgtaaccattcttgaaggtcggctacaaaatctcgcagtttgtcaggatctaattcctgtgcacatgcgaattggcaaacgtgccctatgccattaggtatattcttacggcatttttcatcagatagttttccatttttatctaccaatgatccgggaactatcccatgcaattgagcaactttctcttcaagggtcatacgattgtagagctcatttacaatcttctgtgattcctttgtttcaaaaggcgtataatttactgtttgcgcctgtaaatttgtactgaatagcactgataatgctattcctgtaacgagtaattttttctttttcttcatggttcttttttactaatttttcagatacaaacatacgaaagatactgaaataggtcttgcactcttttttcatttgagtgtactatttgactagttatattgggcgtaaatattcttatttggatttatttatttggtaattagtgaattatgataagattgtatagagagctaatgatgtgattactggattttttatcatttatttggaagcttattagtaatggttagtcaaaagaaaagattgagccttggtcaaaaagtgcagtaaatcgcatgaatagtgtaaacctgtctaaagatagcagtctacatttgcattgaacaataaaacggaatattatgcaaatagaaaaactaagatttttgaatttcgtaaaaatactacttttaggattagtgtcaatgggcaatgtcaatgtgtacgctcaaaaacatcccatattatggtatgataagcctgcacaatattgggaagaagctttacctctcggtaacggacggttaggggcaatggtttatggaaatccggttcatgaagagattcagttgaatgaagaaacggtttctgccggttctccttataataattataatccagaagctaaaaatgcattatcgactatccgtcaactgatattcgacggtaaatatccggaagcacaggccttggcagaaaccaaaattctttcaaagaatggatttggaatgccttatcaaactgttggaagtttacgcttggattttcagggacaagaaaactattccaattttcgtcgagaactcgatttggagagagcggtgactacaaccacttattctgtaggtggggtgaaatataaacgtgaagtgtttgcttcattaaccgatcagctcattataattcgcctgacagcctctcaggctggaaagttaactttctcagctgcattgacttgtccgcaaaaggtagatgtaagtactttaggaaagaatagattgataatggaaggaactactaaaggggatggatttactccgggggctgtacgcttccgtgcagatgttgaattggatttacaaggcggaaagtcagttgctaatgatactcttttatctataacaaatgcaactagtgcaactatttatattgctatggcaaccaattttattaattacaaggatatttctggtaattctgttgaacgtaataaagtttatctgaaaaatgctagaaaaccttatactaaggcattacaggctcatgttaatatgtatcagaaatattatcgacgggtggccttagatttgggatatactcctcaagcagataagccgacggacattagggtgaaagaatttgcaacctctaatgatccccatttagtagcgttatactttcaatatggacgttatttactcatttcttgttcgcaaccaggtgggcaacctgcgaatctacagggtatttggaatcataaaacaaatccggcatggagatgtcgttatactactaacataaatgcagagatgaattattggcctgctgaggttacgaatttacgtgaaatgcatgaacctttcctgcaaatgattagagaactttatgaaaatggacaggaagccgcccgtgaaatgtatggctgtcgtggatggatgctgcatcataatacagacttatggcgtatgaacggtgcagttgacaggccttattgtggtccatggcctacctgtaatgcttggttatgtcagcatttgtgggatcgttatctctattctggcgataaagaatatcttaatagtatatatcccattatgaaaagtgcttccgaattttttgtagactttttggtaaaggatccaaatactggctatatggtagtaacgcctagtaattctcctgaaaattctcctaaattgtggaaaggaaagtcgaatctatttgcgggagtcacgatggataatcagctagtatttgatttattctcaaacactaatgctgcggctcaaattctgaacagagacaaacagttctgtgatacaattctttctttgaagaaacgattgccgcctatgcaagtagggcaatacggacagctacaagaatggtttgaagattgggataatcctaaagatcatcatcggcatatttcccatttgtggggactttttccaggttatcagatatctccttactcttcaccagtgctttttgaagctgctcgcaatacgttgatacaacgtggtgatccttctactggttggtctatgggctggaaagtttgtttctgggcaagatgtttagatggaaatcatgcctttaaacttattaccaatcaattaaatttggtttctcctgaaatacaaaaaggacaaggaggtggtacatatccgaatttgtttgatgctcatccacctttccaaattgatggtaactttggttgtgttgcaggtattgcagaaatgctaatgcaaagccatgatggagccgttcatttgcttccggctttacctgacgtttggaaagatggggagatagctggacttcgcgcgcgtggagggttcgaaattatttcattaaaatggaaaaatggtagaatagagtctgcaaccattaaatctactatcgggggaaacttacgtttgagagttcacaatcgattgaacataaataataagaacttagctgaaacaaatagtctcaatcctaatttattatttgctaaacaagatgtcactcgccctttaatcagtgaaaaagctccattgaaaggaatagagtttaaagaatattttctgtatgacattccaacggaagctaatcatacttataccttcactaatctttgactatgattataattaatcttaatattccagcttttataatgttgataatcagttgatttttatatgtgtcaaaaagtgcacgcaaaaggataaaaagtacaaagtatatttttgataagctattagttttgcgattatcgtttaagaaagtaattgaactggttagatgttttcaggaaaatttggctgccattattggcagccaatacttataagatcaatatatgaagaactattttttgttaattaaataatactatcatgaaacaaaaatttgattatgtgtggaacgtaggaactctgctaatggtattgctattgctggtgccgatagcagggtttactcaaaacggtacagtgaaaggtactgtggtcgattcggaaggtgaacctgttatcggggctactgtaacggagaaagggcgaaaggggaatggtgctattaccaatttggatggagactttaccttgacgttatcagggacagagaaaaaaatcattgtgacctttataggtatgcgtactgaagaggtaagtgttactcctggaaaaaaggttcaaattgtgcttgaggatgatgcgcagcagcttgacgaagtagaggttgtggctatcggttacggtaatgcacgacggaaagatcttacaggagcaatatcttctgttggcgagaatactttaaaagatattactaccacttccgctgcaagtgctattacggggcgtatagctggagttagtgtagttactactcaaggttctcctgacgctgaagttagtattcgtgtacgtggaggaggatctatcacccaaagtaatgatccattatttattgtcgatggttttcaggtaaatggtattggagatattcctcctactgatatcgaaagtattgatgtattgaaagatgcttcatctacagctatttatggagcaaaaggtgctaatggtgtagttcttgttaccacgaaaagtggacgtgtaggcaaaatggaggtctccttaaatgcttcagttggttttaatcatatgtataatgaaacggatgtactttctccttatgaatatgtatatttacaaagagaattagatccttcgactaatgcgggtttttttgaacgctatggtagatgggatgatctggagatatatagaggaagaaaggggactaattggcaagctaaattgtttgatcggactggtgtgaaacagaactacaatttgaatatcaatggtgggagtaaagatttagtgtatagtttaagttatacgcgtgataatgaagaatatattatgaaaacttctgaatttaatcgcgataatttgaatgtaaaaattagtaaaaagtttaatgataagctgaagattgattttaattctcgtatgactagtactgtcattgatggcacaagtgtttcttctggggggaaactgcgggattgtgtcaaatatccacctgtgggtactttgaaagatttgacggcagaggatttacagggaagcgaatacattccggagaatatcagtggtctgaatgatcctttttataacattgcgaacgaatataaaaaacagcaaaaattctcaaactcttataacgctgcattgatttgggatataatcaaaggattgaattttcgtgcagaaggaacttacgtctttgattttgaccgtacagatcaaatttatctggaaaatacgggggaagctaataataaagccggtcaaccagtatcttatcggacttattggaatggtaaacgttggacaggtagaactcagttgagttacaataaacaaataaaaaaacaccgatttgatattacggtaggattagaattgagtagtagtgaaaaagataatatgcgcatcaattcagactactatcctatagattatacagcaaatgatattttgtctatgtggaacaatggtaaagcggaacccacttacactactattgatgaacctaatcgcagtcagtcttatttcggacgtatgggatataatctgaacaatcgctattatgcaaattttactttgcgtgctgatggtaccaatgtttttgctcctggtaataaatggggagtttttccagctggatcggtagcatggcgtatttctgatgagaagtttatgaaaacggctaaaaactggctctccgacttgaaattgcgtttaagctatggtaaggctggaaatgcacgagtaggttctagatggcgtcaaacgtataaagcagtgtcagacacaagatatttatattatcagaatgaaacgggaatgtcttctttacagacatcaaccacactgcgtaatgaagatttaacttgggaatcaaaatattctgccaatataggattggatatgagtttatttaagaatcgtctgaaaattaatgttgatttatataaagatatcacgaagaatctgatcatgtcagtacaattaccatccaatgccggatacagagatcagtatcaaaatttgggacagactactaatcaaggattggaaatatcgttaaatgctaatttgatacagaaaaaagacgcttatttagattttggctttaatatctcgtttaataaaaataaagtagatgctttgtatggtgctaatcaggatgtaatgattttgtcagccgggggtactagtgtcggaagtgacaattatcgtatttttgtaggtcaggaggtaggattgatgtatggctatatatatgatgggctatatgattttgatgattttacatttaataaagaaactcaaagatgggatttaaacgagggtgttgttgattgctcaggtgtacttagtttatctggtaattattatggaccaggtcacatgaaattgaaggacttgaacggtgatggaaaaattgatccggataatgaccgtaaagttataggacatgcacttccaaaacatactggtggttttaatattaatgcaggctggaaaggttttgatttggtggcgatgttcaattggtcatatggtaatgatattttaaatcttagtaaagtagattatgtaacttatgctggtagtagaaaatatcagaatatgagtacgctcatgaagaaggaaaaccgctttactactattgatccggttacggggcttaatatttataatggtggtaatgcagatcctgagcgattgcgggaagttaatcagaataaaacaatgtggcatccgattataaacaataatattactactgactgggtagttgaagatggctcttttttgcgtttgggaacgttgactttaggttatacactaccgaaaaatttaactaagaagtttggagtgaaaaaattgcgattatatgctacagcttctaatttattctgtttgacaggatatagcggtcaagatcctgaagtaaataccagttcaagtaatatgactccgggagttgataaatcttcttatccaaagaataagaattatctatttggtgttaatctaactttttaatatttataatacatatcatgaaatgtaaattattatatgcagttgttacagttcaattactgttcactgcttgcagcgattttttggatacggcatctccttcagaacaatctgctcaaactatatttgaaaatgaaggaatggctaaagctgctgttatgggagtctattcatacttaggcgatacttatgtttatggtcagaaaatgtctgttaactggcaagggaattcggatacagatatgtccaatggctttatggaaaatcccagtagtgataaaaatggagatagcgggcctgcgaatttttgggcggattggtacaacaagacaactcagtggggaaatatctttaaattaacagaattggcaagtactgctgttgatggtattcgtaattcaaagttgtatgaagaaggttccatcactatgaaatatttgctgggcgaagcgctaacgttacgctcattggcttatcttgaattggtacgtcgttggggagatgttccttttaaagatggtattgccaattctgacttgtcaaatgtatatatgggaaaaattaatcgagatagtatttatccgtttcttataagagatatgcaagaagctgttgaatgtttgccatgggtgggtgaagttggtgattataattgcgaacgtgtaactaaagggtttgcaaaaggcttattagctcgtattgctttgtttgcaggcggttggtctattcgtgatggtaatcagttttctgatgcaaatgtagagcattatcctaatttggaaaacaatccgggtatgaaagaaatgaataactactatgtggggcgtactaaggattggaggaaatactatgaaatagcagaggaacagtgtgctgaaattattggggatccacaaaaccctcatcaattggatcctgattatggcaatatttggaaaactgtatgccatttagattataatccttataatgaaaatatgtttgaagttgctaatggtctgggatatagtggtgatattggttcattgatggggaggcgtatggataataagcctgaaaattttggtggttcatatgcatgctcaaatgccttttatttttactcttttcttcctcaagacaaacgtcgtgattatgcgtgctattgggctacttataaaaaggataatacatatgttagggaagttatggggaataacattatgggagtaagttatggaaaatgggggtatttctggacatgcgatgcatatagaaatttgcttttgacagcaacttcgcgtgtaccgactggaattaactggattctaatgcgttatcctgatatctttttgatgtttgcagaggcgcgctatggattgggtaaaggtgaagatacagtgaatgagaaagccggtataagtgcgcgccaagctttagagaaagtacgtgaaagagcatttggaacaggttcacctgaaataaagaagtatgatgcagatttctttaatgctattgtcaatgagagagcttgggagtttggaggtgaagccattcgtaaattagatttgattcgttggggattattagatcaaaagatagaagagatgaaagaggcaatgctattaatgcttgatggtactcaaacgattaagatttttgatagagtgtatgaaccttcagatttccctgataagttatattttaaatatgacaagaataatgagtttattgattgggaatccgtcaatttctatgaaaggctggcgtttaatcctgatcagaatgtttatacggaagtgaattggtttcctgttaataattggaatctggaagatgaaaggcgagtgaatgatttagttaataattcagtgaaaatattgctctacgcttccggactacgagcttcatataactatgacgaattattttctaaattgaaatatggtgatttaattaaaaagaagtttattaccatgacagctggaaacggagtttgcaactatcgtcatttatatcccatttattatgatgatatatataaatccaaaggatatttagaaaattcatacggatatgattataaataattagaatgtacatttatgaaaaacaaagacctatattgtatactagtatactttttagcatttattgcgattggatgtagcgatcagcccaatgattgggaatatgatccgaactatgatatactatttcgtccaattaaattcgagattaaagaaagcaaagcaacttctgtattaatagaatataaaggtgtagaagaggctaccaagtatgtatttgaattcagtgaaggggacagtttattatttaccaatgttattcgtactgtggagatattggctgatacattgactccatataccaaagaggcaacagtgtctgccactacctaccgtactctatttaaggagttgaatggaacaagtaaatactcagttcggttaagggcggtcaatcaaaataatggtaaggaatcaaaatatgtacaagcttattttaaaactcctagtgagcaggtatttacaaataatattttaggattggataatatcatgctgtattgggaaccgaatatagctgttacacatatatcttacggtgaactgaaataccagaatgaaaaaaatgacacaatatgggcaccgaaacggatcattacagatattgaaaaaaaagaaggaagtctctctgttgatggtttaaagcctggtaccaattatgtgtttgtgatttataatgaactggtacgcagaggaagcttaaacttgagaacattgggatctaatacaggtggcatgattaaagtgaatgcaggtgatgatattgataatttgctgaaatctagtgctgatagtaccgtatctctaatttttgataaagagcagacatatgagattggtaagataacaataccgaaaaatattaatcgcctttatttaataggaggtggtagaggaggatcgcaacctttattaaaattgtatagcataagtttgtctggctctatcaggggaattttatgtcagaatatagaaatagacaataccatgaaagagaatttccaaatcaatgtaaatggtggaaaaactttcagagatgttgaatttgacggttgtattattcgaaatattccgcggagccttattcgaattgatgatgcagatgcgaaaataggtaatatcaaaattaataattgtataattaagaatgttggagctaacggctatggacttataaatgtaggaaaagcttcctcgataagtacaatatctatcacaaacacaacaatgatagatattggtgatcagttaatggatatacgggtagatgttgataagattagtattaataatatgactttctgtaattatactattggtattccgaagatttttcttttaaataagcagcctaaggctattactgtaaagaactcaatctttactggagacaataagggcgataaagtaaattctggtaatggggattattcaagttatttgaatttttcctcatgctatctcacttctgattttgaagtaaataaaaataagtttacgaatgctgttattgtaggtttgacttctgaagagttgtttattaatcctcgtcaagatgattttcatttcaaaagcgatgtgaaatttgccggaaaaggcgaagttggtgatcctagatggtggtagctttgaaatttgtactctatacaaaatattgtataaattaggaaatacgggactcattgtgagtcccgtattttttttattggctttttacaaaagccaaagatcgtgtcagcacgtaataaagtaaataacctgaaggagtttacagataccatctgttccgttttctcccaatcctctactcaaatatgaataatgtatcaaatctgggacttttgtaaatatatggtttatagggacaagaaggagtttacagtcaatatgaagaatatgtataatactcccaataaagaaatagttactgttgaaatgaaccatttatagaagaaatagacatagcgaattcataactagggattgattatgaacctatttatatttgaaaacaaagaaaaatctataaagaaataggctacttatcacaagcagcctattccataatacttattgttgtaaaactaaatttagcatactatctcgctaaatgtttaatgcaaatttacagaaaagtataaaaggaactttgcacttctagtttactaacgtgtattatttgaccaaataatgtttttaacctcattctttgtattatttgttcgtcttatattctgtgggggtacaattcattatgtttttaaatactctattaaaatattgaggtgatgagaatccgctcatataagccacttctgatattgtgtatgcttcagaatctaatagttgaacggctctttttattctcatatctctaacaaagtcgatgggagatacccccaataatgacctgattttccgatagaacactgtccgacttagattcatactatcggcaaggtcttcaatcttaaaatcaggattttgcaaaccttcttctacggcttgtactatctggttgataaaagtttcatcaaaatgagttatttgaggtattgaaggagaaatatctccggattttcttgtaaaatgactcctaagtgcatcccgctgtttcaaaagcgaactgattcttgctttcagataacttgagctgaaaggtttagttatgtaatcgtcagcaccgtattctaatccttgaatccggtcatctaatgatgctttagcggataaaagaataaaagggatgtgactgatattatggtttttcttcacagcttccaataattcgattccatccattacaggcatcataatgtcactgataatgagatctggcatcgctgaaactgttaagtcaagtccggatttaccatctgcggcttctagtatccgataatccttttgcaacatattcaccaggaaatgccttaattcttcattatcttcaactatcagaatatcaatgtttttatctgcaccttctgtcggacttgtgttttctggaattttataagaagtagtggtctgctggctatcattcatgataaattcaatattttcatcagatttaaaagcatcatagtttataggaagggatacttcgaaaacacttcctttacctaaagtactatctacttttatagatccatgtagtaggtgcaccaattctttcactaatgaaagtccgatgccacttgataaattattatctttttggcctagtgtctcaaatcgtttgaaaagagtatcgatttgatataaatcgaatcctttcccctcatcttttatactaaagttcaaggcattcttatcgaaagtaactgttatgagaatactttttccgttcggtgtatatttgaatgcattggatagcagattaaatagtatcttttcaagcttatcaatatctgtataaatggtttgatattcttgtggacagtttagttcaaaatgaatatctttttgatgtgctatgctggagaaattctcgaatgtttgcttaaacagtggtaaaacatctacttgttcgatatataacttcattttgttattttgtattttcctgaagtcaagtatttgattgataagctttaacatccggtcagtattccgtttagcagttatcatattctcatgtccctcttggctcaaaggttcattattgattacctcttcgataggattagctatcagagtgagcggtgtacgaagttcatgtgagatatcggtgaagaagcgtaatttaagattagtaagttgttgctcaaaatctacttttcttcttaaatttagagtgtataccagaattcccgacactataaatatggttatcagtataagaaaagcgtaaaccatccatgcccatttagtttcccagaaagtgggttctacgtgtatggcgagtgcggttatattctctacccagactccatctccattggttgatttgacttctaagataaagtttccagccggtaagttgacaaaactggctgtatggttttggttgatataggtccatttttcgctaacccctctcagtcgataggcgtattccaatttttctttattggtaaaatctaaggcagcaaaggagatagatacattacgttcgtcggcttttaactttaacgtattgtctaaaatagatgatgagatagagagttcatcgtttttgcgaatatcagcttttgtgaagactattggtggaataaaggaacttttttggagtttttttaaatctaactgtagagttccttcataggttccgatatacattttatcatcattgtctaacacagaaggcacttcggtaataggtaaatatgtgtgaaggttgaatcggtcatagttttcaaactggtgcttctttggatcaaatttgcaaatagagttttcaaagctaatccataaatatccttttttatcttctgtgatagaataggtcatatccgaaggtaatccgttctttttattatagtgaaagaattgaatttgttctgataataaattatcagagatcattttactaagtccaccactatatgtaatgacgtatatttctttcgatttggtttcgagtgtatagaatacatcattattgcttaagctctctgaacgtgactcttcacttttattgtgataaaatattatcttctctaatttttcaaaatttgtagagaatgttaataaaccatccattgttcctgccattataatgccatcagaggtacatctcattgttcttacttttgaacattgaacttctgggtagagttttaacctgtttcctttgtgaatgaaatgtagatttggaaaagttccttcaacaagattgacgccgccaccgtatgttccaatccaaatacgcccttgtaagtcttcacagatggagtaaatggaattggaattaatgctggttgagtcatttggttgatgtgtgaattgagttaatttatatccgtttattccttgggtagctacatataaaccatttctcctgctccccatccatattctatgttgcttatcttcaaagaaacaatagatatctgcacctagagacagctgtttgtctttggctatatttccggatacacttagattacccaaatagttttggttgtcatcataaatttctactttttgatttttagaggctacccataagtacccattactatcaatgaataaacctcgtacttctataccatctgtattggatatatattgagaacttccgttcgaaaaggatattttatcaaatcctgatccacaccgggcccagaggttgtgatgagaatttatcatatagttcattcctacagcttggtagtaaattttatttcctttgtcgtatgagtaagcttgttcgaaacgttgagtttgggaattgtaaaaagagagttcgccaaggggaggtaatatccagatagttccatggtcgtcttcgtgaataaaactgttgtttatatgttgagtagtggtaggataatcaataaaatgaataacgccgtcattcatattacattgcattactttttctcgaccattgaacatccataaagttccattgcgtgcttgaaatacttgttcaggtcttacaggttctgctttttcatcaatagttatatactggaaggattttgtcagataatcaaaaataagaataccgcgttcggttgtgagtactaatttcttttcttgcaaaagagataattcataaaaagattggatgggatgtggaatttcgatgtcttgtatttgatgatcggagttataaacagctagttttccagtgtcttccgccagaaaaaaaagtttgtctgttctgacagcatgtttgaattttcttttaccagacaatttattctttccataaacccagtgtcctctattggttaatacccattcgttgttatactgatcaagggcgattgaatatatttgatttccatgctctggaacagaaaatggaggaatatatattaggccttctttctctttgtatcttttttcgtcaatgcgccaaagactaccatcatttcctatcacccagagtataccattttctagagggatcattttgtttattgattcgcattgctttatatctgggtgatatgaaaaaacatcgatataactttcggctgcgatatcaaataaatatattttatagtcataagtttcacaccaaatagtattattatgtcccattttagcatcctgtaatcgattatgttgtagtctaactttatctgtggggtaagatttatagtttttgaaagtatacccatcgaatttctccaatccgttccaagtgcccagccagatatacccttctttatcttgtagaatgctttgaatcttactttgcgataaaccgtcttcaatagaatagtgtttaacactgattaaaccttgagcggacactagcttcgtattccatatacaaaaaaacaatattaccaataggtgtatttttactctcatatcgattaaatcaaaggtgaatatgatacaaagttatacatttaaaaatctaattgaatataaattaaccaagaaattggttgatggtcaatttgtgtaatcaatcgcacaaatagtataagaacgtcttgaggtagccgcctacatttgcactaaattctaaaaataaagctatgcgattggataaaattaaaatgtcagtgtccttattagtatttactgtatccttatcttcctgttactataaaaaggtggatccatgggataaaatgaccgaggtttatgagcagatagtacctcctacgtttcctgataaaaattatgtgattacagattattatgatggaaaggattcgttatatacgaaagcgataaatcaggctattactgagtgctcagttcaaggagggggaaaagtcattattcctaaaggaatatatccgacagctcccatccgattaaaatcaaacgtgaatttacatttggctgacagtgcggtgcttaagtttactacggattataatctgtttgatacggtacggacacgtcttgagggaattgactgttataatatttctccactaatatatgcctatgaggaagtaaatattgcaattaccggtaatggtataatggatgggcaagctgatagatcaaattggttctgtgatgagagaattcgaggtgtggtgcagaaagatggtaagcatacaaacgaaaagacattgctttatgaaatgaaagaggattctgttccttttgacaaacgtgtgtttagtggaaagagtagcatacgacctcaatttatcaatctctataagtgcaaaaatattcttctggaaggatttacgattaatcgtgctccattttggctgatccatcctttgttgtcagaaaatgtaacaataaggaaggtgaagatgcaaagtcatggttataataatgatggctgcgatccggagtcgtgtaataatgtattgattgaagattgtgattttgatacaggtgatgattgtattgctattaaatcagggcgcgatgaagatgggcgcttttggaatatcccaagtgagaatataatagtgcgtaattgccgtatgaaggatgggcatgcgggagtagctataggtagtgaggtgactggaggatgccgtaatgtgtgggtagagaattgccggatggacagtccggagttggatcgtattattcgtatcaaatcgaatgcgatacgaggtggtgaagtagagaacttatttgtcagaaatatttttgttggtgaatgtaaagagtctattttaggaatcgaaatgaaatattggcgagtagagaaaggtccctatctcccttatttccataatatttatttggaaaatattataagtaaaaaaagtcagtacgtgttgcatttggatggttttgaagacaaaacgcagatacaggacatttttataaaagattgtgtgtttgatggtgttggggaatcaacgattaatagaataattggagccgataacattcgttttgagaatgtgagagtgaatggaaaaatgtacaaatgaaaataaactaaaaataggaaatatgagtaaagaaaaagtttttttgattgtttttgcacttttaatattgggtgtagagaatatttttgcgggaggaacaataatctcaaatgctaagcgtattgcttccggtaaaattgaattggaactgaaaacagggaagttaacgcttattcctttgaatcaaaattccattcgtgtacagtttagtcaaccagattctgagccggtggaggaactgatttatactgaaagcgttaaggctcctaagcctcagataaaggaaaatgatcaacaggtatcattcacccttgacggaatttcggttatgtttgataagcaaactgaggcattaacttttaaggatcgagatggacgggttattttacaggagaaagctgaggggaggtcaatggttaactcaactgtacaaggggaaccaacttttgttgctgaacagaaattcatatctcctgtggatgaatatatttacggtacgggacagtttcaggatggatatcttaacattcgtggattgacccggcgcatgacacaggttaatacccagatttcgattccgtttatcttgtcaagtaaaggatatggtttgctatggaataattatggattgacggattttaatccggcagaagattatgtaaaactgattcctgggacagaaaatggggaagaaatcacggtggatgctacaagtactagtggaaataaaaaggaagtgagacgtataaacctgtttacagcttcattaacagtgccggaaacgggaaattattctttattattagatgttgggcaacgtatggcacgcaaatattttctgtctatagacggccgaaatcttatagacgttaacaatacttggctgcctcccactacatcgttgattgtgaagttagagaaaggaaaacatgaaattgaagtacaaggtgaacgaaacgataaacctttattatattggcgtaaagtgacggatgaaacaatatttcgctctccagtagctcaaacattagattatacagtatttgcaggagttggggatgaagttatagccagttatcgagaattgacaggagctgcacccttaatgccattgtgggcaatagggtatatccactgtcgggaaagatataatacccaagaagatcttttggaaaatgccagagagtttcgtaaacggaaattaccaattgatatgattgtacaagattggcaatattggggaaagtatggttggaatgctatgcagtttgatgaggaccgatatcctgatccagctgcaatggtgaaagaacttcatgacatgaatatgcgattaatgctttctgtatggtcaaaagtgagtagaaagtctacacttggtaagcaaatagaggaaaagggatattatatttctggtaccgagtggcttgatttctttaatcccaatgcagctgcattttattggaagaattttaatgaaaaattattaaaaccttatcgtattgacgcatggtggcaagatgctacggagccggaaaacgatgatttaaagaatcgtcgagtcaataaaggccagattccaggggaagtttaccgaaatgtttatcctttatatgttagtaaaactatctatgaaggcttacgtcgggatgattcgaaaagaagagccatgatttttactcgaagtggattttcaggaatgcagcgctatgctgcagctacttggtcgggtgatgttggatacgattgggaaactttgcgccgtcaaattactggaggattggggcaaatggcaagtggattaccttggtggacctatgatgccggtggatttttccgacctcgtaaccagtataccagtcctgaatatcatgagatgtttattcgttgggtccaagcgggaactttcttcccattgatgcgagtacatggctataaaagcaacacggaaccttggcgttatggggacaaggtagaaggtattgttgctcaatacttggatttgagataccgtatgcttccgtatatttattctcaaaatgcagaaatttttttctcgggttctactttgatgcgtccgctagtgatggatttttcaaatgataggaaagctttggaacaaaatcatcagtttatgtttgggccttcattgttagttgctccggttactaaagcaaatgtaagtaaatggaatacatatcttcctgattatgctgctggttggattgatttttggcgtggagggaaataccaaggaggacaaagtgttgatatagatgttgatatggaaaaaatacctttgtttgttaaggctggctcgattattccatttggtccggtaaagcaatatacctctcaggaggagggagaaaatgaatcattagaaattcgtatttatcccggagcggatgcctcatttatgatttatgaagatgaaggcaataactataattatgagaagggacaattcagtacaattgaattaaactggaatgatgcgaaaaaagaattggagataggcaaaagaaaaggagtatttcctggcatgaagggaaaaagaacctttaacatcgttctggtttctccacaatcaggagttggaatctctacctcttcttctggagtgactgtctcgtacaatggcaaggctacaaagctcaagataaaataaggtggctctgaatcgttttgctataaatttttaattacttaatatagatcgatgatatgaatataaaatgttattactcggtattacttctaatacaactctttttaattaattccattaatgctttggctagtgatagtattaatgtcaataataactcttttttttcatttgatgaacaaatcgtaaatggtactacaggaacaccgcttggagggtttgggtgcggggctattaagtttgatgcgaataccggaacattctcagcgatgactgttccaccagctgatgcctacgatttcaagaatgtagcagacgcacaattccaactttttacaaaccggaatgggcaaatagagacgaggaatattttaaaagcaattcttacccatggaagaccaaatgatgatgctatttggcctttgcataaagttgatttcggctctgttaatggagtgagaatcgaattaacaggaatctcacctttagataataaggattatacgaatatgcatcttccttatgctttatatgagattagccttaccaatatggaaagttcggaagttatttctgcttttgctctcaaatggaatagtgaaagtgctccatttttctctttaccggcaaaaggaatctatagtgatgaatggagtatcttggtgaaaactagtcattccaaggcaggtgtatcagtaggcgatgacaaggaaaaccgttttttgaggagcggtgtttgttcttcctcgcaagaacaggcacatacaggcaaggttgctgtaaaaatgaacctgttgccacatgaaactcagaaaatatattttgtggtggcttggtatgatcgtactgaccctgaaattggttattataagaatttgtacaaaactccgagggcgattgctgaacatggtttaaaggtattttctaaattgaaatataatgcagaaaagctggtaacaggaatgcgggcttctaatttacccggttggctaaaaaatcagacgttgaatactttggttaatgttgtgactaattcaatgtataaaaaagatgggagggtagcttttgctgaaggacaatggacttgctttggtacgatggatcaaatgtggttggcaaggcagattatgtatatgttgattccctattatgcatggcaggaattagcttattgggctagaacgcagatgaaaaatggacagatacatcatgattttaatgtaatgagtgtaggtaaagagcgggaaaaaagatcagtccttgtttcttgggatgatacagagcatatagattatagaaatattcagaaatgggttgatttgaattgtggttttattatatctgtttttgagatttaccgggcgacagctgaccgtaagcaatttgatttattatggccgtatgttaaaaaggctgcgcaacgaatccttgatcaggtagaacaatatggcagtactaagtatccatttacattcgatggatcagagaactcttatgatgccggaggaaatccagatccgtataattctaatctttcagctgttgcttataagatgatgatacaactggcaggtgaaaaaggggaggctgatttagtaaaattatatgagaatgcgtataagatggtagtgaattcttttcataatcgttatatcagagatggacaatttgtggcaggtaagcattgcgaatcaatatttgccgggcagtggttggcttttcatctgaaattaggagaaatatggaaagcggaagatacagattttatattaagtaaattggagaattattattatccttattatcgtggacttggatatccggaaggtacttatgacgaatggagtccttatattttagcccattatgggggattattacttaatactggtcgattagatcaatggcatgccatgcagaaagattcctatttgcgacagtatttggatcgtgacagagtttttgatcatccattgaatattttgcctcttgtgaatgaaccgaaatgggtatcgacaaatataaagagtaaaaagcaatatataagtattcctgctatgtggagaaattattatgatattgtagggtttcatcgcgattttcgtagtaaagaattgtggataaaaccaattattcctaaaacgatgaatcatgaaatgaaaaatgcaatgttcatttctccggaaggttacggttatatagattgtaaggaaagcggtgaatatatgcaagataaggaaatcgtgattcggacggagagtccaatgcctgtaagtactttatatttatcagataattttgaagaaaatatttctgtaacgattaatggcaaaaaatatccttttacacgaataggctcgggctatgcgaaagagatagcggttagatggaatggaaagattacagaaaaagggatacgtatagtggtaaaaggtacacctgaaaagaaggtaattcctataccagtgaaacctgtaactggtgtgatttctaactcttcaataaatcaaatgtctccatatgagactatggaggctgaaaatgcagataagttggcaggaactagtattgtgcagtccaataagggaaatagatatgtgacctcctgtaataatttcgattatattcaattctctaatattgattttgggaaaaaaggggctactcaattaaaaattagagtttctggtttatctgaaaattctgagatagaagttgtacttgatgatacatcaggtacagtagttggtaattgtaaggttcctgctacaggtggagaggaagtatgggtggagctagaatgcccggtgggaaaaattacggatattcataatgtcgttttacgcttttatggaaatagctctgataatttaatgaatattgattggattcgttttaaataacagaatatatgtatgatgagattttttgagagagattgaaggaaataaaaagtatagattgagaagatacggaaatatttaaatatgtctaatctatgcttgttaagatagcgaataattaatttattcttagatggaaaatcccgggaagttttaaatcccgggatttctatattcattcttgctcaaaagtctcttcttctttatcatcattttccttttcttccggatcattcttaccgcgtaaatatacggatggagatactccgaactgtttcttgaagcatttactgaaatagaatgggtcttcgatacctttcttgtaagatacctctgccactgtataacgattttcaagtaaaagttcggcagctttcttcatgcggatgatacgcatgtattcattgggggaataaccggttattccacgtaccttgcgataaaaggttgaacgccccagtcccattactgaagcaaggtcatctacggcgaattcactgttactaatctgttcttccagaatagcctgaagcttatcggcaaattgtttgtctttctctgacgtacagatagcaggagttatcattcccggatcatccgagaatttcttccgtaacttttcacgttgctttatcagttggaatgctcttgccagtaatagcttgggactgaatggtttagtgatatatgcatccgctccgctttccacgcctttcaggtgattttccgctgagctcatagccgttaataatataataggtatatgactggtatcgaaatcatttttaagtttgcgggtgacttcgaatcccgtaagccccggcatcaatacgtcgcagatgatgagatcagcatcgtaagtacgtgcgcgttccaagcctgaaagtccgtccgcttcagttaccacctcaaaataaggcttgaactcttctttcaggaactcacgtacatcgttgtcatcctcgatgatcaacagtttgtactgatttgaaggagttttttcctctgcaatatctacgtctggaatgttttcctcttcatagctttcctgccggtatgccttttcttccagaaaggcatcgtgaggaatcaggaagtctttctcttcatatacactggtgtcggtggggagtgaaaccgtgaaaacagatcctcccccctgattctcatcgtaagtaatgctgcctttatgaacatttacaagttcgtgtgtcaggtgcaatcctattccggtgctgttacttgagaagttgctttgcatgaaacgtttgaacagttctccccgtttctctttggcaatgcctattcctgtgtctgctacggaaatttccagacatttcttatgctcgtccactatggctgaaagtgtgactttaccattgcttggagtatatttgaaagcattggacaataaattataaaccaccttgtccagatttcctttgtcgataaacattttataggaagctaccgaaggttggaaacggaaatccatgtttttagaggccgctgtgtccttaaaacttaaaaatatctcatgaaggaagcccatgacatctgtttcttccaaagaaagggccagtttgttgttttgcatttttctgaattccaataactgattaatcaggcgcaacatacgttgtgtacttttattcatgactttcagtgaattggtcatttccttgggaactttgtctatactttgtattttttctaacgctccttgtattaaggtcaggggagtacggaattcatgtgagatattcgtaaagaatacaagcttatattccgtcagttgcttttctacctgcactttattacgcaaaagattgaaatcacgcactaacttgtaggtgatgtaaagcgcaacaataaacaatagggtataaatgaggaatgcccaggatgtttgccaaaagggaggagctattgtaattttcagaacggcctcctgatcgcctgagatgccggtagcattgcagacttttacatgcagactgtacttacccggtggtaggtttttgtaagatgcaaagctgagcggagagggtttactccattctttatcataattctctaaacgataagtataggtataactgtttattttcgaataatcgaatgtcgtgaaatctattacgaatgatctttgaaaatacttcaattctatttcatctgtgtacatcatggctctgtttaacggtgaatcagtatctcccgggcgcatggatattccgttgacttgcagattagtgaaagtaaccaccggattgagagcaaaattaattcctgtttgtccggggttgattaccagtaatccgtagttggtaccaaatagtaaactgccatctttactgacgcatgaactattgtcactatatacatctcccagtgtataagccgaggagaagaagttttcgaaagcctgcgtttcaggagtgaagcgtgaaataccatattcggttgcgatccacagtttttcttgcctgtcttctgcaatagcctgaaccatgttgtttaccaatccattgttggtgtcataatgtttgaattccaaattcttatagccattatccggggtacacatgcttaagccgccgcctgatgtgccgatccatatccggcctttagtgtcctgatagatacattttatctcattactgagtagtttcccattattgtaattgtaggtcaggtagttcgtggaattggctatcagagagtccggatgaaacacagatactccgtcactgtttcctatccacatccatccgtttttatcttccatgatggcgcgtgttcgtcgctgtccgaaacttttgttcagaaaatgccggaaggtatatccgttttcacctttgacggctaaatccagtccacctccgaaagttcctatccacattcttcctttccggtcgcagtataagatgaagatattattattgctgatggatgaagcattcccggattggttggtataccatttatcaccaatgcgaagcccctcgccacgactccccatccatacggttccttcattatcttcggctattgcataaatattggagttgaaatgaagtttctttttctgtgtcttcatttgcggatcatagacaatgactcctccgccccgggtaccaatgcaaatatcatcattttttaaccgggtaatcatacgtacggtatttgaacggtctgacaaagagacagcctccggaaaaatgcgctttattccttcatttaaaatcgtcaggcgcgctattccggcatattcggaactaacccagatagcacctgaactatcttccatgagatattgcagataattggaactgatatggctgaagccgtcaatctgaaagtcgaaatgttggagttcttctgtaagggtatcgtaggcaaacagtccgttgccataggtggatatccagatgatgcctcgggaatcgtgtactacgtgatagcgttccatatccacgtagtttaatttgtcgggagtggagagttgaagagtcttgagggcgcgggtcttcgagttgacataccacaccttaccggtattgttatagatccagaagttaccgagattgtccgtcaggacatttccgtttttaatgtccaattctgcctgacggtggattcggtttgtttttgtattgaacaggtatcctccgttcgaagtgaatataacccagtcatcttgcagacaaagcgtgccgtatatggtcagggcacttttctctttttgtaaatgggcaactgttacgcttggcttgttttcttcttttttagagatgataccgtttgttgacaggaaaaagatatcttttccgaaagattgtgcggcaaaagtattgcgcttttcaaccaggatagtcttatcaccggttacctgcactacgccacaatcggtacctatccagatatttccctgctcatccgggtatacataagcgacactgtctgagggaagattgcctaaagattttctaaaactgacggaagaaaatgcttcgttttgataagtcacccgccggcagccgtttcggctgttccatagccatacgtcaccattggcggcttctgccttgcggtcgtagttttgtctgtattcgccacagccggtgaaatctacgaaacaatcttttcttagatcgtagcaattgaagaattctccggaagtttctatccacaggaaaccattcttatcctcgctgatggttctggcgtgattggtcgacaaggagatccggttgttaccggattcgctttccgggaggaaagtgacaaatgaattgccatcgtagcggctgagaccattcagggttcccatccagataaatcctttgctatcctggaatatgtaacagatggaattgttggccagtccgtctgtggttgtcatgtgcgtagagcgcacttcgatggatgcagaaatactaaggaggctaactaacaaagatacacacgtaagcaggatatgctttttcatacttcatagattttagtgcgaaacaaaaatacggaaaaagtgcattgtaacagactatcaatgcacttttgttttttaatccatgtggaacacttcaggcaggggtatggttaccggagaattgtcgggattcaccttcatgatatctgccatatagtcccaccatttttgtacaatagggttggcacccatatcttgcgaggattcttcgcctttcgttttctggcaggcaaagaggatgttggtttctttgtcccagtagatggagtaatcatacactccaccgtcggacaacatctttttcaattccggccagatggccgcatgtcttctttcatattccttttcgtagccggatttcaggaacattttgaatgcttctcttttcatggtaattttggtttatagtgagctaattggaatcggtcacactgaaaatcggttcttgtgttttctgttcggtgcggtagaactgaatggcgctgtcattcatcttcggatgttgtttatttagcaaattgatcatttcggcacctgcccagatcacaggaccatagccgtgcgcagcatacacattgaccggacgataataatagaaagccggatcgaatgccatgccggtacctacacaagttccttccacctgtccttctgcattgatctgtgtggagacggcttgccaacccaattgagcaaccgggccgtaggccattgcatccagccatccttggttgatggcatgggcgatgcaatatacatagatggctgttgctgaggtttccagataagagtcattccggtccaataactgatgccagagtccttctccactttggcaggcagctaaaccacgaacatgttcgcgaaacagctccatgagttttgcacgctgaggataattttccggcattacgtccagtacttcggtcatggtgagcaaagcccagccattggcacgtccccaatggaaagccgggtgatcttgcataccttctacccaaccgtggcggaatagtttcttttccgatacccacatccgttctgcaaactggaatatctgcctggtagcttctgcaaggtaattgggcttattgtctttggccaatttagaataccaggcaacaggcggaacccccataaacatatcgtccagccacaatgtattgtattggggacggatacgggcgaaagttccgtcggcaaggcggtattccttgttcaagataaagtcgaggtaattgtctatcaaaggatagagattgagagattgatcttgtaattgggctttgatcatggctgcacatacggctccggcatcatcgagggcatggggagtcagaatttgcttcatttgcggatcaacctgaccacttttctcttgtaattcccggaaatgcggcgctacttctgcaaggaaattaaatcggtcagtgacgtatttcatgtagttggcgtctcccgtagctttggcagcggccatcatggcagagtacgtaactccccattcataactggcaaggcggaaagcgcctcgttccagctgtgcatcagccggtaggttcttgtaatctgtgattacctttccggtctttttactaacaacgcgggtaggagtgttcttttccagatagcggagtatgcggtcgatgtctgtctttatttctgtagtcgtaagttctttataagggactttgtaagccggttgtaatagatgcaacggagtgttggagtcatttattacttctttctttttctgggcgtagatactgataccggttaacaacaaggcacctgttaggcaaagagtcttaatattcataacttatagttctttatcttttgggttattacttaaaattatatcctctgaaccaccctttcaggtccggaccgaaatagaaaccgggttgggtaggctggttgtaagctacgttctgtgtggcaatgctgatacgatacaccggatcttccaggaaagtatggaagcggtaatcagtgactatcggagagacataaagacggagagcggtgttgtcttccgtgcggaggagaacttcctcacgccagtcaccgataatgtcgccttgcagacagggagttgctttggtgccgctgtttgatgcggctccggtgaaagtagccagtggtttgcaaacgccggctttccagtcgtatttggaaactacattcttatccagcaattcacgaagcagatctccatcccaccatacagccatgttggtagaaaagctttctatatccggattgattacttctcctttaatattacgtagtcctttcgattcccacgaccacatttccacacccggattcgtcgggtcgatatcagctgccatacaacgtcctacatctgtaccactttttacctggaacaaaaccttgcccgttgccgcatcacggaaacttgagccgtctcttttattttcgtggcaatcccatacctggagtcctttcattgtaggggagaatttcgtcagatgtatggcatccccgtgtcccattccggtggaataaagccctttaccattattatcaatagcgcaggaaccgtagatgatttcatcacatccgtctccatctacatcgcctacacgaagattgtgattgccttgacctgcataagcttcatttccgggagtgttactatcgaatacccaacgttgctttagttcttttccattccaatcgaaagcggcaagtactgcacgtgtataatatccgcgacacatgactgcactgggatgaacaccatccagataagccacggctgccaggaaacggtcgctacgattggcacggttatctccccaatcttccagttgtccgcgttcgggaatataatcgattgtcttcatggctgctcctgtaagtccattgaagacggtgaggtattcattgcctgtcaggatacgtccctgattgcgcaaaggatctccctggcgtggtttaccgcggggatcttctttatcgaagtcgccgccggtgggttgtgtagggtcccctggttcacgataatcggcagaggcatctccgatgatatttccctggccatcaatagtgccgtcggaagttttcatgatgatttcggcacgtccgtccccatcgaagtcataaaccatgaactgggtgtagtgtgcacctgcacggatattgcgtcccatatcaatgcgccagagtctttcaccggttagacggtagcaatcaaagaatacattgcctgtatacccgtcgtgggcattgtcatgagcatttgtagggtcccatttgagaatgatctcatattctccgttgccatctacatctccgatggaagcgtcgttgggaatataggtatatttctgtcccgcaggagttgtgccatctgtcggaggatcaagaggaatattgatatagcctgtcggtgcgttggcaggcaaggtgtagctaccttcgatgtgtccggtttctgcaccgttcacaactggtcttatggtataagtagctgctttcttacttccatatgtatcccgataaaaggttcctgttgtggcaggtacttcagctactttctttccgtcacgatagaggttgaaagaagtgtttaccggatcggaagagagatatcgccaggaaacagctacttctgactggttttcgcggatagctaccacacctcttcccagcttttccttttgcagcttcgaatagtcataagccggagcattagccgctattttgtatcttggtgcagtcaggacaccggatactccgatggagatcactgtaattgctgcaatacttatcaagaattttaaagaaggttttttcataatacttgtagttctcattagttgcaaaattacgacttcatacgggatctttccatggactaatatgcaatatttatggaatatcgtacaattatcggctcatcttagaatttattgccatagattttccttaaactcaatctcaacgatacgtagctcgtggttagctttatccccattcttggctttgaatagatccagttcattggcaacaggagcagctacttctacaatttgtccgaaagcatctccttctttgctggctcccttcagacggacggtaatctcgtcggttaatacaggcttcactttcagatggacatatcccagactttttgcagtttctccactccagatcagttcgtcacctgcataaatttccagcgggtagctgcgcatacgccactcggttagtttcagacacacttcatctacccgtgcagcacgttccagatgataagtaatccaggcagtgtttactttaccgtcatttttccattcgctcagttcattatcatcaaagctatggacagcatcttcattattggcacctgccacggcggataaaacggcaatatctaccttggtatctttgtaagaaggtgtgagtggagtttctccgcgggttaaccagccttccagtttgtttccggggatatatttgcttagcccgtctttcatttctaccggtaaggatgaaagactgatttctgctggtttcaagccatctgctttcgctgttatgcggacttttcctgcggtagtcagagagcggagcagggcacggttgatgccacattctacgggcaaatcttttgaaagaatatagttgtcttttccttgtgcgatgcctccacaccattcggcagggccttccacttcaaaatgtatcagatcattggctaacgggcaacgtcttccatgcttatccataacttctacctgaagcaacaccatgtctgcaccgtccgctttccatccgtcagggctctgaacaaaagtcagtctgatttcttccggttttcctgccgtttggagttccgtacggcaacattctttgcttgtttcatcatagcctatggcttccagctttcctgtttcgaactgtacatctttgaaagtatacaggaaatgatattcccgttcaccttctcccagagattttccgttcaggaaaagttctactttgtcagcaccggaaaccacatataccggttttattacatcttctttgtagttccagtgtccgatgatgtgaatgcgcggctgctctatatctacccaaccgtcccacatcacctgatgggcataaaatgcatcctttggaatacgcatggcatctgtcactccgctgcgacgatagttttcttcaccccgaaagtgggtatttgtatccgagaagataattttcactccacctgaactgatacgtgtacctgtccccggacgttcctgccaatagtcgaaccagcggcgtatattttcaacagccagcatgtcctgattatggttgtagtcgcttgcatcctttccacggtacagtggtccggcaccttctttatggtaaggatagctgtattcatcccaatacttgcgcagtccttcgtcacggctgtattccatagcccacatggggtgatgggcacttttgttgatgtaaagcatttcaccgccatattcagcttcccgtatatccagcatctcgcgcgatccgatggctcgtccgccgtacggatcatattcgtcacgtatggctttcatttccaacatatgctcacggctgatggattcgtttcccgattcatagaaaaggatgctcggattgttacgattgtatatgatagcatcgcgcatcagttctttccgttgctcccattgcctgccgacacagtccttttcagcgtcacctgccggcatagcttgaatcagtcctacacggtcgcacgattcaacgtcctgtttccagggggtgacgtgcatccagcgaaccagattggcattacatgctgtcattaatccattgctgtaatcgcttaaccaggccggtatgctcatacctactcccggccactcgttgctggttcgttgtgcgaaacctttcatttgcagtacacggtcgttcagccagattttaccatcaccgaagcgcgtcttgcgaaatcctgtgcgggtggatacttcatctactttcttattatctacccacagactggtctttattgtataaagatatccgtaaccccaactccagaagtgcagtttttccacttctgccgccgctttcagtgtagcggtttctccgggtttcaccaacaccggttcacaggaaaaagtcttcactgtatttttgtcccggtctatcacttccacttggtaggagacaagcttattcttccgatgttcattttttatttgagattccgcatgaatggttgccttgtgcgacttcacatggatatcgtcagcatatacatatacgcctgttgttttcagattgctatataaggggagggtttgatagagtttatccgtgacgtgcaaccatacatttttaggtatcccaccataattggcattgaagttccggttgttccactgatacttggtatccgtattccgttctttgtaatcccagttattgtcaatgcggatggcgattacattttcctgtccatgttttatatgaggtgtcaggtcgaaaccgacggccataactccgttctcgtggaagccgatgtatttgccattgatatagaaatcagcgccctgacgtacaccttcaaattcgataaagacttttttctggtgattgtttgcggggaggcgaaaatgtttccgataccatacgatggtatctgtcagttgttcgatgctcagtcggaaagcttcgttttcattgaaagcataaggtaatgtcacttctttccaatccgcatccgcataatttattttttctgctccggatttatctcctacggatagtaaccaacctgaattgaaattatatttatcccgtgattcggaagctgccgcatgtaaacttgtccatagaaaggtcagcaaaaatatggaaaataggtgtttcatagttttatctctttttgattagaatacaaaagtacggtaaaatatattattcctcactatgcataataaaacaaaacgagttctgggtatttactcccaaaactcgtttgtctgttctgtagaatcaattaataaccgggattctgcagggcgtccttttcctctttgctcagagcactgccggatgcattggtaataccatccaggaatgattgtggaatggggcgataatagtgtttagatgaattaaactcaccgatacctctggatacaccatcattaaatttgtgccagcgtgtgtctaatgttttggtacgtgccaggtcttcccagcggagtaactcaccgcaaagttcacgagtacgttcattcaataagaaacacatcatcttgtctgcattactgctacaacctaattctgtatagataggtgcatctgcagaagagttataaacatcttctacactgcttagtatcattgcattcttggtggaagccgttgtttcctgtccttccatattattggattcatagtaagtattggcatcagaatagattgcaccgtcagcggaataacctccacctttgccggagcaataagaattgttcttgtatgactgaccgccatctacatttttgctacgatcttcgccggccgcatagcctgcacgttcacgaagtttgttgatccattcgattgcattgctataattagactcacccttacggatataggcttctgcaatcatcagaacgtcatcggccgaacgggcgataatggcgtcgcgtgtaccgaactgcgaagcgatcgagttacgatatccatcgcggaatttggataaagctacagaacgtttgtgaggaatgataccataatagttgcctgtataagaggatacattccagctatgagcttgacttttgaaatagcgaacataagtatgggtattacaaataacaccgtttttcagcacgttctgagtcggatcattcacatacgattcataacgggtatctcccggattattcacgatatatttgagaccaagctcaccagcaacaaaacgtttatcgccttctttcgctcctgcgggagcatatccgctggcaatgtcttctttagtccaggtgggcgcaccgtttgtatcgttcgctccgtaacaggtgatgaatgatttccagaagcgagagtcgtttacgcggtcaaatacctgcatggtatattcggttgcactgacatacgagaattcacgtcctcctgagatatcacgtttggttcccgccatatcttgatatacggaaggatagtaaagatgcatttgattaccgtagcgtccccatgtggcttcgtcattggagaattgagcggctaaaataacttcacttactttttcattcgctccattgggctcattataatcccacagttctacatagttagtgcacaggggatgcgctgcaactacttcctgtccgtatttgatgacagcatcaaggtcagttgatacataactgctgttccagccgctatacaattctgaagcacggaataaatgggcttttgccaggaaatgtgcggcggcatatttcgtgatgcgccctgtcgcttcccctttttgaggcaataatctatatgcctcttccaggtctgctataatttgagcatagatttcttcttcactgttgcgtgtaaagtaagtctctgcactggttgaaggagtcagtttcaaggggactcctccgaactgctttaccagttcaaaatatgcataggctcttaaaaaataaccttctcccaagcgggtattgtaagttgcgctactctgattatagtattgcggcatattgctgataatgatatttgccggttctactaatccataataattatcccacatcggctggttggctccgttctcagaagaatttaagtcctggctatagtgattccatgccggcatggtgttgttggcatctgtaaattcgtctacacccatgttatggcattcgatagcccagatgtagttgaatttgaatttcagtttctgataagcacctgtcaccaattcgtccagaccttcctgcgtcttgaaacggtctgtgctgtattgggtctttaaatcttcatccaaaaaagattcgctgcatgaagtcattgaaccgcctatcacactggctaatgcggctgcaaataatattttgtttaatttcataatgttctttcttttttaatggtttgttagaatccgatgttaacaccaattacaaaactcttgattgtggtaggcgaaccgaatgtcttcttattgttgtcatagttcattaaatctgtatccagccagtcgcaagccttgtaaatggagaatggattcatggcctgtacatataccttcaaattgctgagtcctgtgttcttcagctgtttcgttgtgaagttatagcctaatgaaatattacggactttgatgtaagatccatcctgatagcccatagaagaactgtaggtatcggcggcctcaccgtttgatcccggagaataatattctgcgttttcgttggtgcctgctacccagtaatcaattttacgttgcatgtagcgtccatccaaggtgagtgaaccttggggtacatcaaatccccaacgtgaaagaatgaagacagacagctcgaagttcttgtaattgaatgtgttagtccagcctgctgtccagcgaggacgtatgtgacctacaatctgacggtcgttggttgcatcaatcttatcatcattattaaggtctttcactttgatctgaccgggtttgcggccatatacggctgcttcttccgcttccgaagttttccagataccatcatacacataatcataatatacaccgatttcttctccgacgaaccagttgttgtttacgtcttcagttctgccgttggacagttcatcaatcttgtttctatccattgaccaggttacggtactgttccaggtaaaatctttagtctcaacgggaacggcatttacctgtaagtcgataccccaaccggaagtcttaccgacgttggcataagtagaagtataacctgtcagtgaaggtatggacatggccagcaacaaatcattggttttagtcttgtaagcatcaatactaccgctcagtctgttattaaagaagccgtagtcaatacccaggttgtactgcgttgttctttcccatcccagttcggagttggccatcttggcgggatcttttgcagaaggatctgaaggaacataacccagagaggagtctgtctgtccccagttgtaatacaaaccggtgatagcacctttagtagcataagcatcaattgcagcatttccggttacaccgacaccgaaacggagttttaattgactgagccagttaatgtctttcatgaagtcttcctgatcaatgcgccatgccaaagctgcagaggggaaactggcccatttgtgtcccggagccaactgtgaggcaccatcccaacgcatggaagctgtcaacagatatttatctttgaaaccatagttcacgcggaccatataagatgccatttgagtttcagtcagtcctgtaccaaaggaactcagagtgccggcagtacctaaattgtaccataactcatcggcagaagcaacgttggtggctctcatatcgcccatttcgtagtgatatgctgaagctgactgcattaatgtcagacctaaattatggtgttcggcaaatctcttattataataaatcaggttgtccaatgtccatgaacgcttctgttcgtttttgtactgggcgccgttgttaccatcaccattgatacctccggcggcatttgcaattcctaacgtatagtattggaattcaggaccgaactggagtctgtacgaaagaccttccagcggttcccatattttcccgaaatcaacctgggcatacatactggcgttggcacggaaagtacggcgttggttggtgttgtagtccaattcccgaatcggattgatgatatttacatcaccattaggattacgaatgtagtcaccgtttgaatcataaggcacagtccaggggagcatacttcttaaagcattgtaaaggtcgcccgaaccggttactgatttggagaaattgtaaccgtaatcctgatccgaataagaagcattgattgaagttcccattttgaagaaatctatcggattaatgtcaaatgaggtcttcagggtatagcgttcgtaagcctgtcccggttgtgtacctttctggtttaaataaccgaatgaggcatatccctggaatttttctgaaccgcctgatgcacttaaagtatgttcgtgggtgataccggtttgctttccgttggttgcccagtcataggaaccgacttttgaagcatcataagttccgtttgaccatgcttgctcaatatttgcccatgaagcggcgacgctgccgaaaatagctttatcagctgtataatcgggagttgcagaagcataagaacccatgttatacttggcagtacgtgcatagtccaaccattctgccgcactcatcatctcggttacatcatgcaatgtctcaaaagtgactgtaccggaatagttcagcgtcacttttccttgtttacctttcttggtagtcacgaggattacgccatttgcaccgcgggaaccataaatggcagttgcagaagcatctttcagaatgtcgatagcttcaatatccgaaggattgatgttttcgatgccgccggtttggataatcataccgtcaacaacatacaaaggaccttgctccgcatcgatagaacgtacaccgcggatattgataccaccgacttcacccgggcgttggctggatgtgatgtccacaccggcagtttttccctgcattccttccagcgcattcttgacaggcatcgcttttagttctttttcgcctacgcgagccatagcaccggttacgtcactcttcttctgaacgccgtaacctactactacaacttcatccagcatggcattatcttcctgtaatgtcacttgtaaattcgttttcccggcaacggaaatctcctgatcttgatagcctatgaaagaaattgagatagtacctttatccggtacgttggaaagagtaaacctgccgtccagatcagtgataattccgttagtagtacctttcactacaacattagcaccgatgatcggttctccggtttggtcaaccacagtgcccgaaactgttttgctttgcgcataagcccctatagccaatactgaaaacaaagcgatgaggaacagccgctggagtttacccgtgcgaccaaacaagcttaaattcttgctgtttttcatactttaattattaagttaaacaaaagttagttttctattctctcaggagattctcaggtctccttgctgtgaaaaagtgttgcaaatatacatgtatggggtagaaaagggaatgtaggattgtgtcaaagcatggaaaattccgtctttctgactcgaaaattgtgtcaatactcatggctaaaatcaaaatgaatagtcccaatggcattttaattattccgggctttcatattagtaatgttggtgataggcaggtgaatatataggtctatagactgcaatacttaataaatctaaatgttttaacctttatgcacacttctctattattaattgcttcctttaggcaaataattgtcttttaaaggcatccttttttaaaatcttaatattttatggacattcgaaaggtatatttacttatcctgttatgcacattctgtatcttgtctccggtgtatacacagcagtctctttctgatgaattcaggaaagtggcaggagattatgcagcgctttataccagtaaagtggaagtgggctatagtccatatctctatataaaccatccttattgggatacggatgagtttaagaaaggagcggtttgctatggtgggttagtgtataccgacctgcaacttcgatatgatacttttaagaagcaattgatcgtaattactcccgaaaaacgaatactcctccaggttgacatgaggaaagtagactatttcattattggagataaaaagtttgtgccgcataacgatacttttgctgcaatcctatatgatagtccgcaaatgcgattgactcagtatgttcagtgcaaaatggggacgcctgttgagaaaggacggatcagctataaacagttcgaaaagcctgcacgttttgttttgtctaaagatggggtggaccataccgtgacttcccgttccagttttctgaagctctttccggcttataagaaacaattgaagaagtatgcaaaggaagagcaattgagttttaatacgctctttcgtgcagagtcgttgactgagctaacaagacatgcagattttctaattaataagaaatagttatgacaatatataaaataaggtatatagcagccattctgtttattatatcccctttcgtggcatttgcacagcagcaggcaggagatagtatttctatttttgaactgatagatgccgttgagaaaaacacttcgtgccgcatctatacgacgattgcagagccgtttaaagtgaaaaaggctgagaccttaaaacctactgccgagagtctgcgacaagcattgactgcaacacgttataaagttactgtctatggcaaccggatcttcgttctgcctgaagcgtttttatctaccacgcttactccgatcttgaaaggagaacagatgaaggaagaagaacaagcctcttcttttattcctgtcgtaaaatcttcttcggagaataaggtttacgagatagggaacagatataagccttcttcggaagagatggtggtgctgaccggaaaagtaacggatttcaagtccggacagaatctggaaggaattaacatcgtccaccgggaaccgtgggttgccacagctaccgaccgtcaggggaattttaccattaagcttcccgtcggatataataccattgaaatcaatggactgaatataaaggaaacacgccggcagttcatggtgtatggggagggagctacccacatagaactggaagaagaaaaccatttgctggatgaggttctcatcgtctccggacgtgtacagaatgtaaggagcactcagttgggaatggagaagttccagcccagtttactgaagaacattcctacagctatgggggaggtggatttactgaagatgcttcaaactcttccgggtatcaaaactgtgggggaggcatccagtggctataacgtgcgcggaagtgctgccgaccagaatctgttgttgctgaataatggaactatttataatccgaaccacttattcggttttttcaccgcctttaattcggacatgataaaggatgcggaactttataaaagcagtattcccagtcagtatggagggcgtattgcatccgtgctgaatataacaagtaaagaggcgagtaaggagaagtttacgggttcggcgggtatcggacttgtcaccagtaaactgaatcttgaaataccgatcattaaagagaagacttcacttcttttgagcggacgtaccacatactcggactggatcatgaagatgctgcccgaaaagagtggctaccgtgatggtaaagccggattttacgatttgggaggcgtattctcgcatacattgaatgagcgtaataaactaaatatatacggctattacagccatgaccgtttcgcttttaacgataaccagaagtacgcttacaacaatatgaacttctctgcaaactggagaagcatattctctgagaagctgacggcaaatttctctttcggttatgatcattatgattaccggaatgatgaatcggtagaagaggcggcagctgcccgcttgtcattcgctattaaccaatggtttggaaaggttgattttagttacaagctggataataaccataccttgaactttgggctcatgagccagttctataatatcaactcaggaacttatgaaccactgcatgaaagttcgctggtgaaatgggaccagcttcaaaaggataaagcgctggaaagtgccatttacattggagaccaatgggagataacccctaaactatccgtaaatgcgggtatacgctattccatgttcaaccttttgggcccgcgcacgtactatacttatcaggatggtatgcttccttcttccaccaccgttgttgactctgtatcagtgggtggcggaaaagtggttaagacctatcaggggccggagttcagattgtctgcccgctatgctttcaatgatgacttctccgtaaaggcaggcttcaacaccatgcggcagtatattcataaagtatcgaatactaccattatgtcgcctacggatacctggaagctgagtgatacgaatattaaaccccagaatggctggcagctggcagcaggggcatattataatacacccggccaggtactggagttgtcggtggaagggtactataagaaactgaacgattatctggattatcgcagttcggccaggctgatcatgaatcatcatctggaaacggacgtgattaatacggaaggatatgcctatggcgttgaattccaggtaaagaagccgtccggcaagctgaacggatgggccagttatacgtattcgcgtactttcctgcgccagaatgacccgcgcatagcccgcccggtcaatggtggagactggtatccgacggagtatgacaaaccgcatgacttcaagttggtgggaaactataagtttacccgtcgttacagtgtgtctttcaatatggattatagtacgggccgccctactaccattcctgccggacaatattacgaccagggattgcaatccatgcaggtgtactacacggaccgtaacagttaccgggttcccgattacttccgtcttgatcttgctttcaatatagagccgagccatcatctgactctgctgacgcatagttctatttccttcggtgtctataacctaaccggaaggaagaatgtttattccatttattatgtatctgagaatggtagtgtgcagggatataagatgtccattttcggcgctcctattccttttattacttataacataaaattctaaagggatatgaagaaaagaacgaatataataatcctgataagtttgctcggttttactttgagcaactgtatagatgagttcgatgctaagattccggacggcggtgtaggcttgctggtggttgagggtaatattatatcagacagtactgtcgtgttttcattgagccgtactttttccttaaatgaagatgacttgccttcgggatataataagattacagccgatgtcagtgttgtgggagaagacggttcgcgcatagcgggaacttccattggtgacgggcggtatcaggtacggataggaacgttgaataagcaagtgcgttacggactggaaattgtatatgaaggggatacgtataattctgaactacagcatccgatagaaacggctgcaatcgaagaggtcacttttgagcagccggaagattacggggatatacacattcgcctctctacgcgcaatgcaggggccacaggatcggcatattatatctggacttatgaggaagactgggaagtaagggcagcattttattctaaatggatatatgatcctgtgacagatgaagtgcatacttatgaaaaagcgccttatgcgcaaggatggattcatgcggagtccacaaaaacgcttgttggctctacggaatcgaatgccgaaaatctattgaagaataaaaaaatgtattcttttgcctccgacaatcttcgcgcttcgtattattacagtacgttgatgaagcagagagccttgtcaaaaggagagttcgagtattatgagaacaaggtgaaattgagcgaagagatgggcggtttgttcactccccaaccctcggaactgcctactaatatcacttgcagcaattcggataaacaagccattggttatgtgggagtcaatatgaatgtaagcgagtaccgtctttatatttctaccaatgacatacaatatgataatccgtatgagtgtagtcttttaccggatggagaaacggaaaacaaaagtaattatgatttatatatagcgggatatcgcattgccttttctgaaatgacggggtatcagtgggctaaaaaggaatgtactgatgtgcgtagtttgggggcgactctcaataaaccttctttctggccgttaccggacaggggatattaatatcggagtattatgaaaagaattatatcgatcattattggtttgatttcggtgctgggcttacaggcgcaggtcactgaatgtatgcgaatatatacggataaggataattatctggcaggagaagatttgtggataaaagtctgtgtgacggattcggcagaagctccgttcagtaaagtggcttatgtggagatcagcgatatgcgccaggtgtatgcacaaggcaagattgccttgaagaatggaaccggatgggggcgtatcaaattcctgcaaactatgcattcgggtgcctatcagcttacggcttatacccgttacatgagaaatcagtcagcagaccgcttcccgaagaaatatattgctgttctgaacgccagtcaggccacggacggagatgatgtggaattattaaaagattcggtttctttgacttcgggtaatccggtactttcgtcgttacgtttgtcaaccgataaagccgtgtatggaaatcgcagtaaggtgactttgaagttaccggaactgccgggtgatctgaaggatttttctttgtctgtggtgagaagggattgtgcgttacaggcttttccgtctgccgttgaagtgcaaaaaaacaataaggctgccggagaacgctttattgccgagtgcgaaggacatattgtgaccggaagattaataggagcatcggccgattcggtgaatgcccggctatcgtgtgttggaaaggatatccgtatctttgacgggcaactacagtccgatggcacttacgctttctatacctcggaaatcatgaatacccaagatatagtgttgacggctttgccgggaaaaggacgtacgggccggttggaagtaatatctccttttgcagaagtgctgcccgcgaaacttcccaagcttcgattggcatatgatgaggaagcattgatagaacgtagtatcggagcgcaattacaccacatcttaccggtagattccactcacggacaggctgtgttggaacagttgcacgatttcacgccttcactcagttataatctggatgaatatgttcgtttcaatacggtccgtgaagcttttgtagaatttgtaatgggagtacgcgtaagcaaggcggatggcgcaacgattatcagaatattgcaggatgatgtaaagcggttcagtagcttaaaagcgttggtactgatagacggagttcctattgaagatcatgatgcagtattggactataatgcgcgtttattgcattatattcatcagtatagcggcagatatacgtttggcggtaaactgtacgatggaatcatttcgatgataacacatcgtggaacccttcccggactacgcctggatgagaattcccaattgtttgcttatgaattcccgcagaaccgtcctgattttacagctccggtatatgactcggaagagcaactgcattcacgtattcccgatttccgccacacgctttattggaatccggatattacggctgcaacgaatactgtcagtttctacacatcggatatgaaaggaacttatgtggcaaccctgcaagggattaacagcaaaggagagtgtgtacaagtacaaggtgagtttgtagtacgatagtatattcctttcaggctcttctcttagtatcctcatgcaaaagatggcatctttaacatcaaaagatgccatcttttgtagcataacatggcacctttcgcagcaaaagatgccatcttttgcataagaggattatgagatgaacctgaaaggtcttattcttccacctgaaagggttatatcttccggttccaatagcctgtattgttcatactaggagttaaagcaaacaccagtacgcctgctgtcggaatctctgtagttccgatcaaggctttggctccttcagggaggataaagttatagggtttgtcgctataattaaggactatccccaaaccgttgcggtattccattgtcacaccatagggtagatccattacagggatgttcagtttcgcatagagttttttaagaacatctctttccaaggttccgtccgtgctgtcgattcctatgtatgtgatagtacctttgccaagtttacgggtagtaatggccggttttccttcataaaattcttcgatatactttccccagctctggcaatccttgcccggttttagtatttctccccaagtgttccaggtgtattctttgccatccatcacaaactttcccggttcttcggggagaagcaagtcataaaattccatttcatttcccgtcaggtcgtagataagcgagccgaaaggagcttccggtaaacgcccgtaacggtctttctgtgccgtgcgacaggttaataccagattacctccatttcttacgtattcattccagcggtctgccaatgtcttgtccgccatctgataggcaggagcgatgactaccggatactgtgacaggtctttgctttcattgatgatatcgaccggagcaccgaaactcttcaaggtgcggtaatacttgtcgatatgtgccattgtattccaggtgcggttttgtttttgcctttcgatgctccatgcgttttcatggttgaaaagaatggcggtgcgacgggcttgataatcggcaggtttcacatcacgtgcctttgcctgcgtgcgcagttgcttcacttccttaatgaattgctcgaattcacgtcctccgggagtgatggttgttccgtccgtattcacaattccgtaatgatattgctctgttccgtaaagcggttggcgataacggtatgtacaaataaaatcacttccgcccgcaaatacgctccaaagccatagccggacagcaccgggcagcggttgcggattgatacttccccaattcacttgtcccggttgtaactccatcacaccgtaagtaccctgtacgggacggaaaaaatcgttggcgaaagcgatgcgtagagggtttcctacccggtatccgcgacgtccgataccttcgttgtcaccgtaaaccatatagcgggtgtagctcacaaaatccagatcgggacttccaccgatgtgtccttcatcgtagttgggaatataattggtggttacccattggttgcgggcatacttcttaatcagcagacattgctcgttcaggaaatcattggtctgccgggctgcaaagcgccggtaatccaatatctggtgatgattcataaacatctgtgcggtcttggggagagtgatttcatcgaaagaggagtagacttcgctccagaaagcagtgccccaggcatcattcaattctttgatattattatgatatttattcctcaggaaatcacgaaacgctacttccgcggcctggttataatcgaattgtacggcaggctcattgtcgagttgccagcccacaatacggggatcgttgccataatgttgcgccagtttttctatcatcttgtaggaaagctcccgatagcggggagaagcgaacgaggcatgctgacgtgcaccgtggtcgaggagtgttccgtcttcgtatttaatcaggatttcaggatatttgcggcttaaccagacgggtggggtggcggtggaggtacacatcactacttttagtttgtatttatctgccagagcgactgctttgtccaaccaggcaaaatcaaatttaccttcttccggttccaattgtgcccaggcgaattcggcgaagtgggtgaactcaaaacctaagtcgtgcatttgcttgaagtcgcgttcccactggctttcgtcccaatgttcgggatagtagtagacgccggtcagggtgaggtctttgtcattgaaccaagtggactgtgcaaagagcattccgctcatcaggcatgcacagagtagggtgaagatctgctttttcatggatgtttttcttgatggatttatatgtatacaaaggtaagctacccatgaaaaagagcctatggaaaatagtgcaattccctgcaatataggactcttttagatgaatttccatgcaaatgtacgtgtttccattcattgagacagtgaaatgggctattttcgcaacatgaattaatgaacggaataatggatacataataaccacatcatgaaaaagaagctaataggagttttccttctaatgagtctcgtttgcggaagcatcagtgcgcaaggattgcctgacaggaaagagacgctcgaaaccttaataaaagtgaataattacttcatgaagaagtacgcggactatcgtactccgtcttataatggtattattcgtcccagcaatatctggacaaggggagtgtactatgaaggactgatggcgttgcattccgtttttcctcgggaagagtattatgattacgcttatcagtgggccgattatcataaatggggaatgcgtaacggaaatactacccgcaatgcggacgaccagtgttgcggacaggtttatatcgaattgtataatatctgtcctgacccggagatgattaagaatatcaaggtcaatattgacatggtggttaatactccgcaggtgaatgattggtggtgggtggatgccatacagatggcgatgcctatttatgctaagctgggtaaactgacaggagagcggaaatatactgataagatgtgggaattgtatagctatacccgcaatgaatatgccaagaacggactgttcaatcctaaagacgggttgtggtggagagatcatgattttgttccgccttataaagaacctaatggggaagattgttattggagtaggggcaatggttgggcttatgccgcactggtacgggtgctggaagaaattccggcggatgaggtgcatcgtgcggattatgtcaatgacttcctggccatgagtaaggcaataaagaaatgtcagcgtaaggatggtttctggaatgtgagtttgcatgatgagacaaacttcggtgggaaagagacaagcggtacggctttgttcgtttatggaatggcttggggcgtgcgtaatggcttgttggataaaaaagagtatcttccggtattgctgaaggcctggaatgcgatggtgcaggatgctgttcatccggacgggtgtctggggtatgtacagggaacgggaaaggaaccaaaggatggccagccggtgacttatgataaaatacctgattttgaggattatggtataggatgtttcttgctggctggcacggaagtgtataaattgaattaattagtaacagatttcatagattatagtataattgataaaagaatcaattaggaggaaggaggggctgtgaagtcgttccttttctttttctttgcatataaatgataatttaccagcgtagcgctggagcaaggttctccttcggcgtgcaagtaatctttcagacacggatgacgcggattcttttttccttcggtgtgatatgccggtatgtatagcgcagctttaaaaatccgcgtcatccgtgtcatccgcgtctaaaagattaaagtccgcgttcgtccgccttatccgcgtagtccgcgtacccattccctcgctgctaaattatcatttattaatctgacgaattaactaactaacataaaatgaaagaagtatgagacagcttattgcattaataattttaggactatctataactttgaatgtcggagcacaaagttacaagttcgattttacctctggtaagaaaacgaaggacggatatatcaagataacatctgctgatcggtatgccaatgcgaaaggctacggatatgatctctctccgtctccggatggaaagaaccacgctcctttcttcttttcagttgccgtaccggacgggaattatcacgtcacagctatcatcggcagtaaacgcagtgcaggagagacaacactccgaggagaatcacgccgcctcttttacgaaaatgtaaaaacaaagaaaggagaatcgctcccttgttcctttaccattaacaaacgcgatatccacatctccgacaaagaagatgtgcgcatcaagccgcgcgaacgcagcaagctgaattgggatgacaaactgactttagagtttaacggagatactcctcagctgaccgaactaatcattgagcgtatagaaaatgttcctacagtctttttatgcggtaactccactgtagtggatcaggataatgaaccctgggccagttggggacagatggttccccgtttctttaccgatagcatttgctttgccaactatgccgaatccggagagtctgccaatactttcattgctgccggacgtttgaagaaagccttgacgcagatgaaatcgggagattatatcttcatggaattcggacacaacgatcagaagcagaaaggtcccggcaaaggtgccttctattcttttatgacaagtctgaaaacctttgttgatgaagcccgtgcccgtggagtgcaccccgtattggtaactcctacccaaagacgcagcttcgatgaaaatggaaagattaaagatacccatcttgactttcccgatgcagtgcgctggctggcggaaaaggaaaatattcctttgatagacttgcatgccatgacgcgtattctgtatgaggctatgggagtggaggaatccaagcatgctttcgtacactatcctgccaatacctatccggggcaagacaaacctttggcggataatactcattttaatccgtatggtgcttatcagatagccaaatgcgttattgaagaaatgaaacaagccggattacctttggtgaagtatttacggacggataatgaaggatataatcctggctgtccggatgctcgcgaaacttttaagtggaatgaaagtccgtttacggaattggaaaagccggacggtaattgagagaggttttagggaaccaacctctctatatccggaatcactatttctccccggtgtaattccaacaggccgtcttcttgcatgccattcaatgctttcgatactcccaatcgtgtatcattgatggcatttgcaagttcttccatcttgattttcagtatcttttctccggaaggacgttcgatgtgggagaggataaaatctgcgatccgcgcttcgagcttctccggaactttcgtccacaaacggttatagcacgtttgtgcccggttactgatgatattcatatagttgaggcggaaaatttcatatctgaacaggtcgttcatcacaaatgccttactgatagttacggtatttacttctgtacgagctatgtgagtggatacgtaagacgtattcatgccgaacaaagattgcggttcaatcaggtatggtgcctgaaaatactccgtgaaggtgtaagagttatctgtggatgaggtggatgaagcgatttccccgttcaagataaatattaactgtccacatgttgttcctttttttactaaagtttctccagctttatgcttggtgaaatgtaattttacttttcccaatatattagtgaagtcctcatgagcgagtccttgaaacagtggcaattggagcagggtgtcatacatcgtttccatatctttatcaacttcttgtttgaaaacaaatgtaagcataatcgctatgtaccgtaaacactttgcctttctttttgttttttttattatttcttaaacgtgctattcattcaggctattaaatcttgtggaatgcataaaaatcgattatctttgcaaaaaaaaggagggacacatgtttgcagcattcaatttacaacaaatgatcagtgcttttattgtactgttcgcagttatcgatatcattggttctattcctatcatcatcaatttgaaggaaaaaggcaaagaagtgaacgcgctgaaggctacgttaatatcttttgcattgttgattggctttttctacgcaggagacatgatgttaaagttatttcatgtagatattgaatcgtttgcggtggccggtgcatttgttatcttcctgatgtcgttggaaatgattctggatgtagagatatttaagaatcagggacctattaaggaagcgactttagtgccgctggttttcccgttgctggcgggtgccggtgcatttaccaccttgctttccctccgtgcggagtatgccagtgttaatattatcatcgctttggtgctgaatatgatatgggtgtattttgttgttagtatgaccgggcgtgtggaacgcttcctgggtaagggcggtatttatattatccgtaagtttttcggtatcattctgttggctatttcggtgaggctgtttatggcgaacattacgttgctggtggaggcgttacataaaacataaatattctccggttttaatctcttgttgaaatatggcttatactgggccttttctttattttgttgaatatatatttggaaaatatgcagcaaagctatacctttgcacccaaattcaagacaatgatgaaacatttatgtacatataatcttctgaaacgattgctgcagaacgaacaaatctgttgctgtagtgtcgtgcatgtacattggtttagcggtttcatctaagttatcctacattatttttcttttttgccggatacaataataccggtattctatttttcagttactaattattttgtaattgcggttgttgttgcatacttgccagtgggagcgaaggaataaactcctctgtccggcaggttgttgccccgcgtatgatctaaactagagttgatatgtttaaaatacttggcctgatgatcttaggcataataatcggttatggtttgcgtcgtatctcgtttttgcgcaaagtggaggtatccatatcttatacagtatttttgttactgtttgttttgggcgtcactatagggtccaacagactgattgtagataatctgttctcttttggatggcaggcagccttattggctttatctgctactgtaggcagcattttggcttcatggcttgtattaaaattgtttttcacttctaaaaagaaaaaggtatgaaagatagtttgattgtattgggattttttgtgggcggatgccttttgggagctttgggatatctcccggtggatttgaagacaggtaatatgtctatctatatattgtatgcgttgatgttccagatcggcatcagtattggttccaataaggaactgaagagcatgatttctcagctccgtctgaagttcttgctgattccgttggctactattggtggaactctgcttttctcggctctggccagtctgctgcttagccgttggagtatatttgactgtatggcggtggggagtggttttgcttattattctctttcttctgtgctgataacgcagttcaaggaagcttcaatagggcttcagctggctacggagttggggacaattgctctgttagctaatatattcagggaaatgatggctctgctgggtgcaccgctattggtacgatacttcggcagattggcacctatatcagccgctggtgtcaattcaatggatgtgatattgcctgtaattacccgctattccgggaaagagatggtgcctatagctattttccacggcttactcattgatatgagtgtaccattctttgtttctatgttttgcaaactatgatgccggatcttcttccgatctattgtagtctgcctttacttctgtattttcttcttcctcatattccttcccctcttcaccggactcttcatcgggtgtttcttcctcatctgcaaacgggtccggtcgttgaggtccatattccatgaatgctatggcacagatagtgccggctatcgctccgctgaggtgtccttcccatgaggtggtttctttggcaaagaatgggaacatattccagataagcccgccatatagaaaggtaactaataaggagatggcaatcaatggtacatgctttcgcaggataccgctgaaaaagaggaagaaggccaggccgtagatgatgccgctggctccgatgtgccatcccggtttacctataagaaaggtgagtgcgccgcagcctatccagatggcaaagaatatataggaagcaatgtgccgataaaagtagaacaaacaccacgacagaaagaataacggcaaagtgtttgctaacagatgcctcaaactgccgtgtactaacgggtgcgcaaagataccgaatactcctctttgttccataggatacacacctaacctcctgaaatcccagtccataccgacttcaaggaactttagcaagtaaagaataaaaatgaggaataacggtataactgctgccagggctatccggcgtacatcttgcttcatctttcttactggtttctgttattttggtacaatgctacgaatatttaagtaaaaaacgaaaataaatgaactttttattttgcgtattgtctttaatttgtatttttggcatcagtaccatacccgtaggcatagcatgcgaggtatggaacatgatacctgaacaattaacctttaaataatgcacaactatgagttatttacgatttgacaagactctgatgatcaatctggaagaatctttaccaagggagatacttcggacaaataagtcaggagcctatcattgtacaacgattgtagattgtaacacacgcaaatatcacggactgttggtgattcccgtccccaatcttgacgatgaaaatcatgtgctgctatcttctttagatgaaacggtaattcagcacggtgcggagtttaatctggggttgcataaatatcagggagaccactttagtcctaacgggcataagtatatccgtgaattcgattgcgagcatatcccggcaacaacttaccgtgtaggaggtgttatcctccgtaaggaaaagatttttgtacatcatgagaataggattctgattcgctataccttggtagatgcccattcggcaaccacacttcgattccgcccctttttggcctttcgcagtgtacgcgaatatacgcacgaaaatccgcaggcgaaccgtgactaccaattggtagaaaatggtgtgaaaacctgtatgtatcccggctatcccgaacttttcatgcaactgaacaagaagaatgaattccattatcagccggattggtatcgtggcatcgagtatcctaaagaacaggagcgaggatatgacttcaatgaagacctgtatgttcccggttatttcgaagtagatataaagaaaggagaaagtatcgttttctctgccggcatttctgaaatttctccgcgtaaactaaaacaaacctttgaggcggaagttgctgaccgtacaccgcgcgacagtttctatcactgtctgcaaaactcggcacaccagttccacaataaacagggggagaaccactatgtattagcgggatatccctggtttaagtgtcgtgcccgtgacttgttcgtttctttgcccggcttgacgttggcagtggatgaacaagatgagtttgaagatgttatggtgactgccgaaaaagctatccgggagtttatcagtggagaaccatcgagttataaaatatatgagatggaagatccggatgtattgttgtgggctgtatgggctttacagcagtatgctaaggagacctcacgtgaacaatgccgccagaaatatggtcgtttgctggaggatatcatggactatatccgtagccgtaaacatgataatctcttcctgcacgaaaatggcttactgtatgccaacgggacggagaaggctatcacctggatgaattctacggtgaatggtcgtcctgtaaccccgcgtacgggatacattgtggaagtgaactctttgtggtataacgcacttcgtttcatagccgatctggttcgtgaagatggcaatgtacatctggcggacgaactggatgcgcaggcggaagtaaccggaaagtcttttgtagaggtattccgtaatgagtgtggttatctgttcgattatgtggatggatttatgatggactggagcgtccgtcccaatatgatatttaccgttgccttcgattattccccgctggatcgggcacagaaaaagcaggtgcttgatatcgtgacgaaagagttgcttactccgaaagggttgcgtactctcagtccgaagagtggaggatataatccgaactatgtcggtcctcagattcagagagattatgcttatcaccagggtacagcttggccgtggcttatgggcttctatatggaggcgtacctgcgtatttacaagatgagcggtgtatcattcgtggagcgttatctgattggttttgaagatgagatgacgagtcattgtatcggttcgctccccgaactcttcgatggtaatccaccgttcagaggtcgcggtgcagtgtcttttgccatgaatgtggccgaaatactgcgcatcctgaaattgttgtctaagtataatttataagaggaggaacgaaaatgaaagttttaatgtttggatgggagttccccccgcatatcttaggtggcttgggaactgccagctacggtctgacgaaggggatgtcccagcaggaagatatggaaattactttctgtattccaaggccatggggcgatgaagatcagagcttcttacgcatcattggcatgaatagcactccggtagtgtggcgtgatgtaaactgggattatgttcagggacgtgtaggttcttatatgaacccccaactctattatgatttgcgcgatcatatttatgccgattttaattatctgaatacgaatgatctcggttgtatcgagttttccggtcgttatccagctaatttacatgaagagataaataactattccattgtggccggtgtggtagcacgccagcaggagtttgagatcatccactcacacgactggctgacctatccggcaggtattcatgccaaacaggtatccggtaaaccgttggtaatccatgtgcatgccactgacttcgaccgtagtcgtggaaatgtgaatcctactgtgtatgccatagaaaagaatggtatggataatgctgaccatattatgtgtgtgagtgagttgactcgtcagacggttattaataaatattttcaggatccccgcaaggtatctaccgtgcacaatgccgtttctccgctttcacaagagatacaggatattgtaccgcagaagaagccgaatgaaaaagttgtgactttcttaggtcgcataaccatgcagaaaggtccggaatattttgtggaagctgctgctatggtattgcaccgtacgcgcaatatccgtttcgtgatggccggtagtggtgatatgatggatcagatgatccgtttggtggccgaacgaggtattgccgaccgtttccattttccaggtttcatgaaaggaagtcaggtgtacgaaatgttgaaagcaagtgatgtgtacattatgccgtctgtttccgaaccctttggtatttctcctttggaggctatgcaatgtagtgtgccgactattatttctaagcaatccggctgtgccgagatattagataagtgcatcaagactgactactgggatattcatgctatggcagatgcaatttatgctatttgcacttatcctgacctttacgagtatttgcgtgatgaaggtaagaaagaagtggatgctattaagtgggaagatgtgggactgaaagtgcgccgcatctacgaagaggttattaaacaatataatagataacaataaaacaatatagatatgagaacgatctgtctttattttgagatccatcaaatcattcacctgaaacgctatcgtttctttgatataggtacgaatcattattattatgatgattatgccaacgaatacagtatcaacgaagttgccgaacgttcctatattccggcattgagcaccctcattgaaatggcgaaaaattccggcggtgcattcaaggtggctttgtctatttccggtgttgctttggaacaattggaaatccacgcaccggctgtgattgacctgctacaccagttgaatgatacaggttgttgcgagttcttggccgaaccttattctcacggcctttcttctttggcaaatgaagattgtttcaaggaagaagtgaagcgccagagtgctaagatgaaacaaatgttcggtaaagcaccgaaagtattccgtaactccagtctgatttactctgatgaaataggaggattggtggcaagtatgggctttaagggtatgctgactgaaggtgcaaaacatattttaggatggaagagtccgcactatgtgtatcattgcagctataaccagaacctgaaactgctgttgcgtgatttcaagctttcagatgatatcagtttgcgcttctctaattccgaatggaatgaatatccactgtttgccgataagtatattggttggattgatgctctgccacaagaagaacaggttatcaacatctttatggaacttagtgcattgggaatgtcacagccgctttcttccaatatactggaattcctgaaagcgttgcctgcttgtgcaaaggataaaggtattactttctctacaccgacggaggttatcactaaattgaaatctgtatctcaactggatgttccgtatccaatgtcctgggtagatgaggaaagagataccagttgctggttgggcaactgtatgcagcgtgaagctttcaataaattgtatagtattgccgaacgcgttcatttatccgatgatcgtcgcatcaagcaggattgggattatttgcaggcaagtaataacttccggttcatgacgacgaagaatagtggtattagattgaacaggggaatctatgagtctccttatgatgcttttactaactatatgaatattttaggtgatttcatcaaacgggtagaatctctttatccgatggatatagataatgaggaactgaatgccttgctgacgactatcaagaatcagggtgacgagatagacgaattacacaaagaggtggaaaagttgcaggctaaactggaaaaagaaaagactgctgaggcaaaggttaaagctgctactgccaaagctaaaactcctgctgctacaaagaaaacagctgaaaagaaacctgctgcgaagaaagccacaacaaccaagaaggaaactgccaagtagtttttcttcttaggagaaaatacatcaaataaaaaagccttccgttcaaacagaacggaaggcttttttgtacctttacttattttgaggagaagtttatttattgaaggtagtataagttacttccaatttcagagcttcaccctctggaccgcctttcaacattgcatatccgggttggagatcgttttggatacctgtcattgtttgagaagtacttgaacttgtagtgtcgtaagtaattgcaacaggtatcagatatactgttctccagtctttttcccattcttcctgattccatttatcacctgcttcttctttggcttttttcattgcggcatcttttccttgaatgcaagtagtaactaaacgggcaatattattaaatgtatactgattggttgctacattattatgctttacggtgtaagacgtgatgttgtccggcaatttgttttcttcgaagaaactcttaaagtctactttacgtaatagcaaaacattgcttggagcactcatgctgaactcgtatgggctgtcttgcttattgtaattggtgaatgtcagtttcactgcattcagtgtatcattggctaacttctggtagatatcatcataaggtaattctgcctctgtgaaaataccggcgggagatttgatataagtatgttcatcttctgcagcaagtttctggattttatcggaattgaggaattgattagcctgaattacctctttagtagaagcaaattcagtccgccatgtgtgggcggtagagtcctcattctcgaaacctgcttgtttccgtttataaggtacattagttgcggtatctattacatagaattgatatttcatttgtaagtctacacgatctacgtaaagtactgttccatcaccataatcgcttttaatatatacgcccttaaatacgttctctataaaagctttagagttcttgaaatattcaggatgttctttactgagtttaagccacttgtttccataggtttccttgtccagcgtaaaagtaacacttggataataagttttattaccatatgaatctgttgcgttcctttcttcatctgttacgcttgtgtcgtaggctgtataggctctgcgacctaataaaatcggattcagtttatcgtaatactctgcaggatcaatattggtatagcgattgcgttccaactctttttgcaattggtatgcactcatacggcaagcattcaaagaatctccgaaccaagtggaatagaaaacaactaagcgtacacctgctaccgtgtcttctgtcagaattcccgtctttttatcaaaatcatatttttcagggaatttgaagttatctatacagttcaactcagttaagaaactcgcttcgtagtatccgaaaagaggatctgtaaaacgccctacataacctgtactggttttggcaaatacagagtcagcgacaacggaacgtgtagtgacgggaaattctgtggttagtgcggaaataccgtcggaaccgggtaacattcctattcctaatgtaccggtattatcatcgcaaccaaagaaagtaagggttgctgtcaatagcagagcgcctaaaaacttcactttcatagttttctttgttatcttgtttatttttgttctgtttcccatactctgtcgtagaactcattacaagcatcggcaaatgtttcgggagtctgatattctaaaatgggttttccagattgtcgagcatattccatcacttcttcgttgactttttcgctttgttggataatgccatctgcataatcaatggccagtttgcacaacgttgcgtagtctacaggagccttcaggtgagctacatccttctttgtaacacctttcaataccaatctgtttacaaaatcagcattaaacgattctttgaagtcatcttcgaaaacggagaatactactttagcgtcacggaatgaaggctcgtccttatatgctttttttatatacaaaggagctaaggcagtcatccagccatggcagtgaatgatatccgggcaccagcgtaacttcttaactgtttccaatacaccgcgtgcataaaaaatagcacgactgtcattatcttcatattccacaccattctcatccgctgtttccaggcggttttggaaataatcatcgttgtcgatgaaataaacctgcatgcgggcagactgaatggaagcaactttaataataagggggtggtcggtatcgtcaataatcagattcataccggagagacgtatcacttcatgcaattggtttctgcgctcattgatattcccccatttaggcatgaatgttctaatttctctgcctttttcctggattgcttgaggtaggtttctgcctacaagggacatttcggattctggtacgtaaggagtaatctcttgggtaataaataaaaccttgttcgcctttgtcataataacaatgttctcaattattctgcaaagatataaaaaaaatcgggcacttgagcaaataaggcgactctataattccttatgaattgttaactgcttgtttttcagtgttacattgcttcaaagcaggttgttgtccgagtagaacttttgcattaatttgcgatatttcttctttatatgctaaataatagtttattttgcaccgcttttgcgaacaactaagttattatataacctataaaaatggaaatagtacatactatcaaggacttgcaggccggactctcggctttacgggcccaaggtaaaaaggtaggattggtacctacaatgggtgccctacatgccggtcatgcgtcattggtgaagcgttgtgttgcagagaatgatgctgcggtagtgagtgtttttgtaaacccgacacagtttaacgacaagaatgatttagagaaatatccccgtacgctggatgccgattgtgctttgttggaagcttgcggtgctgcgtttgtgttcgctccttcggttgcggagatgtatcctgaacctgatacgcgccaatttagttatgcgccgttggatacagtgatggaaggtgcgtttcgtccgggacacttcaatggtgtttgccagattgtgagtaagctgtttgatgcagtgaaaccggatcgcgcttatttcggagagaaagatttccagcagttagctatcattcgtgagatggtgcgccagatgaattattcgttggaaatagtgggttgccctattatacgtgaagaggatgggctggctctgagtagtcgtaacgctcgtttatctgtcgaagaacgcaaaaatgctttaaaaatatcgcaaacattatttgaaagtcgtacctttgcggcttctcatacagttgctgagactcagaaatttgtagaagatgccattgctgccgctcccggtttgcgtctggaatacttcgaactggtggatggcaacacgttgcagaaaatagccaattgggaagatacggcgtatgctgtaggttgcattacagtgttctgtggtgaagttcgcctgattgacaatattaaatataaagagtaataaacctaaaaagagagatcagaccttatgatgattgaagtgctgaagtcgaaaatccattgcgctcgcgtcacggaagctaacctcaattatatgggaagcattacgattgacgaggacttactggatgcggctaatatgattgccggtgaaaaagtgtacatagctgataataataatggtgaacgttttgaaacctatattattaaaggcgaacgtggttcgggcaagatatgtctgaatggtgcggcagcccgcaaggtgcagccggacgatatcatcattattatgtcgtatgccttgatggactttgaagaagccaagtcgttcaagccgtcggtgattttccctgatccggcaacgaataaagtggtgaaataaacgggaagaaaagcggtggaaagcttgactttagttgtttgattccgtatctttgcccatgtaatcctgatttagtttcgggaacgaagatagtaagaggagtgatgctagttgctcctctttttttgtgtctgtatgtaggatttttcggaagatactatgttttggttcataatataccatgtaattgggtaaaacatactatgtaatcgctcgaaacataccatctgtttagagcgaatgaatgatgtaatcgaagtaaacagatcatctgttccggaaaaagaaaagcggaaagaccgaaatctttccgctttgttaatgttatgtaaacttgctcttgacaagtaatgtcttttctgcttatttgctcaactgctcgtgcattgaggcagcagccttgcgtccatcgcccatagcaagaataacggtagcaccaccacgaacaatatcacctccggcataaatggtcggaatagatgactgcatgttctcgtttacggcaatcgtacctttgcgtcccatttccagtcccggaatagaagaaggtacaatcgggttgggagaaacccctacgctgacgatagccagatctatatcaatggtttccgttgcacctgggatagctacgggactacggcgtccggatgcatccggttcgccaagctccattttttgcaagataacttgttttacctttccttgctcatcggcgatgtattcgatagggttatgcagcgtgaggaactcaacaccttcttctttcgcatgttttacctcttcgatacgtgcaggcatttcttcttcggaacgacgatagataatcatggcacgttcagcacccaagcggcgtgcagtacgcactgagtccattgctgtatttccaccaccgataacggctacatttctaccgaaaggcaccggagtatcagagtcttcgcttgctgcatccatcaggttgacgcgtgtcaggtattcattggatgacaggatattgatggagttctctcccggaatattcatgaagttaggcaatccggcaccggatgctacgaatacacctttgaaaccttcttcttctaactgttccacactgatagtcttgcctatgatgcagtcctttatgaagttaactcccatcttggcaagattgtcaatctctacatccaccactttgttcggcagacggaattcagggataccatacttcaatacaccgcctatctcgtgaagggcttcgaagacagtaacgtcgtaaccatatttagccatatctccggcaaaagaaagtccggcaggtccggagccgataacggcaatcttgataccattcttttccttgatttccggtacggaaatttgcccgctttcacgttcatagtcagcggcaaagcgttccagatagccgattgctaccggcttttctttcattttcaggtggatacattttgactcacactgtttttcctgtgggcaaacacggccgcaaacggcaggcagagcactggtctcttttagtgtcttggcagcttcgagtatttctccacgttcaatgtttttgatgaaacgaggaatgtcaatacctacgggacagccttccatacagcctggattcgcacaatcgaggcaacgcttagcttccgtcagagcttgttcctctgtaagtccttgatttacttcttctttgcgactgtgcgaacggtattccggatcgagctcgttcatttcaacacgcggaatagcggtacgttctttgggtttcattgccttgcgaagttccaaacgccatgcggcattacgacttttctcgtcaacttcttgtgtcggttccggtacagctttgcaggattcgtcttcttcaagcttgtgcatttcctcgcgttcgatgctcttgaaagcacccatacgcttcaacatctcgtcgaagtctacctgatggccgtcaaattccggtccgtctacacaaacgaatttggtctttccaccgatggtaatacgacaagcaccgcacatacctgtaccatccaccatgattgtattcagcgaaacatcagtcggtatttcatatttcttagtcagcaaacaaacaaatttcatcatgatagcggggccgatagcaaaacatttgtttactttctcccgtttaatgacttcttccacgccttcggttactaatcctttgcgtccgtaagaaccgtcatcggtcataatgatgacctcgtctgcgctttcgcgcatctctttttcaaggataatcagctctttgctacgtccggcaagtacggcaataacgcgattaccggcagctttcaaagcctgtacgatagggagcatgggagccacgcctacaccaccacctgcacaaaccactgttccgaaattttcaatatgagtagcttgtcccagtggacctaccacatcggtgatgtaatcgccctcattcagttcgcaaaggcgggtagaggagaggcctacttcctgtactaccaaagtgatagtgccgcgtacggtgtcagccgctgcaatagtcaatggcatacgttcgcctttttcgcctacacgcacaatgacgaagtgtcctgccttgcgtgagcgggctattaaaggtgcctcgatctctaatttaaaaaccttttcagaaaaatgttctttgctaatgattttgttcattatctataaattttgttggtataattacgtaatcactttcagattgttacggtttgcaaagatacgggttatttggtaaaaacaaagaaagtttcttctaaaaagctgtataactgatgtggacaaatgataattcgcccctaccaggttgtatagacgtaatcatataaacgtctgtggttacctatgtaggagcgaattattattcacccgctcgtatagctcagctatttttagtcaatcatttcaaaacccgtatacggcaccaatgccttcgggatacggataccttccggcgtctgattgttttccagcaaagcggcaacaatgcgtggtaatgccaatgcagatccgtttaatgtatggcaaagttctgtcttcttttctccactgcggtaacggcatttcaagcggttggcctgataagtatcgaagttagaaaccgaacttacttccagccaacgcttctgtgcttcggagtaaacctcaaagtcgaagcaaagggcagctgtaaagctcatatctccaccgcataggcgaaggatgcgatatggcaattccagtttttgcaataatccttccacgtgatccaacatctctttgtgagattgtctggaatgttccggtttgtcaatgcgtaccaattctactttagagaattcgtgcagacggtttaagccgcgtacatctttaccgtaagaacctgcttcgcgacggaaacactgcgtgtaagcacagttcttgataggaagttgcttctcttccagaatcacgtcacgatagatgtttgttacaggaacttcagctgtcggaataagatataaatcgtctacttcgcaatggtacatctgaccttccttgtcgggcaactggcctgttccgtaaccggaagcggcattaactactgtcggaggcatgatttccagataaccggctttgcgggcttcgtccaggaagaagttgatcaacgcgcgttgcaactgcgcaccttttcctttataaaccgggaaaccggctcctgttatctttacgcccaggtcgaaatctatcaaatcatatttttttgtcagttcccagtgaggcagtgcatctttggggagttcggtttccataccgcccattttctctactacattatcttcagcacctacaccttcgggtacttcatcataaggtacattaggaatggtatagagtagattctgcatgtcttcggcagcctgatccatttcagtctgcaaagtcttgttgacttctttaagttcggctacacggcttttggcagtttctgcttcctctttctttccttctttcatcaattgtccgatggatttggaaatcgagtttacttcagagaggttattatctaatatagactgtgtgctacgtcttttgtcgttaaaggcaattacctggtctattgtttcttttgcatttttgaaatgcttcttttccagtccgcggatcatcgcgtcggtgttttctgtaatttgtttgatggtaagcatatcttgatactttgttttgattaaaatcttgatttgagagcacaaagatagtgtaaatcagaagtaatgcaaaaaaagaaactataaaaagaaagggatgcaatccatcagattgcatccctcatctttatttcttattctgaaacttacgcttctgtgctttcggcagggattacagatacataacgtctgtcttccttggttactttgaactgtacagttccgtctactaaagcgaaaagagtgtggtctttacccataccgatgttgttacccgggtggaattcagtacctctttgacgaatgatgatgttgcctgctttgcaagcttcgccaccaaatatcttaacgcctaatctcttgctctgtgattcgcggccgttcttagaactaccgacaccttttttatgtgccatttcttcttactgttttaaattgattaagctactacttctgtaattgttaactctgtgaattgttggcggtgaccgttcaacttgcgatgaccttttcttcttttcttgtggaaaatgagaactttgtcaccttttaccaggctggatacaatctggcaaacaacttttgcaccttctacagtaggagcacctacagtgattgcaccgtctttgtctaccaaaagaaccttgtcaaattctactgtcgtaccgttttctgcattctggatgtggtgtacaaacagttttttgccagcttctgctttaaattgctgaccattgatttctacaattgcgtacatttcttatatataatgtataagttagctccgtcgggtggtctctaatcacttagaaagcactttgtcgaacccggtgcggaataatcgggcacaaaagtacttcttttcttcggaacgggcaagtgtttcatcttctttttgcggaaaaaatggtttacctctattccatgtaaggaaagcggaatgggagcagtttcccgtttacaagaagttaagagtttgtcgacaagaaattaacttcttgtcgacaaactcttaacttcttgtaaacagaaaa

SEQ ID NO: 6284 - DNA, 138954 bp, Unknown
  gut microbiota DNA sequence
taaaacgtacttgagacctgcttgctccgtacctgctccgtagcaaaacaggatgcgaaccggatttacctgaaaaattacaaaagtggctttagtacataaaccgccgcaactatcagtgctactacaataatagcaaagataataagcagtatcaaactatagaaaaacatcagtattgtagtccagaaacttctccaccaggtatatccatacagttgcttataatccaggcagaagagggcaaagatgaatagtatgggcaattcgtataaatggcctacctgtgcactgccgttgaaagggagcactatgatactgagcaagagtatctggcaagcaatataagcctgtataaatacatgttctgtcagattatagtgcagtttgttctttttctgacggaaagccatgagcgttgccagagcaaagagaggtaatgtggcgataatacggaatgccttgttaccatgtccccaacttttcagtaagttccatactttttccagaaaaggtgtattgtgaatggctttttcaagcttattaaatactgatgatccaccttccagaagttcatctatgagttcgtcatcttcatcaccatttatttgaagggtgatgttatccttttttaagttttttgaggtttccagtttttccagatcctgattcagttcttttattgtttgggtcaaaacctccttttggtctggtttcttggtctctttcatctgtttctgcaatagttcacgtgcagctatcagattattcttccggatgtccgtagaatcttctgtttccagattttccagtttcttatccagaccttctatcgttttattcaggatattttgggtagtcgggtctgttgctgtttctatacgtttttgcaattgttcacgtgcagcgactatttcttgcctttgagcttccggagactttccctttttctctttcaaggcttcaggatctaccagttgtacggccatgatgtaaagggcggcaagtacaaatagtgtctggaaggggcggaagtataagattcgtttgccggcaatgaagtctctgatcatgtaccccgggcggtaaagtaaatccagaagtgttcgaccaaagccattatcaatattggtgaatcctcccaatatatttctgaatgcattactgaagcggtagcgaggagtgttccggctttgaccgcaacggttgcaataactacctgtatagacggtatcacaattcagacagatgttactttcctcactgatgggcggaatctcttttccacgtaccatcttgatatgcaaggctcgaaggtacttcttacagggagtccaccagggggatataaaatctaatacacggtctggcagaatcctgcgtttggtaagaatataccaaagtaccagtatgaaagaccatagaaaaacattgctatcttctccttcttcaaaagacagccatagcaatattgccaaaatcagtatttgccaaatactgatcatctttcttctgcggggagcgggagaaatgggagaagcggaaacagccggaactgcaggcgtactgacaaccggatgttgaggtatcactttattggcagtcgagtcctcgttgtcagcagattgtttagcatgggtcggtagttcgtcattttccagtagttcttccagcgaactcataatcttccagtgtggatatttggctaattcttcggtggtagttactccatgggttacacctgcaaagtctacacctgcagctttggctgtggcagcatctactgtactgtcaccaatatagagggtttcagctttggtgacgtgtaattgttttatggcaagtagtaaaccttcgggcgaaggtttggccgtttgtacatcttctccaccgacaatgatattgaagaagctgccggggaaatgctggtcgagcatttccttaattcggtaacggtatttggtggagatgatacctatgaatgcacccgcatctttcagggccagcagtacagacttggtttccagaaaaagcacggtgtttattgtcatgtgggtgtccgcttctttcctgtattcacttttaaaaccggccagttgctcttcatccgttactcccgtcaggatagaaaaagattcttccaatgttttcccgatggtgcgttttatgtcttcatcggttacatttgtataaccatgtttattgagcacattgcgaaagcaagtaacaatgccgcgagaagagtctgcgagcgtgtaatcaaagtcaaagagataagtcgtatagcccatgtcgctttttgcggcaaagttataaattaattggaattttctgactatatttgttcgcactatgaatttattttaaaaactgctaagtgtttctttgcgctgagttgttccatacatacgttaactatgtaatattatgaaactatcagaattatcttttgggattttgcttcttttctctttttcagcgtgtgtatcccaacaaccggatgcggaaactgagtgttatgcaacagagtacgtcaatccttttattggtactgatttcacaggaaatacttatcccggagcgcaggccccgttcggtatggtgcagttaagccccgataatggtcttcccggctgggatcgcatctccggttatttctatccggacagcacgattgcaggtttcagtcacactcatctttcgggtacgggagccggtgatttatatgatatatcttttatgcctgtgactctgccttataaagaagcagatgcgccgttgggcattcactctttattttcccatgatgaagaaacagccagtgccggatattatcaggtgcggctgaaagattatgatatcaacgtggaactgacagcaaccgaacgttgtggcatccagcgttatacttttcctgaagcggacgcagctatattcctcaatttgcggaaagctatgaactgggactttacgaatgatacccgtattgaagtagtcgattcggtaactattcaaggataccgtttttctgatggttgggcacgcgaccagcacatttatttccgtacccgtttttctaaaccgtttgcatccgtacagttagatactgctgctgtcatcaaagacggtaagcgtataggtagctctgctattgcccgttttgatttccacacaagtgcaggggaacagattcttgttaccaccgctatttcgggggtaagtatggaaggcgcagcacgcaatcttgctgctgaagctccggcagatgattttgacaagtatctggctgttacccgtaaaaactggaacgagcaactttccaaagtagaaatcaagagcaatgacattgatgagaaagttaagttttatacagccctttatcattccatgctggctcctactatctatagcgatgtggatggtgcctattatggtcctgataagcaagtgcatcaggcagacggatggaccaattacagtactttctcattatgggatacctaccgtgccgctcatcccctttatacccatattgaaccacagcgtgtaaatgacatggtaaaatcctttcttgccttttccgaacagaacggacgtcttccggtatggaatttctatggaagtgaaacggatatgatgataggttatcatgcagttcccgtcatagtggatgcttacttgaaagggatcggggattttgatccgaagaaagctttggccgcatgtgtagctacagccaatattgatgaatatcgtggaataggattatataaaaaatatggttatgtgccttatgatgtaacggatcactataactcggaaaactggtcactttctaaaaccctggaatacgcttacgatgattattgcattgcccgtatggcggagaaactgggtgaaaagcaaattgcagatgaattttataagcgttcccggaattataagaatgtgtataattctcagactactttcatgcaaccgcggaataacaaaggatccttcattgaggacttcagtccggatgattatactccgcatatttgcgaaagtaatggctggcaatatttctggtctgtgcaacaagacgttgatggactgatcagtttggttggaggcaaggaacgttttgcccagaaactggatagtatgttcacttacaatccttctgcggatgaagatctgcctattttcagtactggaatgatcgggcagtatgcacatggtaatgaaccgagtcaccatgtcatttatttgtttaatgccatagggcaaccttggaagactcagaagtatgcagctgaggtgatgcatgaattatataagaatacacctgccggtttgtgcgggaatgaagattgtggtcagatgtctgcctggtatgtgttcagtgcaatgggattctatccggtagatccgattagcggcaaatatgagataggtactcccatgtatcctgagatgaagatgcatctggctaacggtaaaacatttacgatattggcaccggctgtcagcaaagagaatatttatatccagtcggtaaaactcgacggaaaaccttatgacaaaagttatatcacgcatgagcaaataatgaatggttctatctttgaatttgagatggggaataaaccgggaaaagtgtggtatgagatagagtgatagagtgatggatggtaccagataatataattgtgggattatgagtgataactttgacctgacttataaactccttttccgtaagtactacgccaatctgcttttctatgccacgcgcatcgtgggtgatgaagaagcggaggacgtagtacaagatgtatttgtagaattgtggcggcggaaagatacaattacggtaggagagcagatacaggcatttctgtatcgggcggtgtatacccgtgctttgaatgtactgaagcaccgggatatcaagaatacttatgaagctgtagtgacggagatcaaccagaaaagaatagagttttatcagccggacagtaatgatgtcgtgaagaggatagaagaccgtgaactcagaaaggaactctccgaggctataaatgaattgccggataagtgtaagacggtctttagactcagctatttgcatgatatgaagaataaggaaatagcagatactatggggatatcattgcggaccgtggaggctcatatgtataaagccctgaagtttctgcgtgagaggttgggctacctgaactttatgttagtcctgtttttattaggtaaggtataagtgtttttatcgaaacggttgttttaatagtatgatgaaagaaggaatgaataagttggatgaagaattgatggccaaattccttatgggggaatgctctgaagaagagctctgtaaggtaaatgcatggctggacgaatcggatggtaacgctcgtgaattgttcaggatagagcagatataccatctgggaaagagtgaagaatttgcggatgaaaagaagatagaaaaagctgaaaagcagctgttcaaacggctggcacaagaagaagctaaacgaaataaggtgagaagattgaatgcctggatgcggtatgccgctatgttcataggtatcttttttatatccggtttgagttatcatatttaccagtcacaaagtgaagagagcaaattggttgctgtcactgcccgtgatgaagtgaaagaactaatgttgcctgatggcactaaggtttggctgaacaaacatactactttaaaatatccacgtgaattctcagaaaagggaaggaatgtatatatggaaggggaggcctattttgaagtaaagcgaaatacggcgaagccttttatagtgcgcagtgaagccatgcaggtaagagttttgggaacagtcttcaacttaaagagtgacaagactaaccgttctgcggtagctacactgataaagggagagattgaagtgaaaggtaatcacgaagaaggcatgatcgtattggctccgggacaaaaagcggaattgaatgctgtaactcgccgtctggtagtgaaacaggtggatacaggcattgaaaactggcataataatcagtttgtctttgaaaaggctgacatatttacgattgcccgtactttggagaattcttatggggtgaagattattctggcgcctgatatggatgctacaaagacatattccggtacattaaagaagaaagataatgtcgaggagactctgaatctgattaagagtacgaatgcgcttcccattgaatataaaattgtgggaaatagtgtatttctgtcttcaaagaaataggtaaaaaacggaagtatataatcttaaaacataataatatgaggaaactgcttttatcgatttgctgtttaggctgtgctctctgggctcaagccaaagattttacgcaatacgtcaacccgctgatgggtacattgtcttctttcgaactttctacgggaaatacgtatccggctatcgcacgcccttggggtatgaatttctggactccgcagaccggaaagatgggagatggctggcaatatgtatatactgctaataagattcgtggtttcaagcagacccaccagcccagtccgtggattaatgattacggtcagttctccattatgcctgtaacaggcaaaccagagtttgatgaagacaaacgtgccagttggttctcacacaaaggagagatcgcattaccttattattataaggtgtatcttgccgagcacgatgttgtgacggagtttacgcccacagagcgtgccgttttgttccgtttcacttttccagagaacgagaattcgtatgttgtagtagatgcttttgataaaggctcttatattaagatcattcctgagcaaaataagataatcggatataccacccgtaacagcggtggagttcctgataacttcaagaactatttcgttatagaatttgataagcctttcagttatcaggcttctgttgctgacggcgctttggttgaaaaccagagtgaacaaacagcaggacatgcgggagccatcatcggtttcaaaacccgtaagggagaaattgtacatgcccgtgtagcctcctcctttatcagttttgagcaagcagaccgaaatctgaaagagctggggagtgacagttttgaaactttggttcagaaaggacaagatgcctggaaccagatattgggaaaaatagaagtggatggaggtaaccttgatcagtatcgtactttctattcctgcttgtaccgttcagtactcttcccacgtgctttctttgagtttgacgaggctggaaatccagttcactacagtccttataacggagaagttttgcccggatatatgtatactgatacaggcttttgggatactttccgttgtctgttccctttcctcaacctgatgtacccttcagtaaacaaacagatacaggaaggccttatcaatacatataaggaaagtggcttctttcccgaatgggcaagtccgggacatcgcggctgtatgatcggtaataactccgcttctatacttgccgacgcttatctgaaaggtattaaagtggatgatgtaactactttgtacgaaggtcttatccacggaacaaagaatgtgcatccggaagtttcttctaccggtcgcctcggttatgaatactataatgaattgggatatgttccttacgatgtgaaaatcaatgagaacactgcccgcactttggaatatgcttatgatgactggtgtatctaccagatggcaaaagctctgaatcgtccgaagaaggaactgaagctttttgctgaccgtgctatgaattataaaaatgtgttcgataaggaaagcctgttgatgcgtggacgcaataaagatggacagttccaggctcctttctcacccttgaagtggggagatgcctttacggaaggaaatagctggcattattcctggtctgtattccacgatcctcaaggtttgattgatctgatgggtggtgaaaaagtctttgttgaaatgttggactcggtatttatcgttcctcctttattcgatgacagctactatggccaggtaatccatgaaatacgtgagatgacggtgatgaatatgggtaattatgctcatggcaaccaacctatacagcacatgatttacatgtataattatgccggacagccttggaaagctcagtattggttgcgtcaggtgatgaatcgcatgtacacgcccggtcctgatggctattgtggagatgaagataacgggcagacttctgcttggtatgtattctcggcattaggtttctatcccgtttgtccgggaaccgatgagtatgtcttgggtgctcccttatttaaaaaagcaacgcttcattttgaaaatggcaattcattggtgatcgatgctgctaataataattctgaaaatatgtacatcgaatcgctccgtttggatggaaacgcgtatacgaagaattatctgaaacatggagatctgttgaagggtggtgtcttgaaatttgatatgggtagcaaacctaatttacaacgaggaacacaggtggaagattacccgtattctttctccaatgaaataaaaaagaaataaaaaactgaagttaataatgtaatgaagaagggaataggaaataaaactattcccttttttatttaatgaaaaaaaatatcattttgtactaagtgtattttctatggtcgttgttttatatatgacggtcaggaaatagagtctcccggtcgattaaaattaaccaatgtgtaacctttaaactttgtttatgaacaacaatcatgcttttcaaagttcgaaatttctacgagctttattagtcttgttcttcatgactgtatccgttcagtggacctttgcccaactgaatttgaatgtctctcgtacgacgttaggtacagttatcgaacagatcaaatctcaatctaagtatcaatttttctatgacgacaagctcgctactatggcagtggagaatgtcaaagtgaagaacgcatctatagaagatgccttgaatgctattctaaagggtaaaaacatttcctttaaggtggaagataatattatctatctttcagagaaatcctctgcaccgcaagaaggtaaccagcagggtaaagagcacaccattactggacaggtgtcggatggtatgggtccccttattggtgtgaatgtgcttgtaaaaggtacgagcgtaggttgtatcactgatattgatggtaactttacactgactacaactgaagcgaatccggtggtgcagttctcctatgtaggctataagccgcaggaaattgcagcaaaaggacagagaactattaacgttatgatgttggctgactcacagttgatagaagaagttgttgtgacggccttaggtatcaaacgttctgagaaagcactttcttataatgtacaacaagttaatgcagatgatataactaagaataaggatgttaattttgtgaactccttgaatggtaaagtagctggtgtaaacattaatgcttcttcatctggtgtaggtggtgtatcaaaagttgtgatgcgtggtactaaatctattatgcaaacctcaaatgcactttacgttatagatggcgtacctgtattgtcaggtcgtagtaacaaagctggtggtactgaatttgattctcaaggatctaccgaacctattgcggatattaatccggaagatattgaatcaatgtccgtgttgacgggtgcggcagctgcagcattgtatggctcagaagcggctaatggtgcgatcattattactacaaagaaaggtaaggaaggcagattaagccttacagtgagtagtaatactgagtttactactccatttgtgatgcccagtttccagaatcgttatggaacaggtacaggaggagtgctgagtacctctggagcacttagctggggagcacgcttgacagatgccaataactatggttatagtccgaaagataactattttcaaacaggtattattggtacagaaagtatatctttatctacgggtaccgagaagaatcaaacttatgcatcagcagcggctgtaaattccaaaggtattatacctaataataaatacaatcgctataattttacagtacgaaatacgacttctttcttgaatgataaaatgaagttggatgtgggtataagctatattttgcagaacgaccgaaatatgaccaatcagggttcttataataacccattggtaggtgcctacttgttccctcgtggtaatgattgggaggatattcaaatgtatgagcgttatgatcctgcccgtaagattgatactcaatattggccgataggtgatgaagctatggccatgcagaatccgtattggataaactaccggaatttacgtgaaaataagaaggaccgttatatgatgaatgctagcttgagctatcagatactggattggctgaatgtttcaggacgtgttcgcgtggataattcaaataatgattatactgaaaagttttatgcttctacaaatactcaattgacagagaagtcttcccgtggtttgtatggcattgcaaagacgcaagataagcaattatatgctgattttctgatcagtgttaataagtattttggtgaggattggtctttgcaggcgaatttgggtggctctatttctgacgttcgtacggatgcaatgaaagtacgtggtccgattgctgatggtagtgactcctttgcaggtgagcaggccgggcttactaacttttttgctattcagaatttgagtgccagtaaaacacagcgtatgcaagaaggttggcgtgaacagacacaggctatctttgcttctgctgaacttggttataagaatacttattatctgacggtgaccgggcgtaatgactggccttctcaattagctggtccaaaatctgtaaataaatcgttcttctatccttcagttggtggctctgttgttttatctgagttgatgcctaatctgaataaggattatttgtcttatatgaaagttcgtggttcatgggcttcagtaggtaatcctttttctagatatgcagctaatccgcattttccttggattgcaaacgatggtagatggagtcaactgactgattatcctatgtatgatttaaaaccggaacgtactaattcctgggaattaggtttatctatgcgttttctgaagaattttaatttggatgtgacgtattacagtgctaaaactatgaaccagactttcaatcctgatctgcctgtcagcggtttttctaaaatatatattcagaccggtgcagttcgcaactctggtgttgaactgtcattgggatacaataatacttggaatggtttcacgtgggatacaggttttactttctctactaacaagaacaagattcttactttagctaatgatgctattaatcctgcaacgggtgaacgtatttccttgactactttgaatatgggtggtttaggagaaacgcgcttcctattgagagaaggtggaagtatgggggatttatattctttgatagatttgaaacgcgatgataatggtaatattttagttgatgcgaatggtcagattacagcggaaactataaaggaaccaagcaaatatattaagttaggtagtgtgttgcctaaaggtaatttggcatggcgtaatgattttgcctggaaaaattttaatgccggatttttggtttcagctcgtttaggtggtgtggttttctcgcgtactcaggctatgttagattattatggagtatctgaagcgtcggctgacgcacgtgatcgtggccacattcttataaatggtaacgactatattaatcctgaaacatggtatagtgtggtaggtagcggtacggctattcctcaatactatacttattctgctactaatgttcgtcttcaagaagtttctttcggttatactttccctagaaaaatgttgggcgatatttgtgatattaaggtatcgttggttggtcgtaacctctggatgatttacaataaggctcctttcgatccggaaggtgtagcatctactgataatttctatcaaggaattgattactttatgatgccgtctttgcgtaatatcggtttcagtttgagctttaaattttaaaaataaaccaatatgaaaagaaatataataaataaattgattctgagttcgttgtttttgggctttatgtcatgtaccggcaattatatggatataaattctaatccttatgaaccggatgatttgagtccggatgattatgctttggggtcggctatgagtggtatggcaagcacggttatcgcttcagatgtaaatacagcacagtttacggattgcttgttgggaggtcctttgggtggttactttgcagattctaatagtggatggtccaatacaatttctaattttgatgccaaaaacgactggacacgtgtattcttgataagcgataagatcattgctacattatatagtaatttgaatgccattaagattgtttctgataatacacataatcctgtaccctacgcaattgcgcaaattatgaaagtggcggctatgagtcgtgttactgatgcttatggtgcgataccgtattcaaagattggtgaggatggaaagataactactccatacgattcacaagaggaagtttataataaattctttgaggaattggatggtgctattgcagtcttaactgaaaatagaaatgctgcacttgttgccagtgctgactttgtctacagcggtaatgtacagaagtggtgtaagtttgctaattcattgaaattacgtttagctatccgcatagcttatgcaaatccttcgaaggcaaaagaaatggcagaaagtgcagtcaagcaggaaatggggcttatagagtcgaatgaagataatgcgaagtggaattattttggaactcttccgaatccgatatacacggctgtacgctataatgaagaaaaaacaggtggtgatacacatgcggcggcagatattatttgctatatgaatggttatgatgacaatcggcgtgcaagctattttgaaaaatctaaatgggaagaacaggcttatgtcggtttgcgccgtagtatcaatttggctaaaatgggtgattactttagtaattattctacaataaagatgaagtcttctgatcctgttctttggatgaatgctgcggaagttgctttcttgcgtgccgaaggaaaggcgatctttaattttgatatgggaggagaggctggtaatttctataatcaaggaattcgactttctttcgagcaatggggagcggctggagctgacaactatatggaagatgccataagcaaaccggctacttataaggatccctccggagtctatacgtatgaaggaacactttctgaaataaccgttaaatgggatgaggcggctactccggctgagaaacaggaacgcattattacacagaagtggattgctaactggccattgggcaatgaagcgtgggcggattatcgtcgtaccggttatcctaagatgattccggctgctgctgatggtaaccgtagtggtggagttgtagacagtaataaaggtgcaagacgcatgccctatccttcggaagaatataccaacaatactgaaaatgtgcaatatgcagtacagaactatttgaagggagcggataatatgggtactgatgtgtggtgggcacgtaagtaataattaataaatagtatattatgaaaatatatagaaactcatttaaaggaattatgatagcagctttctctatgttggcgttatctgcttgttccgattggactgaaacggaaagcatcgaccttggtcaaccggatataactaaccagaatccggaactttatgccaaatatttgcagaatttgcgcgaatataaaaaatcggatcatacattggtatatgtatggtttgataatagtcaaaaggtaccttttaatcggtcacatcatataacagatttaccggacagtattgatgttgtgagtatgatacatccggataacctgacagattgggaattaaaagaaataaaccaagtccgtagtgagaaggctatgaaagttgtctataccattgattttgaatcaatcaaagctgcgtataatgcaaagttggaacttgctacggaggaagaaccggtggctgaggagtttttagacttcttgactgattcgttggaatattcactttctttagttaagaagtataactacgatggtatttgtattggttatgcaggtaaggccagaattcatatgcgtcctgccgagctgaaagaatatacagagaatgagacggctttcatcaatataatgaatgactggcacaagcgtaattcggagaaaataattacttatgaaggaaaaccgcaaaatttgattaaccctgcattactgaatgactgtatgtctattttagtttcaggaaaagaatcgacaaatgagaatgacctgacatataaaatattgttggcaaatgttgaaaatatccctcatgatcgttttggaatgacagtaatggctactgatctgaatgatccgaataagaaaataggatactttgcagatggttcgttagctatggttggtttggcaaattgggcaccttctcctcatggcggtgttacggtaaaagctgtaggcatctataatgtttctactgattactatacctctgtacggaactattcctatacgagacaacttatttcgagtgttaatccatctgtaaaatgaaaggagaataataatcatgagatatacagtaaataatttattttctttgttgcttgtagcgtccagtatgttgaccgttttttcatcatgtgatgatgatatggaaaactatgacaacaaagcctttgttagtacttcaaaagtaggtaacatcttgttgaaagggactaataatgaagaaaatgtagtgatccagactgcaattgctagaccggaaacaatggatattaaagtggtatataaagcggatgcttctttagttagtgaatataatttgatttatggtgaacaagctataattgttcctagtgagaattacgaaatacttgataacgtttctactattatggctggtgcaatgcagggaagtgaggtgaaagttcattttaaggatttgtcactattagatcgtaatttagtttatgttttacctgttacagtatctgaatctactatagagtttttaaaaagtactcgtaccacttattttgtaatcaaaggtgcagcgttaataaatacagttggtaatattactaagaactatctgactctacaatctcctggaacttctacattaagtggtatgaatcaattaactatagaagctttggtacggataaacctatttggcaaattgattagtacggttatgggtattgaaggaaccttcttgttccgtattggtgatgcaggtgttcctgataatcaacttcagttggctacctcaagcggtaacgtcacagatgcagcttggcaaattccaactaacgagtgggtacatttagctgctacttttaattctgaggatggtgcagtagaagtgtatctgaatggtgtaaaaaaaggagctactcagactgtaggataccgtagatccgttaattgggcttcagcaagtttctatattggaaaatcgtatgatgatgctcgctggttggaaggggatatttgcgaatgtcgtgtttggaatcgtgtattaactgacgatgaaatcaaagccaaagatcattactatgtggtagcttctgatagtgaaggattagtggcatattggaaatttgatgaaggtcgtggaaaagttattgctgaccacactggaaatggaaatacagtagtggcaaatggtgatataacttggactacggtttcattacccaaataatatacttattaattataagaagataaattatgaaatacatcaattatataaatatgaaaagttggattgcagcgttggtgctgtcagccggtttgtttgccgcctgttccgatgatgttttagtcggacaggtagacgaaagcaaatatacgactggtgatggtagcgtgatgggatatgttagtgatagctatggaaagcgtatgtttagtaacgtagagtttcgtagttcgggtagtgtttctttgcatttaaaaactactgcaaagttaacaatggaagccgcagtaactgtaacttatgacgagacggtacttacggaatataataagaagtatggaactttatatgaggtctttcctaagaatgaaattacattcgaaaatggaggcgtcattaaactgaatacaggagatgtacaatcatccgaaatgaaagtttcttatgtctccgatggaagcctttctgccgacaagagctatattattccgttgcgcatacaagtaacatccggcaactttaaattaggtgaagaagatcagactcgtttgatttttgtaaaagacttgacagggattcctgattgtactaaatatgtagacggcaaaccgggggtaaaagtatttagttgtatggaggtgaatgataccaatccgttgaataaccttagttttactctgaagagcaacgggaaaccgttggtagatgctttgattatattctctgccaatattaactataatgccgaaacaggacgtgtttatatcttcaataatgaaaatgtacaagctttgcttgataatagggagcactatctgaaacctttgcaggacagaggcatgaaaattattcttggcttgttgggcaatcatgatcgttctggagtagcaaacatgtctaaagaaactgctcaggcatttgcgcaggaagtaaaggcaatgtgtgatgcttatcagttggatggtattttcgttgatgatgaatattctgactatgagtatagcgatattactccgggttttgtgtacccgggtaaggaggcagctgcacgtctttgctatgaagtgaagaaagcgcagcctgaaagatgggttgttgcttatgcatatagtaccacatatggtttgccggctattgatggaatgcagtctggagaatttgtcgactatgcattgcatgattacggtggttcttctgatttaagctcctcatatcctggaatgccaaaatccaatatggggctatattctcaggaattcaatcaagggcgtacggcgagtgagtccagtttgcggagtatgcgtgaaaatggttatctttcacatatgatttttgcaatggatcctaatcgttcgaactttgaatggactcaaatgtctgcaatggaaagaatggcaagagccttttacgatgatgagttagtatttgatggtattaagtacccgaaagactggaattaggaaataactataaacgattaaaaagtaaaataaaatatgaaaatcacaagtaaaataataatcctgttgatgtctgtattattgccgatgggatttgcaggatgcagtgacgatgatgatatgcctaatcctggtggagaagaagcaccggaatttgttcttgggcaagagtccattaaagtgaagattggttctgaaaataaagcgactgtagatgtaaagcaggggggaggagagtatgatgcttttatcctggatgcaaagattgcaaaagccgaaatagcagacgggataatcaaagtagaaggacttgcaaacgggcagacttttctgatggtgtctgataagtatagtcgttatcgtaagttgcccgttagcgtttatacgactgataaacttcagttaagccatgaaacgtttgatttaataactctgttaggaaattctaagacattaaaagcaaatgtagtattgggcaatggtggatatgaagcaatgtcggataatccggcagtgtcagtatctgtcaatgaagccggtgagattagtatgaaggctacttccaaaaaagaagatttcacggctaacattactgttacggactgtacggggttgactgcaaatattgccgtaactgtaaaagcttctttggaaccttttactacggaagaattggaggctattaaggctgataatagtagacgttattattttaaaaataccagaactgatgattacgatgtcgaatatgtaaatacgacaaatgatgatggtaaaatcagatatggttgggaactttggggatattattgtcattatatagacttcatgggagataaaacggaaggagtgaaggaagctgctacattctcaataagttcatggagtgttagtggagaatattctgaccaagcggtaacattaaaaattataaagaatgatggaactaatctttggggagtattttccttcattgatgaagagagagaaatagtgtatgctggttatttctgcgatacggttaatccagaataggcgtaaatgaataatttacatgttgttaggtaaagtctgttcattgcatatatctttgtatatgaatggactttacctgataaattttagaaagtatgaaaaaatacacacttattttattggtcattacatgcttatgcagttgcatttcaaaagagaaagttgtgaatatcagatatgcgactttcaacatccgctatgataatccagtggatagtctgaataactggaaatacagaaaagaccgtgtctgcaagtttattatggacaaaggattggaaatagtaggcatgcaggaagtactttataatcaattggaagatttgaaaaacggacttcccggctattcggcaataggagtaggacgagaggatggaaaaagacaaggagaatatgcacctttgttttatcgtaacgatcgttttgaagtgttggacggtaatactttctggttgtctcaatatcctgatagtgccggatttataggttgggacggagcttgtacacgcattgcaacttgggcaaagtttaaggagaaggcaagtggaagaatatttatggcagtaaatacgcatcttgaccatgtaggaacagaggccagaaagaaaggggcattacttattattgaacgaattaaggaaattgtaggcgatcagcctgctatcctgacaggtgatttcaatgtaactgatcagtcagaagcatatacaacattgatcactaatgaatatgtcctgaaagatgcttataagatagccaagaatacagaaggtgctgaatatacttttcatgattttgatcgacttcctgaagagaaacgggagaaaatagattttattcttgtctcatcatctatcaaagttttaaagtccgaaataccacaggaggggaagggacctactgaatatctctcagatcataatccgcagatagctgatattgaattttaactatgtaactatagaatgccgacaatgaaaagatttcttggagtcttagctgttatttatattttagtatcggggtgtactgtacattcttcagaggtcacttcccccgatggtcatatccgtttagtttttgctttggacggtaataatcgtatgacctatcaagtcagtgtaggagacactgccttcgtcactccttctctattaggctttctggccaaggacggagtgaatcttgccgaaggtttcaaggtcataaataccgacttcaccacctatgacgaaacctggacgcagccttggggagaaaacaaaaacatccgtaaccattacaacgaaatggctgtccatctgtccgatacgacaaataccaaattaaccctgcgttttcgcatcttcgatgatgggttgggatttcgctatgaatatgaagttcccggagctgacagtattctggtgacagacgaactgactgcgttcaatatagcacaggatggcacctcatggtccatacctgccaattatgatacttatgagttgctatatcgtacacagcctgtcagccggatagacaatgccaatactcccatgactttcaaaaccggaggtctatatgccagcatccatgaagctgcattgaccgattttccggagatgaccttgaagaatacgggaaactgcaattttaaatccgaactggctccctggccggacggtataaaagcccgcttcaacggaggaagctttaagacaccttggcgtaccatacagattgccccgaaagcagtcgggcttatcaactccggtcttattctgaatctgaacgaaccttgtgcgctggaaactaccgactggatacgtccgatgaaatatgtaggtatctggtggggaatgcatctgggagtggaaagttgggtgataaatgatcgtcacggtgccacaacagagaacgcaaagcggtacatcgactttgcagcggccaacaacatagaagcagtgatgtatgaaggctggaatgaaggttgggaaaactggggcggttctcagacgttcgactatacccgtccgtatgccgattttgatatagaggaaattgcccgctacgcccgggaaaaaggagtcgcgattatcggacaccatgagacgggaggcaatattatgaattatgagaaacaactggataagtcatataaatggtatgctgatctgggcatccattctgtgaaaaccggttatgcaggcggacttcccgacggatacaatcatcacgggcagtataatgtgcgtcattatcgcaatgttgtagaaaccgcggcgaaatatcacaccaccctcgatgtgcacgagcccatcaaggacaccggaattcgacgtacataccccaatatgatgacccgtgaaggtgcccgtggcatggaatggaatgcttggagcgaaggtaatccgccggaacatcatgtcatgttgcctttcacccgtttgcttgccggaccgatggattatacgccgggcatattcgatatcatgtacgagcgtgccaagaactctccttatcgcaagcagtggaatatgaaagacagcaaagattgccgtataaactctacgctggcgaagcaaattgcaaactgggtgatactttattctcctttgcagatggctgccgatatgattgaaaactatgaaagccatccagctttccagtttttccgtgattttgatgctgattgcgactggtcggaagctttggcgggtgagccgggggaatttgtggttatcgtacgccgggcaggagagaaatacttcctgggtgcagctacgaatgaggaagcccgtgaagtcactgtcgcgctggattttctggaaaaggataagacgtaccgggcggtcatctatgccgatggcaaggatgctgactgggtgacgaatcctacggcctatgaaatcatagagaagcaagtgaccgctactgatattttatcagtgaatatggcgaaagggggcggacaggccattacctttatgccactttgatatgaatatgtaatactattgagatatgaaaaatatgagactaaattccataatggcgggtggagttctgttgcttgggatgtatggttgcaccccgaaggtacaggattattcatcgtacgtcaatccgttcatcggtacgggaggacatggacatacctatcccggggctatagtgcctaacggaatgatacagcctagtccggatacacgcatttatcagtgggatgcctgttcgggttattattatgcagattctaccattaacgggttttcgcatacgcatctcagcggtacgggctgtggagattatggtgacgtattgttgatgcctaccgtgggcaggcaagattatcatgcgatgggagaggagagtcagcagatggcttatgcttccgctttctctcacgagaacgagacggcccaacccggttattattcggtatttctggatcgctataaagtgaaggccgaactgaccactacccggcgggcggctattcatcgttatacttttccgaaagcggaagatgcgggattcatccttgacctggattacagtctgcaacgccagacgaatgaagaaatggagttggaagtaatcagcgacaccgagatacgcgggcgtaagaagacggtatattgggctttcgaccaatacattaatttctatgccaagttctccaaacctttcacctatactttggtgaccgattctatggcattggaccaaggtggcccgttgctgcccacagctaaagcgctgttgcagtttcagaccggagccggtgaacaagtccttgtgaaagtaggtgtttctgccgtggatatggacggagcacgccggaatgtggaggctgatatacccgaatgggactttgacagtgtgcgcagtgccgcccgcaattcatggaacgattatttgtcgaaaatagatattgaaaccaacgatgataatcagcggattatgttctataccgcactttatcatacgggtgtgcaacccaatctgtttacggatgctgacggacgctatctgggcatggacctgaagccccaccaaggcagtgtggaaaatcctgtctacacggttttctcattgtgggatactttccgtgcctatcaccccttaatgacgattatcgatccggatttgaatcaggcttttatccgttcgctcatcctgaagcagcgcgaaggcggcatcttccctatgtgggaacttgcaggcaattataccggaaccatgattggctaccatgccgcatccattattgctgacgcttacacaaaaggctatcgtgattttgatgtgcaagacgcatacaaggcttgcatccgtgctgcggaatatgacactaccggcatcctgtgtcctccgctggtattgcctcatctgatgccgcaagccaaatactggaagaataaaataggctatgtgccttgcgataaagacaacgaatcggtggccaaagcattggagtatgcttatgatgactggtgcatttcgctattggcggaagctctgggtgatggccctaatcgggaaaaatatgccgcattcgccaaaggataccaggtttatttcgacgcttccacccgcttcatgcgcggactggacagtgaaggcaactggcgtacacctttcaatccccgttcttccaatcaccgcaatgatgattattgtgaaggtaccgcttggcaatggacctggttcgtgcctcatgatgtggacggattggtagatcttatgggaggccgggaggcttttatcggcaagctggactctttgttcatcgctccttcggctatggaaggtgaatcggtatccgttgacatttcaggtctgatagggcagtatgcgcatggaaatgagccaagccaccacatcgcacatctatataactatgtcggtcagccttggagaacgcaggaattggtggacgaggtgttgcacacactctatttcaatgatccgaatggattgtcgggcaatgaagactgcggtcagatgtcggcgtggtttgttcttaattcgatgggattctatcaggtgtgtcctggtaaacctgtgtattctatcggccgtcccttatttgataaagcaaccattcacctgaaaggcgggaagactttcaccatcgtaacacataacaatagtcgcgagaacaagtatgtgcagaagatggtcctgaatggtaaagaactgaatgcgcccttttttgcacatcaagatatgatagacggtggtactctggaattaacgatgggcggtgaaccgctgaaataaaagtcaaataggtatgagtcgaaatagtcgtaatccgatttcctgggtacccaccgtctactttgctatgggacttccctttgtggtgctgaatatggtatctgtactgatgtttaaaggcctgggcatcgatgatgcgcagattgctttgtggacatcactgattatgctgccctggacactgaaattcctttggagcccgttcttggagatgttcaaaacgaagaaattctttgtagtgttgacacaactgattaccggggcaggctttgccctggtagcgttggcgttgcatcttccggctttctttgctgtatgtattgctttactggcgattattgctttcagcggggcaacgcatgatgttgcgaccgatggtgtttatatgtcagaattgaataagcaggatcaggctaaatatatcggttggcaaggtgctttctataatattgctaagattgtcgcatccggtgggttggtttggttggcagggtggttgctgaaacactatgggggagttccgggagcggaggagactgttcgtcatgaagccactgtgcaggcttggatgacggttatgttcattctggctgttgtaatggtattgctgggagtgtatcacatgcgtatgttgccttcgggaggcactgctgccacgggcacgacatccggtaaggaaacctggaaccggttggtggaagttatccggaatttctttcagaagaaacatatctggtattacattactttcatcattctttatcgtttggccgaaggctttgtcatgaagatagtgccgttgtttctgaaggcggaacgttcagtcggtggtctgggactgggagaacaggagatcggtttgtactatggtacttatggggcggctgcatttgtactgggttccctgttggccggctattatatatctcacagagggttgagtcgcacgctgttttcactgtgctgcattttcaatcttccgtttctggcttatacgctactggccatttatcagccggagaacggcatgttgataggcggtgccattgtgcttgaatatttcggttatggtttcggattcgtaggtttgtcgctgtttatgatgcagcaagtggcacccggtaagcaccagatggctcattatgcttttgcttcaggcatcatgaatctgggtgtgatgttgccgggttctatcagtggctttgtcagtaacgcgttgggatataagacattcttcatcttcacgatgtttgctactattccggcattcctgataacgtattttgtgccgtttacctatccggatgaaaagaaaaaatgatattattaacaatataaataagaagaattatggacagtaaaattataatgccttgggaagaacgtcctgaaggttgctcagatgtcatgtggcgctattctaagaacccggttatcgggcgttaccacattccgagttccaacagtattttcaacagtgcggtagttccgttcggagatgggtttgccggtgtgttccgttgtgacaataagtcggtgcagatgaatatctttgcgggctttagtaaagacggaatcaattgggagataaatcacgggcccatcagctttaaggcggggaatacggagatgatagagtccgagtataaatatgatccgcgtgttacctggattgaagatcgttattggattacttggtgcaatggttaccacggacctacaattggtatcggttatacattcgacttcaaagaattcttccagtgcgaaaatgcctttttgccttttaaccgcaatggggtactttttccgcagaagatagatggtaaatatgctatgttgagtcgtccgagcgacaacggtcatacaccgtttggagatatttacatcagttacagtccggatatgaaatattggggggaacaccgttgtgtgatgaaagttactcctttccccgaaagtgcatggcagtgtacgaagataggggcaggttctgttccgttccttactgaagagggctggttgatattctatcatggagttattactacttgcaacggtttccgctattctatgggagcagccattcttgataaagagaatcctgccaaagtgttatatcgtacccgtccgtatctgcttgcacctgctgctccttatgaattgcagggagatgtgcccaatgtagtattcccttgcgcctctttgcaggatggagataaagtagctgtatattatggcgctgccgatacagttgttggcatggcctttggctatatttcggaaatcatagaatttacgaagaaaaacagcattgtatagttaatcccttaaagaatcagtcgactatgaaacgtattttattggcttacacactttctgccctttgtctgcttccggcgtttgccggaggtggagagggggctttacctataagctatgtcaatcctttcatcggtactaccaactttggaactacgaatccgggagcggtctgtcccaatggaatgatgtccgtggtccccttcaatgtgatgggatcggaagataataagtatgataaagatgctcgttggtggtctactccttacgagtatcacaattgcttttttaccggctactcgcatgtcaatctgagtggtgtagggtgtcccgaactgggatctttattgctgatgcctactacgggtgaattgtccgtagattataaagagtatggaagtcgttataaagatgaacaggcttctccgggatattacagtaatttcctcactcgctataatgtaaagactgaggtgtctgccactcctcgcacgggtgtttcacgttttacgtttcctgccggacagagtcatgtattactgaatttgggtgaaggactgacgaatgaaaccggtgctttcttgaaacaggtgagcgacaccgaatttgaaggtatgaaattattgggaactttctgctataacccccaggcggtatttcccatttattttgtaatgcgtgtcaacaagcaaccggcatccagcggttattggaaaaagcagcgtcccatgaccggagtggaagctgaatgggatcccgacaacggacgctacaaactttatacccgttatcgtaaggaaatagccggagatgatatcggtgcttttcttactttcaacacgatggaaggtgaacagatcgaagtgcaaatgggagtttcttttgttagcattgagaatgcccgtttgaatctggatacagagcaaagtggaaagaatttcagtcaggtattggctgatgcccgtatgcgttggaatgaggatctttcgcgtatccttgtcgaaggcggaacggaagaacagaaaactgtcttttatactgctctttaccatacattgatacatcccaatatcctgcaagatgtcaatggtcagtatcccgccatggaaagtgatcagattctgacaacaaagggagagcgttacactgttttctcgctttgggatacgtatcgtaatgttcaccaactccttacgttggtttatcccgaacgtcagttacaaatggtgcgttccatgctcgatatgtatcgagaacatggttggctgcccaaatgggaactctacggacgtgaaacgttgactatggagggtgacccgtctattcctgtcatcgttgatacctggttgaaaggcttacgtgattttgatatcgatctggtttatgaagctatgtataaatctgccactttgcccggtgccgagaatttgctaaggccggataatgatgattatatgtcattaggatatgttcctttgcgtgaacagtatgataattcagtctctcatgcattagagtattatattgcagattattctctttccctgctggcggatgcattaggtaaacgggcagcgggacagggtaaaaaagcagaagcgcggaaatatcaggctgatgcccgtcttttttataaccgttcattgggatataaacactattatagtaaggaatttggtactttccgtcccattctgcctgacggtcagttctattcacctttcaatccgagacagggagagaattttgaaccgaatcccggttttcatgaaggatgtgcttggaattacagtttctatgttccccacgatgtgaaagggcttgcccgtctcatgggtggacagaaacctttcattgaaaaacttcagcgtgtctttgacgatggtctctatgatcctgccaatgaacccgacattgcttatgctcatctcttttcttatttcaagggcgaagaatggcgtacgcaaaaagagactcgaaggcttttgcagaagtattttaaaaatgctcccgatggtattcccggtaatgatgataccggtaccatgtctacctgggccatctttaacatgataggattttaccccgactgtcctggtgatccgtattatacccttactacgcctgtattcgacaaggtggtgattcgtcttgactctgatacttggggaagcgataagctggtgatagaaactgggcgcccttcaacagagtccttatacattcgtgagatggagttaggagggaagaaattatcccgctaccgtatcagtcatgaagaactggtaaaaggtggagtgctgagatttatacttcgatagtataaagaagagaagataaaaacaactttgatcaaaaaaacgggtgatcacaaaccacttgcgatcacccgatattttcattgttttcgtgtttaggtaatgttagtaaagagagaatttatagtattttatttcataggttccactgtataacctttttctttcaatagcttcaataccccatttgttcctggcagatgtcctgcacccactacaaagagagtaggggtttctttcatgattgaaggcatcttctcaatccaggctttgttgcggttgtctaacagatcttccatttctcccggttgagggtcacaggagttgccgtcacgctcttccatcagtttcaacatttcgtccaggttttgagctttataggcattgttcaagcgtttggtttgatccatagctttatcgatgtcacttactaaacagtaaagcagatttgcctggcgttgcaatgtttgactattgagcagtacgttgatttgtgatatcggagtttccaaaccgcctactttcttgccactctgtatagcttgttgttggaagtaagtatccagttgttcttgtggattgaaaccacccaaatgcttcatacataaaataagagtcaattgctgggtgatgaaagccggtttcattttagctaacatggcaatatccgccatcaggttttcttttacagccttacctactaactcatattgttcgggggtgaagagaacttgaagggtcgtgtctcccgccatcatcatgttttgctgcatcgtttgcatgaattcaggagacattgcttcggacataactacttctccatatacttgtgaagtaccgtctactgcctctggcaaaccggcaatgctgtcttttatgcttagcggagctaaatggtgcgttcctaaaatgtatgagggcttttccaggccgttaccggatattttccaaagtaactgcgcattggcattcagtgcgatgccgataaaaaggagaatacctaaaatctttttcattatttttctatttagagttcatttgaatattgcttattattttactcgtcctccgcgaagccagtattgcgtgtagtattgctcgttgagactgctgacaataactcctttacttgtgctggcatgtatgaatttcccatttttaagatagatacccacatgggccactcttttcttggacgcacgactggtgaaaaacaccaaatctccctcacgcaggttgcgacgggagactttattgctttctttgagttgttcatcggtgcttctggataaacggatgttgtatacctgcttatagagttgtgataccagtccggaacaatctgttccgcgtttgttgtcaccgcctgcgcggtaggggacacctatccactccgcagaggctatgtacaatttgtggttatcttccttatttatgtctattcccatgcggacagaagcttttgccagcgctttgtagtcgagacgaggtgctgatgtatggcaagaacttaaactaaaggtcagtccgataagtgcaactatataagagaggtatttcttcatgcttgttcctctttctcttccggttgaacaattgtttcctgaacgggcgtttcctgaactggcacttcttgaattgctgtttcctgagccgtcatttccattttctcttcttcaatttcttcttctactctgacattaaaatagtcttcaagctccttttcagccgagttattctcattctgaatatcacggataatcactccattctccatcagagcaatacgcggacacacatccaccgtatggtttaggttatgacttgaaataatgactgtggcatggtgatcttcattgtattttttcagcaggtgcttgatgatggactgtgaactcggatcaaggaaattgaacggttcatccaggatcagcaattgcggatgatgcagcatggcggagataatacctattttctgcttgtttccggcagagaagttacggatgaatttcttttgtccgaggacttcgttactcatgaagcgttcaaatggaagcagacgttcgtctacctcttcttttttcagaccgtacattttaccgatgaagtagaaatattcttcgggagtgaggtaatcaatcaggaaaccatcatcgatgaaagcacctgtgaattgtttccagtcttcatttttggatacatcgatgtcattgattgtcacatttcccagatctgcctgtagcaggtccagtatcagacggaagagggtagtcttacccgcaccattgttgcctaccaatcctaacatatcgccctggtagatgctatatttctcgatatctacggctttcttttcgctgaagtttttttgaagttggttaatctctatcatattcgttattatttttgtctactatcgtgaaatccttccatattcttatatcggcgcttcatgaagcgatgatatacattccgtagccaccatcttgaagttgcgatgaatagtatgccgacaactaagagaatccatggggttacttctttgcccaccgtcgcattcagtacgaagaatagtagcaacggcactccgaatgcacctcctgcaatgaggttctgcaaaccggtacccacattttgccgtccagtcattttggcattaaggtcaagcgtcttgttgttatacactgccaactgaaacagacagaagtatacggcacccggaacgaatataatccaagcggtgcattccagtacagatactttacccgtcaccatacccggtatcatcagcacaaacgggatgatgagtgcgatgctgtacaagatgtatttggcacgcaacaatgaatagatggactccttgcggctcatcagaccgtcaatgtagttaccttcgtagctcatcagcggagagaggaacagaattccgaagatgatatagttgtaaagtacgaagaagtcgcgggagccaccatcgtaaatatcagaaaaactgatggtaagactgaaaatcagtactatagcggtaacggaataaagtgacttcctgcacaccttgttgcgtagtagcaatttcaactccagccggatgtattcgcctatttcgccataacggtccaggaacttgtattcggatactgtttttacttgaacggtagtgtcttctgttttattcagttcattgtagaccagtttttgcataatgctccggttgatgaaccacataagggaaatggctaccaggacacagataaatgtgagtatgtttcccgtgataaatccttcacccagatcaatgaagaaaccgaataacggactgtcatctggaacgaaaagtgcagctgcaatacctccgtatacgactatcggcaagagaacccaccagatgcgttcgtccatcagcgtacgacatagcagataccagtaattattgaatacgatgagcaaccaaataccaatgcagtaagtcaatacacctcctattccataaaatttggtaacagtgataatagcgaacggaacgaacaggaagagccaaagcaaattaaagctgttaagtcccgagcgtaggagcaggaagtcgataagacgactccttttgatggggagcagtaagtatggtttaacttcctgtgtcggtgttttcaggaagggtaaccgcaaaaggaagtccagggcgagtatgaagatcaggccgctgttcattacgtgataggcttctttggcgcctccgtcgaaggcgaaagcgaatgttgttccgaagaaaatgagataccctgcccagaatacactcatgaagtacatccaaaactttccgaacttacttttctcgtacatcggatgccgcttttcagctaactttccgtgtctgcgtagctcaagaaatagattcatgttgtttagtgattagttgttagtgattaatggagtgattggaaggtagtgattagtaataagtaagaatgcactcgcttatcactaatcacttatcctttatcactatttgttgggtaccgtcatggttacctcgatttcatttccttgtttcaacaggtcagatacaaacttttgaatgtctttagctgtaatgctatttacgatatccgtgtatccttctgtcatatccatgccataatagaagtaatcgttcagattattcatccagtatccgttttctttctggttgtcggcatacttcttcagcatgtactcttttactttctgcaagtgtacgtctgacggtccttcggctgcaagtttcttcaattcatctactacaatacctgccagtttatctttcttagcaggatcggtctggaagacaatctgcaacaataattgttctttcggatacttctgtaagtcgccaaaacagtttacaccatatgtaccaccttctttttcgcgtacttcttcagtataaaccatatcaagaacctgagttgcaaagctcagcaaaatgtcattctttagagtataaggagctttaccgctgtacaggaatacgatggttgctgtaggagtttgttgctctttggcatattcatttttgtacacacctttgcgtatactcatcttcgtatctttgaaggtctctttgcgattgatggcaggcagtgcacctaagtattcggcaatcagtggtttggcagtttcaaggtcaatgtttccgacaaagtagaatgtaaagtcgctggcatctttgaaacggtcgttgtacatttccagaatacggtcgtaatcaatctgatccaccatttccggtttcatcattactacacgcgggtgattattgtacattgctttctgtaaagagtcgtttatagaagaaagaggatttgcctgcgcactttccaattgggctttcatacggtttttaaaagattcgaatgcttccgcatctttacggggagcggtgaaggtgagatatgtcagctgcatcatagtttcaaaatcttttggtgagcaggtaccgaatacattctcagtggtagcacccagaccggcattgacggaaactttcttgccagccagtactttcgtcaagtctacttggctgaagttacccaaaccacctacagctattacgttgtccataacggcaaagttcagtgcgtctttgtcggggaaaatggatttaccacccagactggtacctttcatgcggatttcatcagctttgaaatcagtcttctttacatagacagttacaccatttgagagaactaatcttgtactaccatagatatcgccttctttctcagaaatgattttaccacctttcggagcttctttcatcagcggttcgtcagatactttgtctacgtatgcttgcaggtcgagatctttcatacctttcagtaagttgataacttcttcttttgtcgggtatttcaagctttcttttgcaggaccggcaattataactacttgattgctatccggaacgagttgctgcattaccatattcatggcctgtaagggaatgttaggagccagttggttcatcatagcgtactcagcttcaatccccgggataggctcgccattcaagaagttctgtacatattctcttacgtaagaaccgtgcttggtcttttcgcgttcgttgtaggcagactctaaactctgcaaatagttggcgcgtgcgcgtgcatattctgattcggtaaagccgaagcgacgtgcacgttcagtctcttgtagtaaggttttcaaggctgtttcaatgccgtcggctttacttgaggcagaaagtgcgaaggcttctttggttttagcgacaaagaagtcgctatagtaactgcttgcacgggtaaacggtgggttagcactttgcaccaattcgctcaggcgggcgttcaacatactactgatcatgctcgtcatatattgtgaagcaaggtagcctacattattcttttctgaatcaggagtcgcatcttgcttgaagtaaatctcaattgacgggtcgtctacttccttatctgtaccgatagctacgatgggttccttattatcagtaacaggatagtaagtgcgttctgccggatttaccggtttttgtacatcggcgaatactgcctttagtttagcttctacggtgtctacatcgatatcacctacaataacgataccttgcagatcaggacgataccatttgtgatagtaatcgcggatatctttataagggaagttgttgattacatcaatagagccgataggcatacaatctgcatatttgtcaccctgatatatagttgggagcaggtcagtgtagacgcgcaacataccactgttgcggctgcgccattcttcacggatcacaccacgttctttgtcgatttcatcgtctttgagtaggatatagttagaccagtcgtgcaggatcagcagacaggagtccaatacaccggtgcggtcaatcggagcattactgatgttgtaaacagtttcgtctatgctggtataagcatttaagttagtaccaaatttgatacctacggtttcgcaccaagggatgacgccgaggcctttatcatcaccggggaaatttttagtaccgttgaaggccatatgttccaagaagtgggcaagtccgcgttgttgcggttcttcaagaatggaacctactttctgggcaatatagaactcagcccgattttcgggtaatttgttgtggcgtatgtaatacgtcaggccattgtctaattggccgatacggacatttttgtccacgggaaggggcggaaactgcatttgctgcgctaccgcttgttggaaaccggcacatagaacgaatgctactgccagtaaactgtgaaataaatgtttcatgttgatgaaaattaaaattgtttcttgacctatttgtcgaagagggagaggagaaatcacaggaaggatatattttttatatgaatgataatttagcaaattatcattttatcgcctcacgaattcgtaccagtttcgtcagcagtccttccagtaaatcgagcttcagcatattggcaccatcgcttttggctatttcggggtgctcatgtgtttcaataaacaatccgtctacaccaaccgcaacaccggctttggcaacggtttcaataagctgcggcataccacctgtcactccacttgtctgattgggttgttgcagagaatgtgtaacatccagaatgaccggataaccgaaggtttgcatttcaggaatgccacggtagtctacaacaaggtcttgatatccgaaagttgttccacgttcggtaatcataacttccttatttccggcttctactaccttttccgcagcaaagcgcatggcgagtggagacaggaactgtccttttttgatgttaaccacctttcctgtttttgcagcagctatcagaatgtctgtctggcggcaaaggaatgctggtatttgcagtacatctacatattcggcggccattgcggcttcttctgcagaatgtatatctgtaacagtaggcacaccaaaagtatcgtgtactttctgtaacactttcaacgctttttcatcgcctattcccataaatgaatccaggcgtgaacggttggccttgcgataagagcctttaaatacataaggtatttgtaatttctccgtgatatttaccacacgttcggcaatacgcattgccatctcttctccttcaatcacacaaggacctgccaataaaaagaaatttccggcaggattattctttaattcaatcataagtaattagtgtatagtgcttaacgttaatcgttattcttagttgggtataatcaatgttatcgcttcatgcataattccgatgtccagtggaaaatgccggtcgagaatacgtccgtccaagtccaccgaagcattttgtgcacgtagtacttttactttctgggtacggtaaggcatcacgactttatgattcagaatacgtccctggataagcatccacagtcctgatacgagttgtaacagctccggacgatagataacggatacatcgagccaaccgttatacggcacggcacttggtgcttgtccgtatccccatgcactgccaatacataccgtcatgatacgtccccggatgtgttctccgtttattttgagatgcatccggtagagcttccgttcaaaaaaaagtgagatgagggccatgagataggacaggaatttcactccccagaaacgtttggtctggtcggaaatcttcacgatacgggctcctaaaccaatgttgattgcattgaggaaatagcgtgttacatgcttttcaccatcgtaatagttgcaaaatccgacgtctatcttccggcgtcggttatttatgatgcaatctacggcatctttgtattccgaagtcatttcccagtatttggcaaagtcatttccgataccgttgggaatgatacctatggcgatttctcttttatcttctgcattggacgacatgataccgttgatggcgtcgtttagtgctccatcaccgcccaccacaacaatggtgcggtatccattattggcaagaatgccggctaaacgttccacagatccgaacccttcagactgcacatagtcataagacacgcctcggctgtccatatattctttgatttctttccaccgtttctgcactttccgcgtgccggctttgggattgtatatcactccccacttttcgggttctacgctcatattgttatctcttagtaaagtcctacataatcatttttgtactctccccgcagtctttgtctttgttgccccaaagatactaattcccttcgagtttcgcttgtacaaaagcaatcttttcttccataggcagcccggcatccatccaatggatagtaaagccgcgtcgttccattccccggaaccaggtcatctgccgtttggcaaactgatgaatagcaatctccagttccctgtacatctcttcgtatgtcagtttgccgataacgtacagagtcaggtacttgtattccaggccataatagataagatcatccggttggataccctgttctatcaggcgtcgtacttcatctaccattccttcgtccagacgttgacgcaggcggttggatatcttcgtacggcgtaattcccggtctatatctacaccaatgataaggctgttcagtttcgggaactcccgttcgtctaccggtgtatgtgcataatattcttctatctcaatggcccggatcgctcgttttacggtgtcgacatctgtagtattatgcagggctttgtattgcttcagcatctcagtcagttcttccagggatttatcggcaaggcgtgcacgtaactccgggttttcgggaactggcagcaacttatagcctttcaatacggattccagatacataccggtacctccacacaaaacgggaagtttccctttttgtttaatagtctcgtacgctatcagaaaatcacgctgatattcaaaaacattgtatttataacccgggtcggcaatatcaatcagatgataggggattagtttaccatttacagtgtagtctaccaggtctttacctgtaccgagatccataccacggtagatttgccgggaatctgcactgatgatttctgtgtcaagaacatctgccagtgctgcggcgaaaggagttttaccggaagcggtaggacctaatatagctatcaaatcatagtcaggcataagtcgttttgattatttttctacaaagataatgcaaaccgaaagcaatacaaaataagcttgattatttttaatgctaaagtgcagcttgtcttcgttttaaagctaaatatgaaaaaggaagtgaaaaagagaatgccttctcttaaatggtgttataaatgcgttgttttcgcacacggaacttgctactttcaaaaaagtgcgtacctttgcactgtgtttttcatagtattagatttaaggttaacaaaggttggagtacagcggtactcctttttttatgtctatacctcatctcctcaatattgaaatattcatttcattcatacctcatttgtataccacatccatatgctgcgtggctatgttacatcattgaaagtatatgtaacagatatgagaaagtatgtaataccagtataaatacgtgtagcgcaatgatgcagatgtattccaggggattggataaatttgcagaaataaaaaaagaaatgatatagggaaattaggtaaaggtaaaatgaaacttcagttttcagtgaataggtttaccaaattaggttagttaattatttttaggtctgtgaggttgtgtttgtgaaaacacaacctcatttatatggtgataaagatgtatatttgcaatactaaaagtatatgccaagctatgaaatacatattgattctgctacttctgttgatttttccactatccggtattgcggaaaagcattgtgtctttactccaattaacggaacgcatggattgtccggaaataaggtgcgcaatatcactcagttgccggacgggcgcatgatgataactacggaaggattactgaacttatatgacggtactaatttcagttacctgcactatgatcgggaagatatctgccgtttatcagactattccggatttcatcacgaatatatagatgctcacggatatatgtggcttaaaaatcaacgccaactgatggtggtggatataggacgtgaatgttttattgagcgaccggacagtttgctggctttatgggggatagatactccgatgaaggattttttcatggataagaccaaggatttatgggtcataacggataaggatgatttggtacgcatagataagacaactctgcaggcaagtacttttctgaatcgtgtttcattgattggagataccaccgatcaggtttatgatcttggggtgttggacgggaacttatatctgttctatcgttccggtttattgatttgttacgctatggagtcacaaaaggaaatatatcggcagaaactgtcggatgaacttcctgaaggagtgtatgggaatacatcttacgtagtgccgggaacgaatactttctaccagttatgcaatggtaacagaggcggggtaatgttggcttatgatgtagaaagaagaaaatggaacatcgtgttgcagacaagctattggctgaattacctgtctgttgataaagacggaagcatatggattagttgtcataaaggattatggaatatagatgcggggctggaaagaaaacaatatataccaaccttgaaattagtggacggacgcaatataaatacagaagtgagtacgctttacaatgacagccaaggtggcatgtgggtagggaccttgaaccggggaatcctgtattatcatccggaccgtttccgttttcagaatattggcaggacattgtttcccgttacggaaaatatgaatctttatgtaacttgcattgcagcacaaaaccaggagaatatgtgggtggggacccggaaaggactattctcctatcatctttctaatggagacataaacttatattccaaggaattgtccacagtcaattgcaataccctgtttaaggacagtcggcaacgtacttggttgggaagtgtcggacagggactttattgtatgctgccggatggagaaaccagacattatccgttgtccggccagacaattcattccattatggagcaaccggacggaactctgtatttatgtactgaaaaccagggtttcggtatatttactcccgaaaccggacaatatgaaaaggagcagggactacctcagacggagaatttgactgtctaccaattggcatctttggggaaggatcgtttagcaggcattacacggaaaggttggtttgtttatgattgtacccaaaaagaatatacctttaaccccagttttcatgtgtgtacttccatctttgtagaccgacaaaagcaagtttggattggtctggaagatgggttgttgctttgcaacatagctaccggacaacaaaacacgtttcataccacggacggcttggtcaataactctatccgttccatcattcaaacacaagatcatgctatctgggtatctacttctaacgggataacacgtatcactgtaacgggagagggagaacagatacgatattcgtttgcaaatttcaatcggtacgatggtgtgattacggatgaattctgcgagcggtcctcttttgtcgcagaagatggaactctctactggggtggtattaatggatttaataagtttgttccgcttcataccacaatggagcgggcgtatgccgcacctttattcgtgggctttgatctgtttggtgaacgtgtggaaagtggaaaaatgtatcatggtaacaggatacttcaacgccccataaccttgaccaaagagattatcctgaactatgatcagaactttttcactttagagttttctgccttgaattatatcaatcccacacagacctattatcgttaccaactgacgggtattgactattcggaacgggaaatccgctcttccgatggtaagggtactgctacttatactgacttgccgcctggcacttacactttcagagtgcaagccgctgataatagtgagtcgtggacgggaaaatatgcggaaattgaaataaccgtaaaagctccgttttggaaaaccacttatgcttatctctcttatttcctgttcgcaacgggaagcttgatcgccctagtttttgtatatatacgacgcaaacgccgaaaactggtacgtgaacaaagagagaaactggatgaaatgaagtccactttcctgcaaaacatcaatcaggaactggcagaacctatcaatcgtataatctctcccttggataccattttaaaacatacggatgaaggcagaaccaaactgcaattgaaggaaatacagaataatgccgtagagctgaaagaactggttgaccagctttcggaaggagtcctgtcccctctgtcgcctgctgaaaatgagttggctttggaagaactgttgatgaatatgcgccagttgctggaacaacaagagaaaaggaaagaacaactgaaagcaactccggaagctgcgccggacaactccttgctatcggcggccgatgaattgtttcttcgtaaggctttgaaatttgtagaacagaatctggacaatcccgagtattcagtagaggtattgagtcgggacatgggaatggatcgcacggggctgtatcggaaactggtttcagtggtaggaaagacaccgacaaattttatccgttccattcgtctgaaacgtgccgcacaacttttggaagaaggacatacggtggccgaagttgccgaccgggttggattcagtacatccagttatctgagtaaatgttttcaggaagagtttggtatgcgtcctttgcagtacgttaatagtctgaaagaacaaccgaaatagtcacatttcaacgagattgttgcttcttgcaacatttgtaccacgtgttttataggcttcaggctacttttgccctcataattcaatttttaaatgaaatatcatgagaaaagtaaaagtaggaattaccggtatatttcttttaatatccggtttactgatggcgcaaaatgtgaataggacgccacagggtgtaaaggtaaatgtggcggaaggaaacttcaatgcagaagttattttttattctccttctattgtccgcatagtgaagtatccttcggtaaaggatcagatgccggacaaagaaagtctttccgtaacattggtgccggaacaaactaagattgattttaaggaacagggagatgatgtcagattgaaaacgtctgatatgattgttactttaaacaagaccgatggaacggtacgcttcaccgatacaaaaaacgacgaattactggcagaaaagggaaccccttctttttatccgaataagggcaaagccgataagggcacttataaagttcgccaggcctttatgcttgaaaaagaggaggctatatatggattgggaatacttcagaatggtaaaatgtcgcaacgtaaccaacggaagtacctgatgccaggtaatgtggaagacggaatcactttcttccagtccgtgaaaggctatggtcttttctgggataactattctccgactaactttgctgatgatgagaatgagacttcatttgaatcggaagttggtgattgcacagactactatttcatgtatggtggagatgccgatggcgtagttgcccaaatgcgtactcttaccggacaagtacccatgttccctttgtggacgtatggctactggcagagcaaagagcgttataaaagtcagaatgaagtactgggcgtactgaacaaataccgtgaattacagattcccctggatggtatcgtgcaggattggcagtactggggtagtaactacttgtggaatgcaatggaatttttggatggtaattactataatccccagcagatgctggatgagattcatgcaaagaatgcgcacatgattatcacgatctggtcttcattcggtccacagaccaagccttataaggagctgaatgaaaaaggactattgtttaatttcaggacttggcctcttgcaggcactgatacgtggcctcccagagaagactatctgtcgggcgtgagagtttatgatgcctacagccccgttgcacgtgatatttactggaaacatctgacccgcctctatgatttgggtatggacggttggtggatggactccaccgaaccagatcatttagacgcaaaacccgaagattttgatacacctacctatttaggttcatttcgcaaagtacgcagtgcctatccgttgatggccgtaggtggtgtttatgatcaccaacgcgctacgacttcagacaagcgtgtgtttattcttacccgttcaggatttgctgggcagcagcgctacggatgtaatgtatggtcgggtgatatcgtttctacctgggaatcattgcgtaaacagatacctgccgggttaaactttacccttacgggaaatcccaacttcaatagtgatattgggggcttcttcttaggccattacaacaagggatggaatgatggatcggctacaaagaatccgtcctatcaggaattatacgtacgctgggtacagtttggagcgttcaatccgatgatgcgttcgcacggaacggaagctccgagagagatttatcagtttggaaagaaaggagaacccatttacgatgctatcgaaaaagctatccgtttgcgttattctctgttaccttatatatattctacttcctggcaggtcaccaataagcagtcaagctttatgcgtgcgttgatgatggattttgccgatgacaagaaggtgtgggacatgaatgacgaatatatgtttggcaagtccatcctagtggctccgattgtggaagcacaatatactccggaagtggcagctactgcatcggaagagacaggctgggacagggatgacaataaaaataagagcaaaggcagcatgacagtagacttcactacaaagaaaactgcaaaggtttatctgcccgcaggtactgtatggtatgatttctggactaatgagaaatatgatggcggccaggaaatatcaagagaaacgactattgatatgattccactttacgtcagagccggaagtattgttcccatcggccccgatgtgcaatatgcgacagaaaaaacctgggataatcttgagttgaaagtgtatgcaggtgctaatggcagtttcaccctttacgaagatgagtttgataattataactatgaatcaggagcatatacggaaattcctatgacatggaataatgcttcccgtacgctcactatcggtgcacgcaagggaaaatataacggcatgcttgaaaaacgccagtttacggtgaagacagtggacggcaacagcaagacggttacttatactggaaagaaggtgacggtaaaactctgaccagatggagtaacttcactttgagtgtgatgcctatcatcaatggtattgatggtgggcatcatcggcattgttgataggctaaggccaggggacatgagtgatggaggtaaatcaaaggtaagatgcaggtttagggccgaccagagccattttttgagcggatgttacatcaatgtaagtttatgtaacatgaaaagacgggatgtaacattgaccgtagcaaatgggaacacgaagattcgaaaagtactttgtaatgaactatctttgtacaaaacgaaggttaattaaaaagtatcttaccatgaaaacaagaattagttggattttttattgtttagtaagtttcatgttacttccctctttgtcggcggcagagcgttttgtgacaaatgagagtaatggttttacctggatacagcaaggaaaggcgtatccgatactggtagactcgcaggaagataaaggtgtactgagggctgttgccaatttgcagacagatgcaggtaaagtgacaggcgctactccggaaattattcattccccatccggtaaccgtatactgattgtcggttctgttgaaaatagttcctggatcaaacagctggtgcaggcaggaaagatcccagctgcagatttgaaagggaaacgtgagaagtacattcttcagacggtgaagcagcccgtggaaggagtagaagaggcaattgtcattgctggtagtgacaagcggggaactatttacggtatttacgagctttcccggcagatgggtgtctctccctggtatttctgggcagatgttccggtggagaagcatgatattatatctattaaagaaggtgtatataccgatggtgaaccggcagtgaagtaccgcggtattttcctgaatgatgaatggccaagcttaggcggctgggcgtctgctacctttggtgggttcaatagtaagttctacgaaacggtgttcgaactggtgcttcgcctcaaaggaaattttatgtggcctgccatgtggaacagtgctttctacgatgatgacccgatgaacggtccgttggccaacgagatgggaattgtgatgagtacttcccatcatgaaccgatgggacaggctcaaaaagactggaaacgtcgtggaaaaggagagtggaattacactacgaacggtgccgtgttgcgcgacttctggcagcaggggatggaacgctgcaaggattgggaagcggtgatcacccttgccatgcgtggcgacggcgatgaaccgatgagcgaagatgccaatatctccttgttgcagaatatcgtgaaagatcagcggaaaatcatagagaaggtaaccggtaagaaggttaaagaaactccgcaggtatgggcgctttataaggaagtgcaggattattatgataaaggtatgcgagtgcccgacgatgtaacgttgctgctctgtgatgacaactggggcaatgtacgtaaattgcccgacttgaaagcgaagcctcgtaaaggtggttacggcatgtattatcatttcgactatgtaggggctccccgtaactccaaatggataaatattactcagatacaacgcacgtgggagcagatgatgctgacctatgactatggcgtgcgcgaattgtgggtggtgaacgtaggtgacttgaagccgatggaatatcctatcaccttctttttagatatggcctgggaaccgaaacgtttcaatgaaaataatctgtttcagcatacggtggatttctgtcgtcagcaatttggcggatactatgccgaagaagcagctcgtctgatcgacacttatactaaatacaaccgtagggttactccggaaatgttgaatgatcggacttacagcctggaaaattataacgaatggcaaagtgtaaaagatgaatacgctgcattgtgtctggatgccttgaaactttattatctgatgcctgccgaataccgggatgctttcgaccaactggtacttttcccaatacaggcatgttccaacttatatgatatgtactatgccgtggcaatgaaccgtaaactggcagaggccaatgatgtgaaagccaataaatgggcggataaggtacgtgcttgtttcgagcgcgactccgtgctgacttatcattataatcatgtaatgagtgggggcaaatggaatcatatcatggatcagactcacatcggatatagatcctggaatgatccgaagcgcaatataatgcctaaagtgacctttgtacccgagccccgtatagctcctgtaccacctgtgtttgtagaaaaggatggatatatatctattgaagcagaacattatacccgttcagcaaatggtacatctgctgattggattacgatccctaatctgggacgtaccttgtcagccgtcactactttgccttccacagctactccgagcgaagatatgtatctggaatatgattttgaaacggagaagagtggtgaagcaacagttatcgtacgtttctcttcgacattgaatttcaatgattataaaggactgcgatatgcggtttcactggatgggggtgacgaacagatagtcaacatcaacggtgattataaaggtgaacttggcagattgcaggcggagcatatcatcactacccaaacgaaacatttgcttgataagaaagaaaagcataccttgcgcatccgtccgcttgatccggcacttgtcatgcagaagataatgattgacttcggaggtttgaaaccttctttcctgggagcgccggagagttctgtgagaagggaatgtttttaaggaactcccataactcctaaaaaaaagattatgaaatacagatttgctttattgatagtactggcctgcatctgttctgtgttggctgaggctaaagtgaaactcccatccgttctttcggatgggatggtattgcaacgtgaacgtcccataaaaatatggggaacggctgatccgggtgagaatgtggttgtcacgttcaagaagaagaaatacatggcagtagccgatgaaaatggcaaatggctggtaacacttcctgcaatgaaggccggtggcccttatgagctgacagtgaatgaaatgacagtgaaggatatcctgataggagatgtatggttgtgctcgggacaatcgaatatggaactgacggtggcgcgtgtagcggatatgttcggtagagagactgctacttacgagaattcaatggtccgctatgtcaagactccctatggtaatgatttgcatggtcccaaagaagacatatcccaaatgaactggacagcgttgaatccgcaggttgcccagtcttatgccgcattgccttacttttttgcaatagagatgtataatgagacgaaagttcctgtcggcattatcaattccagttggggaggaagttccattgaagcttggatgagtgaagatgcgcttcaggcatttccgaagaacctgcgcgagcgggatatctatagctccgacgaatacaaggccttgatgaataaagcgggaggaatgatgtcgagattctggagcctctctttatataaaggtgatgaaggccttcatgctccggttaaatggtatgaaccggaattgaatgatttcgaatgggaggaggtgaatatgttttcttatcagttgggcagcaaggatggttatccggtaagcggatcgcactggttccggcagaacattcgccttacagccgagcaggctgataaagatgccatattgcgtttaggctgtatggtaaatgcggactctgtatatgtgaatggtgtttttgtaggcactacttcttatcaatatccgccgcgcatttataaagttcctgcatcggtgttgaaagcgggagagaatctggttacggtacgtcttattaattccggtggtcgtccaagttttgtaaaaggtaaaccctattgcatggcgatagatggggatacggttcgcttgtccgagcagtggaagtataggctgggttgtgaaatgcctgccggaagaggaggtgtatcttttcagaacattccgactggtatgtataattccatgatttctcctttgcggaatcttacttttaagggagctttgtggtatcagggcgaatcgaatgcaggacgtccgggtgaatatgaagctttattgactgccatgctcaaagactggcgggtgaaatttgcagatgaagacttgccattctttataatgcagctacccaattttatgcagacgcatcagcagcctgtagaaagtggttgggcaggtatgcgtgaagcacagcggcaggtgacgttgaagttgcctaatacctctttggttgtggcaatagacttaggagagtggaatgatattcatccgctgaataagaaggaactggcaaggagagtggcgcttcaggtcaagaagaaagtatacgggcacaaagatatagttcatagtggtccgctgtgcactgccgccgccattgagggaggaaaggtcattctatcttttgaggcgggaacggatgatttaatgcctgtagctcaacttaaaggttttgcattggcgggaacggacggacgttataaatgggctgaggcgaccgtggaaggcaataaagtgatagtctggagtgaagggattgctcagcccaccaaggttcgctatgcttgggatgataatccgcaagaggctaatttgaagaataaggcgggacttccggcttcgccgtttcaaatggatgttccatgattccctaaacttgattgactgagaaacaccggaatttacgcgcccggtgcaatatgacaataagatagtgaaacagatgtatttcgttgcaatacatctgttttttttcattattaataacaaaggtcccaatcagaaagttacttccagaaggataaaatcttgttttatctgattcatatcatctattgttatgttacagatggtctattctgctccattacatgatctattctaatcaatcagatcatctattctccctaaacggatgatataatttgagaaatggctacaccttttgccccataaggctacaccatccttatcaaaaggtgacaccatcaccccaaaagggtgtagcccttctgaaaagcaggtaatattcttctatttcaaagaagatcggtagcggaatcaaataatcaaatttgaagaaaatacgattaaagcgcaattaataagaacgaaataagaaggaatctctttctaaaatgcgcttcctttcgccattacaaatcatactgcattcgcctaacaggtaatccttgctttttttgtatcacggcaactaatggtacgaaagaaagcaacctcagacatcacgatttacattttgtcatattgctcatttcgctcaagctgctcattttgctcaaattacgtaagtagcctgaaaggttttccttttaccctatcttcatctgtcagcatatttcttttgccatataacccctccattttcaagattctctttcctcgcatagtgagtctaatcaagtgcactttcttctactatttctttcgcttgtttatattcatttccgaatgatatgtccatcccctgtctgatcttgatagaaaataatcaaaaaggcttaaaaatgttaatggatgtattgctgcaataaatgaatgaaagtcattttttagctttaacaagtgggttacatattttttgtgatacgttaccacgctgttttttcttgcatttcttttgcaattttgggttcattattatactgtttttctctctctaaagtgatttcttaagctctctttttgtcttaaaaaagggttctttgttttgtttgtaattatttgatatatagtttgatatattgttttacgaaatgcagtcaaaaaagaatgtaacatcgaagagaaagatgtaatgccatcaaaaaaacgtgtagcatgatcgtgtctgatgttccatttctgatgcatacatttgctgctgagaaaaagcacgctataatgtttggagagatatgtatgaaaaacacttttcttgcctcctatggtatgaaaaactaatatatgtaataataacaatatgaatattaaccttcaaattattaatcttaaaagactaattaattatgaaatgcaagtatgatgacagttaaagctatttataatagctaatgtaatgaagagaatgtagttattaatatcttaaactaagggtaatgaaaaatgtaacaaaacaaattaaaaagatccattacttgattcttttgttgctattgagttgtttaccgactttagcacagaatggagtaacggtaaaaggaacggtcgtcgatggaaatggtgaaacagtaattggagcttccgttgttgtaaaaaataataattcaataggtacgatatcagatatagatggaaatttcacgttggttgttcctaatgacaaagtaactcttgtggtctcatttatcggaatgaaatcgcaggaagttaaaattgctggtcaaaagactttgaagatcactttagaagatgactcacaacaattggaagaagttgtagtagtaggatatggtcagcagaaaaaggccagtgtagtaggtgctatcacacaaacttctgctaaagtattggaacgtgctggtggtgtttctgacctagggtcggcactgactggtaacttgccaggtgttattactactgcctctacgggtatgccgggtgaggaagatccacaaattgtgattcgtggtgccagttcttggaacaacagttctccgttgattttagtcgatggtatcgagcgtcctatgtcaggtattgatgtgaattccgtagagtctatttctgtattgaaggatgcctccgccactgccgtttacggtgtaaagggtgctaatggtgttattttgattactaccaagcgtggtaaggagggaaaggctaccattaatgttagtggtagtatggcattgaagatgccgtctaaattgcccaataagttggattcatacgatgcatttcagttgcgtaacaatgcagtagagtatgaattgggattggcttctgattcttggatgtatatgatgccacaagcggaaattgataaatatcgccaccctgctaatcaagctgaggcggaacgctatccgaacattgactgggcagattggatgttcaaggatcatgccttctccgagaatgctaacgttagtgttagtggtggtacccgtttcgtgaagtattatgcctccatcgactatcaacatgagggtgacttgttcaaggagtatgataacggtcgtggttatcagaccacttacggttacaaccgtgtgaatatgcgtagtaatcttgattttcagttaaccaagaccaccttgctgaagactaatcttgccggttcgcacggtgtaaagcaaggaccacgtactgcgtatgaatataatatctggggtagtgcttatagtactcctcctaacgtgttctatccgaaatattcggatggcacttggggatatgacccgattaataatgccaataactctgtagctggtttggctttggccggacagaatactcgtactacgacccgtctgaccactgactttacattggagcagaaactggatttcgtgttgaaaggtttgagtgctcgtgcttctatttcttgggataacgtgttttttgagcagaaccgaggtgtaaactccactgatggtgctttatataagtatattaatcctaataccggtgctgtcagctataatcccagtcaaggtagccataacttcgatttccacgaacagattaactgggttccagaaggtggttctattgataacggtgctacggaacgtcacctctattactcagcacagatagattacaacaatacctttggtaaacatactgtgggtgctatggggttgttcagccgtcaggaacgtgctcgtggtagtattgttcctaactatcgtgaagactgggctttccgtgttacttataactatgccaacaagtatttcttggaatacaatggagcatataacggttccgataagttcagtgctgataatcgttttgtattcttcaattctggtgctcttggctggatgattagtgaagagaagttcatgaagaaaatcaagttccttgatatgttgaaacttagagcttcttatggcgaaattggtaacgacgtgattggtaacgaatgggatacttctcgtcgttggctgtatatggatcaatgggctacaggtggaaatatcaagactggtttgtataatgtaaccagcccttatactttctatagtcaatcaacagtaggtaatatggatatccactgggaggttgtccgtaagtttaattttggtatcgactactctttctttgatggcctattagctggtaatgttgaaatctttagagataagcgtacagacatattgattagtggttctgatcgtgcaatgccttcttattttggtggtacggtagcagctccatgggtaaacttgggtgaagtgaagaaccgtggctatgagttggaactccgtgtgaacaagaccttgaaaaacggcttgcacctgtggactaatttgaatatgactcatgccgtgaacgaagtcattgaggctgatgatccggaactgctgcctgcttatcaaaaggatgctggaaagcaaattggtcagactcatacgtatgtagatcatggctatacacaaacaatggacgatgtgtatggtagtaccgcttttgaatcgaatgataaccaaaagttgccgggtacttattacatcctcgactataatggtgatggtgtcatcaactcctacgaccagattccttacggatattccggtagtccgcagaatacatatagtgcttcgctcggttttgactataagggctggagtttcttcgttcagttctatggcgtcaacaacgtgacccgtcaggtggtcttttctacttttggccagaaacaactgattgcttacgacgaaggttcccgctggacaaagtataatataaatccggatgtaccaatgccacgttttggttcaaccactaacggttactatgatgcagctcgctacttttacgatggttcttacgtccgcttgaagaatattgagttggcttatacttttacggatggttggatcaaatcgttgggactttccaacttgaaactttatgtcaatggtaataatctttgggtatggactcgtatgcctgatgaccgtgaagctaacttcgccggtacaggttgggcttcgcagggtgcttatccgacagtgaaacgtattaacttcggtttaaaattcacattataaaaaatagtcacatgaaaagaacatatatacgtacattattctatggcggattgctttcgctatgttgtttggggatgacctcttgtgaggactacctggacaaggcacccgagagtagcgtaaatcccaatgatgctttcaagaacttccgtaatttccagggcttcactgaagaattgtattattgtattcctgactttgctcatggttattggaacaactctttcaactggggggaggatgagattttttcttttagcatcgactatcacatggggtataagatagatatgggtgacttttggggatggcagtctggttatgacggttggcagagtggttggatggaccgcagcaatacaaaggctaattcgactgaccgtttccaaaaatctctttggcctttggcttggtatggtattcgtaaggctaatttaggtttggagaatatggataagttagtggaagcaaccgatgaacaacgcaacctgattatgggacagctctacttcttccgcgcttggtttcactttgaactgatgcaatactttggtggtttgccttatattgactctgtaccttcctcttccgagcctttgcgcaatccgcgcttgagttatcaggagtgtgctgatcttgcagctgccgacttccgtcgcgctgccgacttattgcctgttgattgggataatactactaccggcaagcctacctttggtaacaaccagcagcgtatcaataaaattatggcgttggggtatctgggtaagaactatttgtgggcagggagtccgttaatgaactacgcaactaatggcagcaaaacttataatgccgactattgtaagaaggcggccgaagcgtttgctgaattgttgaagttggtagatgctggtcagacccaatatgatttggttgattttgctcactattcggatattttctattcattcaagcagaattctaagaatcccggttctaccgaagctatcttccagacgccgatgtatgactggtggatggggtcaggctggagtttaggacctcagtttgttccttctatattggctaatgaaaccaatggtgtggtattctgtccgacagctaactatgtaaattattatggtatggccaacggtcttcctctgaaggatccggattctggttttgatgaagaatatccgtggcgtgatcgtgatcctcgtttctatactgacattacttatgatggattgcaggtaattgaaaacactgctaagttcacttctgaacaaaaagaaaaagaaattcagtatgctaacctttatacaggcggtaattaccgtgatataaagaatgagagccgtacaggctatttgttgcacaagtatactccgcttgtagtgaacggctttgatgagggtcttcgtgactatggcgatgcattgactatccaagttagttggatgcgtctgtctgatatctacttgatgtatgctgagtctgttgccaatggttacggtagcccaacatcagttgtcaacggttactctttgacagccctcgatgctgtcaataagattcgtaatcgtgccggcgtagaaggcgtagctgataaatatgccggttcattggatggtttcatgagtgaattgagacgcgaacgcgctgtggagttggcttatgaaggacatcgtttcaatgacttacgccgttggttattgttaaccgaatctccttatactatcaagacctcgcaagaatttgatcgcgtagaattggataagaaagatccgactcagagccgtgtggctaatttcagagaagaagtcattgtgactcggaatttctccgagaagcattattggatgcctctgaaggtttccgatgtgaatatctatccggagttgtatcaaaacccgggttggtaatggtcttgagaaacttgaacgctaaaattaaaaaggaattaaaatgaaaagcatacgaataaagtccgttttatgtgtggcacttgcagcttcttccttgtgtgcaggcgctcagaatgtgttgtcggattttccggtagccgattctgattcgctgaatttggcatcggaggaaacggtacaggtggcctatagaaaggttaataagaacgacctgttgggaggagtctcctctgtcaatgtagaggaactcttgaagaaaaataactttacttacagcttagacaatatgcagagcatggtgaatggctggaatggtaacagtctttggggaatggattcctacctagtactggtggacggggtacctcgcgacgctaataacgtgatgccttctgaaatcaaggatatcacttttttgaaaggtgcctctgctgtggtgctttatggtagccgtgccgctaaaggtgtaatttatataactactaagcgtggtcaagtaggtgatactcgcgttgatgtacgcgctaatacggggtttcatgtgcccatcagttatcccaagtatttgggtgctgctgaatatatgacactttacaatgaggctcgtgttaacgatggcatggatccgctgtatagtgcgaccgatatctataatcatggttccggtataaatccctatcgttatcctgatgtaaatctttactcggatgagtatttgaaaaagtcatataacgagtcggatgtgacagctgaaatttctggtggctccgagaaggcacgtttctacactaacgttaacctttataatattggttcgttggtgaaagtaggtgaggccaaaaaagaccgtactactcgtttcagcgtacgcggtaatatcgatgtagatctgggaaaatatgtgaaaacttacgtcaatgctaatgccactttctatgatggtcgtggtgcacgggggagtttctggaatgcagccgctacgttacgtcccaatcgtatttctccgttaatccccattgattatgtgatgcagaacaataccgatgcatggaatctgattaataatagtagtcacttgattgatggtaaatatttgttgggaggtacacaagtagatcagaccaatgaaatagctaacctttatgcagctggtgtcaatacctacaccagccgtcagtatcagtttgacatgggcgtagatattgacctctctatggtactgaaaggactttcgtttcagacacgttatgccattgactatgctacgacctacaaccgttattacaacgatacgtatgctacatacgaaccgcagtgggcgaatgtcaatggtgtggaccaaattgtaggtctgaccaagtatggtgatgacgtacatgatggtattcagaatattaatgatagctggaatcgccagaccatggcattctcagcccagcttaactatcagacgaaggtggctgatgcacataatatttcagctatgctgattgctgctggttatcagcaaggtgaaagtgccgtttaccacaagaccagcaacgtcaacttaggcttgcaagtagattacgattacttaaacaagtattatttgagttttgggggggccttggttcactccgcgcgtctacccgaaggtaagcgcaatgccttttcgccttcgctcactttgggttggcgtttgagtaaggaaagttttcttgaagactcctcaattttggatgacctgatgttgactgcttccggatctattctgaataccgatttgggcattgatagttattatatgtatcagactacttacgaccaagcaaacggtgcttggtggggatgggctgacggtaaccagagtcatgccactgaggcaagacgcggtagtaatactgacctttcttttatccaacgcaaggaaatcagtgtaggtctgcgtggatcgttgtggaaaaagcttttgaggtttgatgcttcattctttaagaacagccttgaaggtatgctggtacagccatccaatagtttcccgaattatttcgtgtcttattggccagaaagtactttactaccttatgtgaactacaacaacagcactcgtaccggttttgaccttgcattgaacttcaacaagaaggtgcaggatgtggatataaacttaggtgtgaacgctatgtattatactaacgagaacactaaagtggacgaattgtatgaagatcaataccgttatcgtaaagggacacctactgatggtatctgggggctgcaaactgacggtttttacaccagcgaggaggaaatattgaactcgggtatcacttcttcttacaacggtgagttgaaaccgggtgatttgaaatatattgaccaaaatggtgataatattatcgatgagaaggatgaagtttacttgggtgaacgctatggttggcaaggctctccgttaactttaggtctgaatctgacgctgaagtggaagaatttcactctgtttgcgcagggtaccggttactttggtggttcagcctttgcaagtggcgactattattgggtatttggtgacaagaagtattcggaagtagtgcgcgggcgttggacacccgaaacatctgctactgctacttatccgcgtctgacgactcagactgacaaccacaactaccgcaactcggatttctggttgtatagcactaaccaatttaaactttctcgtttgcagttgacttacgacttacctcagcaatggttgcgtggttcatttgtacacagtttgtcagtatatgcctatgcaagtaatctgttgaccatttcgaaagagcgtgaaaaattggaactgaatacgggaacgactcctcagagccgttattacaacatcggtttcaagataggtttctaataagtgacacaataaaagtagattcttatgaaaaaaataatgacagtttttgtcgctgctcttttgctggtgggatgcgatgacttatttacaccagccatagaaaacaacaagcaagtatcagatggactcaatgacccgttgtatgcggagggaatcttagcgaatgcttatacccgaaatccatacaattcgcagtcgttcaacgatgtggctactgatgatgctgtaactaaccaaacgagtaacagttacttgaagatggcgactggttcgtggacatccaacagtaacccgatggatcaatggagctcttgcaaggctgctattcactacattaatcttttcttgagtcaagtagatcaagtgtcttgggtgaatacgccgattgtgaacacaatgttctgtgatcgtttgaaaggcgaagcttatggactgcgtgccatgtttaatttctatatgttacaggcgcatgccggatgggtagctgatggccgactgatgggtgtacctattgtagaggaagtggaaactgaggcttccgatttcaactatcctcgtaatacgttcgatgaatgtattcaagctatatataaagatgtgcaaagagcaaaagagttgttaccactcgattacgaaaatatttcttcggatgcacaagtgccggaaaaatatcgtaatgagggtgctaactatagtcaatataacgtagtgtttggttcaaactttcgttctcgtatgagtgcacgtattgcattggctttccgtgccaaagctgccttattggcagccagccctgcttttgctgaaggtagcaatggttcttgggcagatgctgctgactataacggtgagttattagatatgattggtggtgcttccggtttggctactcagggtaatacttggtataagaatgctgatgaaatcaacaatcttactggtggttccaatccgcctgagatgatttggagaaacggtaaagatgctacggcttatgcgttggaacaggctcagttcccgcccagtctttatggtagtgggcaaatcaatccgacgcagaacttggtagatgctttccctatggcaaacggttatcctattacggatgctccggaatatgacgaacagaatccgtatgctaaccgtgacccccgtttggcgttgtatatcgtagtcaatggtacagagatgggtactgataaaaagattattgatactagtgccgacaatacatctaacaatgacggtttgaaccgtgaaaatggttattctacgcgtactggttactatttgcgtaaacatttgcgtgaggatgtatatttgagctcaaccactacgaccggtcagcctcactacagcccgcgtattcgctacacagaaattttcctgaattatgcggaagcagccaacgaggcttggggacctacgggtatgggaacgcatggctattcggcttatgatgtcataaaggctatccgtaaacgtgctaatgtaggtaccgataatggtgatgcttatttggaaagcgtgaaggataatcaggccaaaatgcgcgaattgattcgtaatgaacgccgtttggaactttgcttcgaaggttttcgtttctgggacttacgccgttggaatatggatttgactgagcctgccaagggcatacgtatcaatggtgaaacgtatcaggtatttaatgtagaaaatcgtacctacagtgactttatgcggtttggtccgataccttatagtgaagttgtgaaattcgatgctttggaacaaaatcaaggctggtaattggatttgttgaataacttttaaagattgaagaaatgaaaaaattattttatctgttttcattgattatgttgcttgctttctcttcgtgtgaaaaccaagattggtctttccccgattatggaagaactaccgtatactttgcttatcaatatccggttcgtaccatcgtattgggtaatgatgaaatatttgataatacgctcgacaatcagcacaaatgtcttataaaggctgtgatggggggagtgtacgacaatggtaccacacctacagtggacattgacgtggtaaattcattatgtgacaacttgactttcgcaacaggtggtcaggtagtgccgatgccttctaattattacacgttggcttctgatcagattgtgattccgaaaggccagattagtgccggtgtcgaagtgcaactgacggatgctttcttcgcagatcccaaatctattgaaacaacgtatgttattcctttggtaatgtcgaatgtgcagaatgctgactctatcctatcaggaaacccgatggtcgagaatccggttcgttgcaacaagggagattggaatgtggttccgaaagattatatcttgtatgctgtgaaatacattaatccgtgggatgctgtttatctgcgccgtggtgtggaccaagtgacagagggtggaacaacttctaaagtgattcgtcacgaacaatatgtagagaacgatgaggtttgcgaactgaccactcgttcgttgaaggatgccaactttggtttgacgctcagcggtcaggattgcaatctgattcttgctttcaatgataacaatgaatgtacactttctacagacacaccgggctgcacggtttcgggtactggtaagtatgtagtaaagggtgagaaggactcgtttaatcataaggatcgtgatgtgctctacttggactatacggtagacttgggtacggtcacttatgctactaaggatactttggtgatgcgcgatcgtcaagtaaaagctgaatggtttgatgttgcgtataataaataattttaaaacaaagagaatatgaaacaatatatgaaactgctttcggttttggccttgggcttggcaatggggtcgtgtgtagacgatgccatactgccttactcggtggagaaaccggaaaacgtagctcaatatgagtatctgaaagattataatgtattgaaatcttatattgatcgtagccagtatcccaacttcaagttgggattggcagcggcggtcagtgattttgtcaagcacggtgtagtgtacgaaactgtaacaactaacttcgatgaaatgacagctggcaatgccatgaaatatgcttcgatagtaggtgatgatggtactatgaatttctctacggtatctagttttgtggatgaagctaaagctgccggtattactatttatggacatacattagcttggcatgcacaacaaaatctgacgtatctgaatggattgattgctgacaaggaaatcgaagttaatccgagtgataaggaagaaaagcaggatgcgtatgtagactattctacgtttacaagctatcctttctatgttatgggatacgagcctgtctttgagaatggttgcttagttagccgttatcccggagaatggtatcagtatttcgtagcagatcagattcctactacgattggccagacttataagctaacagcttatattaaaggttccgctcctggtactctcaatgctcagtttggtaattggggtgcattagtggatcggcctttatcgttcaacgaagattggcaagaggttagtgtggaatttgacaattgtcaagttgaatctagttttatagtattccaaccaggaacgtttgaaggagatattaatattaagtggttgaaagtaactcattcagaaactcctaccgttgagatttatacagatgttcttgaaaatggagagatggtggtaggtaaaccaatgaataactttattgtccgtgaacatggaaaagctgatgttcctggtactattcttgaaggtcaaggtcctgatggtaagaactgtataagcattacttctatttctgcagcggaaaatactcatgatactcagttctttattacttccgataaggtttgggaagctggagagcaatataggatatcattttggtataaagccacagctgaggcaccctgtgaaacacaatgtcatacaactccaggctcatattttcattgggctatgttacccgcaaatcctacgtttacaactgaatggaagcattatgaaacaataagtacaattccagcagaagcagcaggcaagggcatgcaaaccatagcttttaatcttaatgcggacaaagaaaatggacatacatattattttgctgacatccattgggagacagtagagaaaggtaataccattcctcttactcctgaagagaagaaggacactttgacatgggctatgaataattgggttgaaggtatgatgaaagctactggcggttatgtaactgcttgggatgtagtgaatgaagctatttccggtggtggtgataacggtgaaggcttctatcctttgcagtcagcttccaatgttagtgcagatgatgccaataataatttctattggcaagactatttgggtaatgaagattatgttcgtatagtggtagctgctgctcgcaagtactatgctgataatggcggtactgagccgttgaagctctttatcaatgattataatttggaatcatggtgggatggcaataagaaagcacagagtttggtacactggattgagaaatgggaggctgatggcgtaactaagattgatggtattggtacacagatgcatgtaagttatatcctgaatgaaagtgaccaaaaagctcaggaagacgctattgttaagatgttccaaatattggcggagagcggtaagttgattaagatttctgagttggatatgggtgttgtagaaaaagctttcggtacaggtttgaagacggaagatattacttatgagcaacatctcaaaatggcggaattctatcgcttcataatatcgaagtatttcgaaataattcctgctgcccagcagtatggtatcactcagtggtgtgcaactgatgctccaagtgattcaggttggcgcggtggtgaacccgtaggtttatgggattctaattacaatcgtaagcatacttatgcaggttttgctgatggtttggctggaaaataatagaggtttataagaaaaggcagcggggcgtaatgttaaccgctgcctttattgttttaataaaaatcgaataacaatgaaaaacacattatttattttgagtttaattatttggtgcagctgtagtagtgaaattccatttgatgcagatagagcagaagatatagttgctacaaggactgcaaatttagatgaatattcgtttgaaatttatggcggagcattgtcgtcttactaccaatatgattgtaagggtaatttggaaaaagttatgtctgccatagtttcatttcataggggtaataatcatataatgatttctgtgagagaactttacctaaactatcctatatttactgctaccacaacttattccgtaaaaagagatatcagttgcgacattccacataaaatatataatgatgggggagaaatgaatctaaccgcatctataacaattcgcaaaggagaaacaaaaaggacttatgaaacggattacaatggttctccgttagtttagttttgttcgttattggtaatattataataaacaggactgtttggactttcaattaaagatgtaacatcagtgaataattgtgtaacataaagatacagattatttcattgctatctgttacatttgaaacggaaaaaagaagtagacaagaggacaagttgacaagaggaataagaggcagcgcaatgcttctatgccgcatggagccttttcaacttgttcccttgtttactactgatttaaattcctaaaataatgaagaatgatatgaaaaaaataatttatttgttgacattgacattaggaatgtctttggcggcttgttcggacgacactattcctgtgcagccggagaagccagaaccggagaaacctgttgaaccggatccggaacctgagactcctgctggagccaagttgccggtattgcgtgtagaagggcgttatcttaaaaatgaaaagggagaaattatcaatctgcatggttttacgcagacttacagccctttcttcaataataatgcgtggggtaactatgatgtgcaggcatgcctcaggtataataagagcatggtagacggcattgtggccgcaggatggaaattcaatttcgtgcggatgcacctcgacccatattggagtgatgacccctccatgcagtccgtgagatatgaaggacatgaacggttctctgaaacccgctttcggaagtatcttgaagagttgtttgtgccgatggcagaatactttatttctaagggaatgtatgtggtgatgcgtccgcctggggtttgtccgtctgatgctccctatcaaggtatagaaataggagacacttatcagcaatttttgctcaaagtgtgggatattgtctcgcaacatcctaaactgaaaaataatatggatgttatgtttgagcttgctaatgaacctgtcagaataaaaggtactgacggaacatacggcagtagcggtgacggtcatttcaagaatctccaactttactttcaggctatagtagacaaggtacgtactaattgtcgcaacattgtttgggtgccgggattgtcttatcagtcatcatatgccggatatgctattcaccgtatcgaaggagagaacataggctttgccgttcactgctatcccggttggtatggtagcgatgctgaggaagacagcggcgaaggaatcggctcttccacaggaggtggttatgaagcttttcagcggggttgggatgcgcaagtaggtcctgtagcagctttcgctcctatcatggtgactgagatagactgggctccgaagaaatatgatgccacttggggtaaaagtattacaggaacggcaggtgctgaaggctttggcgccaatttcaaatatatagctgataattcaggtaatgtttcttggttgtttttcaccactagatcccatgaactggcggcatttaaggatgtgccgggtgaaccgggcaactatacttttctcaatgaccccgaagcctgtccttgggcgatgtaccattggttcaaagaatatgctgatgggatagtagtgaatggggagttggagaaacttgagttgatgggacaggaaggaaatcttcgtctgcaaatggggggtacgaattatctcaaagtgaaagctgtttattctgatggaacggtacggatggtgactgcggaagcgactgtcaacagttcagatacgaacgtgctgaaagtagaacaggcagccaaattagtagctgtggcaccaggtgaagctacggtaaccgttacatatcaatcggctgtcggagtcagtaagcaactgacattgcaggttacggtaatttctcctttctcattgacggcagatgtcttcaatccttctatatgggagaaaggaacatttgacgagagcacccgcacgctggtgacgggacagtatggtttcggagggtggcaatatgacagtggacttgatttgtcgggatataagactgtgaccgtagaattgggtaatgataatgaaagtggtgtttcgttccgtctgtttgataaaaacaattattggagtgagcctgctacgtatgatttcggatcttcgcgtaagattgtagtggagttgaacaatatgaaagataagaacggaggaaagattgatccttcgcatctttacattgcaggtttttggtcaacaggtggaaaacctattgtgatagctaatgtctccttagcaaattaaaaagacatatcaactctcatctttccgagagtttgatataatttgtgcattttataatatctttcctgcatcctctgtgaagagtatgcaggaacacaaatctgtaatatttatctaatattgatatttaaatgtctaagattgtaaagcggcgatcagattcatgccttatttttgcagatatgaatagtttgaaaaactttaaataaaagatatgatgaagaagataattgtatggttggctgtaatgatgtatacattgtccggttatgcacaaaatgcaccttggaatttccagagtaaagtagtcacggatactcttttcagtaaagtgttaaattcaaagcgtgcttataccgtttttctgccaaagagttttgaacagaataaagagaaaaaatatccggtcctatatcttttgcatggtatgtgggagaccaatcctgtctgggccgagcgtggacatgtaaaagatgtgatggatcgccttgtagccagtggagaagcatgtgagatgattattgttactccgaatgccggtggcaatatacatatggaatggaacggatattttgatatgcctggttggaaatatgagacattcttttatacggaattcttgccctatatagagaaaaaatacagggtgataggcgataggctgcatcgtgccattgccggcttgtcgatgggaggtggcggagctactaattatggccagcgccatagtgatatgttttgtgcagtctatgcgatgagtgctctgatgtctattcctgagcaaggagcagtgtctgctgatgatccgaattctaaaatagcgatactgactcgtagtgttattgaaaatagctgtgtgaaatatgtgaccgaggccgatgagaaccgtaaggctgatttacgtaatgttgcctggtttgtggattgtggggatgatgatttcctgcttgatcgtaatatagagttctatcaagcaatgcgtaatgccggtataccttgccagttcagggtgcgcgatggaggacatgattgggaatattggcactcggctctttatcagtgtttacctttcgtaacccggatatttggtaaggaatgaatatacatataaacaaacaataatagacagattatgagaacatttgtatttacatgcttgcttcttttaggcatgacgatatttgcacaggacgcgaatttccatatctatctgtgtttgggacaatcgaacatggaaggaaatgcaaaggtagaagaacaggatacagtggcagttgacagtcgctttcaggtattagcggctgtcgattgttctaatttggggaggaccaaagggaattggtataaggcggttcctcctttggctcgttgctatacgggcttgaccccgggagattatttcggccgggctatggtggctaatcttccatctaatgtgcgggtaggaattatcaatgttgccgtaggcggttgtaggatagaactgtttgacaaggataactatcaatcctatgtagaaacttctccggactggctgaagaatatggtaaaggaatatggcggcaatccttatgcgcgtttggttgagatggcaaagcttgctcaaaaagacggagtgattaaaggtattctgttacatcagggagagtcgaatacaaatgataaagactggcccttaaaagtaaagggagtgtatgataatcttttgaacgatttaggattatctgccgctaatgtgcctttgctggcaggtgaggtggtacatgcagatcagaatggcgtttgtgccagcatgaatacaatcatcgacagcttgccacaggtgattcctactgcacacgtgatatcttctgccggttgtccggctgcattcgataatcttcattttacagctgaaggatatcggatgttaggagctcgctatgctgctaaaatgctttctattttaggatatggagattggacgtctgctcagaatatgaagttatggtataatcgtccggcacaagattggttggaagctttgccattaggtaattcccgtttgggggctatggtatttggcggaacggcccgtgaagaattgcaactcaatgaagagacgttctgggctggtggaccgtacaataataataatcctaaagggttgcaggtattgcctgaaatacgtcgcctcatttttgaaggcaaaactttggaggcgcagaaactcattgatgagaattatatgacgcctcagcatggtatgcgttatttgacgctggggagtcttttcctgaatttccccgggcatgaaaatccttctgaatattatcgggatctgaatctggagaatgctactgctacaacacgttatgaagtggatggagtgaagtttgtccgtacggcatttgcctctttgagtgatgatgtgattattgtacgtattcagtcggataaggcaaaggccttgaattttgccgtatcatacagcagtccgctgaaatcagatgtacaagtaaaggggggcaagctgattatctcttgtcagggagctgaacatgaaggaattcctgctgctatgcgtgccgaatgtcaagtacaggtgaaaacagatggtaaagtgagtaaggaagaaaacgcgcttgccgtgaatggagctactgaagctaccttgtacatttcagcagctactaattttgtgaattatcatgatgtcagtgcgaacgagtcaaaacgtgcagctacttatttgcagaaagccacccgcattccttacgaacaggctttgaagagtcatatcgcctcttatcgcaagcaatatgaccgtgtggccctgactttggaaagtaccggagtttccgctttggagacacctgtccgtgtgcaacgttttatggaagggaatgatatggcgatggcagctttgatgttccaatatggtcgttatctgctgatttcttcttcgcaacccggtggtcagcctgccaatcttcaaggtatctggaatcatagtccgtatgctccctgggatagtaaatacacgattaacattaatgcggagatgaattattggcctgctgaagtaaccaatctgagtgagacgcatgaacctctctttgatatggtgactgacttggcagttacaggcagtgagactgctaaagttctttatgatgctaaaggttgggtggcacatcataatacggatatatggcgtgcctgcggaccggtggatgctgcatacttcggcatgtggcctaatggaggtgcttggctggcacagcatctgtggcagcattacctgtttaccggtgataaagagtttctaaagaagtattatccgctgttgaagggaactgctgatttttatttaagtcatttagtggaacatccgaagtataaatggatggttacagtaccttccatgtctcctgaacatggttatcggggttcgcaaacaacgattacggcaggttgtacaatggataatcagattgcttttgatgctttgtacaatacacttcaggccagtcgtattctgggtggagataaacagtatgaggattctttgcaggtaatgctgagtaagttgccaccaatgcagattgggaaacataaccaattgcaggaatggttaattgatgctgataatccgctggatgaccatcgacatatttcgcacttgtatggcttatatcccagtaatcagatttctccgactacaaatccggagttatttcaagctgcccggaatactttgatacagcgtggagatatggctaccggttggagcattgggtggaagattaatttctgggcgcgtatgttggatggcaatcatgcttataagattatacagaatatgcttcatcttttgcctaatgataaagttcagaaagaatatcctgagggacgtacttatcctaatttatttgatgcccatccacctttccagattgatggaaactttggttatacggcaggagttgcagagatgttgttgcaaagccatgatggtgcagtacacttattgcctgcactgcctgaagcatggaaaaaaggaagtgtgaaaggccttgttgcccgtggtggttttgtggtggatatggaatgggatggcgttcaactgaaaaaggcgaagatacattctcgtttgggcggggtactgcgtatccgttcttatgttcctttaaaggggaaaggagtgaaagtggcagacggtgcttgcccgaatcctctttatgcatcggcagttataaaagaaccggtagtttcaaagctgataaatcctcaggtaccggtcctttatcgtacttacgaatatgacattgttactcagccgggagaagactattcgctggagcgtagtatgtaatgatattagcagtctattaattgtgataaaaccttggagtgatgaaacttacaactttatttgcggttagtgtcagcctgatactttccggcttttgttcacttggagttcaggctcatcctgttcaggaaaacagcagtggggacccggttcctgcaggagcttactatactgataactatcggaatttgtttaatgagtatttaggtatttctcaacaacaaaccgaccggaaaatagagcaaatctggaatcatttctttgtgaatgaaaaaacaaaggtttactatgagagtgatgacaatactgcttatatttatgatacagggaatcaggatgtacgtacagaaggaatgtcctatggaatgatgatatgtgtacagttggataagcaggcggaattcgataagttatggcggtgggccaagaaatacatgctatatacttcgggcaaatggtcgggatattatgcctggcactgtacacctcatggcgttaaaataggtaaggagccgagttgcgcttctgatggtgaaatctattttataacttctttattcttcgcttctcaccgttgggggaatgacggggcatatgactataatcaggaagctcagaaaatcttgaaagatgttatgtctaaagatggttcccaaggcgtttataacctgttcaatactgagagtaaactcgttacatttgtaccggaaaaggtctattataactatacggacccttcttataatctgcctgctttctttgaactttgggctttgtggtctgacactaataaggaattctggaagcagacgcctgatgcagcccgtcgcttgttggctgatgcatcgcataaaaagacgggattgtttcctgattattctgcattcgatggcactccttggaaacctaagaattgggggtatgatacaagaagataccagtttgatgctctccgttgtgccatgaatgttggtatggattattattggtttgggaaagatgctgctaaccagacagagatgatgagtcgattgcttaactttttcaagcaagataattttacgcacgaatattttaatgtggatggttcagcacctgccggtaattattcaacaggtatgatcggtgcaaatgctgtaggagcctttgctctgaatgacaaggatctggcgaaagaatgtatacagaaattgtgggatgaaccattgcctacggggaaattccgttactatagcggtatggtatatatgatgtctatgctgcatgtcagtggaaacttccggattatcaagtagcttggtgaatggaaagtgtaaaagtagtataagcgtaatatattgatataataaagaaagccagctaattgtcatgaattagttggctttctttttgttttgtttagttctgttgctcaatcttgtcaccgtcagaaaaagaagacttttgctgttcttccatataggaggtggggggtactccgtataattctttaaaagcggtagaaaaatatgcaatattagtaaaacctgtaaggctagcgacttcagtaatgttatgatattggtttgctagtaatgatgccgcttgtttcagacgaacattgcgtattaagtcgcgggttgactggttagtcagctctttcagcttacggtgcaaatgtacacgactgatacctacttcagttgctatcatttcaacattcaagtcaggattaccgagattgtcattaataactttcatcactttattaagcagcctgtcgtcaggtgattggacttttagtttcttcaacttctgttcttgcatctgactaccgctgaaactattgcgcaatacttctctgctcttgatgaggttgatagctgtttttctcaatatttcgatactgaatggtttcactatatatgcatctgctcccatgtttaaaccttccaggttatcttcttctcttgatttggccgtcaagagtataattggtatatggttgatggttacgttctgctttatttttttgcaaagtgtcaatccatccatttcaggcatcatgatatcactgataatcagatcaggttctttttttagaatcattgcaagtgcttcttttccattagtacactcgctcatgtgaaaatcacttgctaattcgcgacagatgtattttcgtatttcttcatcatcttctactaccagaacacgattctttgttctggaacgtattttttcgtcttcttcatcaactggagaagtgggtagggcagttgtgatatgtatgggagaattattgtcagtcgggttattatctatttcttcagcgttcagatgttccttgcctaaaggcaatcgtataataaagcgggagcctggtttcccctcattgttttctgcttctattgtaccgtgatgtaattctattaatgaacgacttagatgcaatccgataccagtacctacattagagttattgtggctgttacggatttgatagaaacgctcaaaaattcttcctatctctgcggggtcaattccgatgccgctatcttctattattatttcaaaataatgctgtaaagggcagggagcattcatatctttaccggtacggagataaatattgatttttccgttttccggtgtaaatttgaatgcattggaaataatgttcaggataactttatcaaaattcttaggatctatccatgcctgtaagatttccatctctgtttgaaagcaaagagtgatatgtttggcatttgcctgatattcgaaggtgtagtataaatcccggatgaaacccacaatgtcaatctcttgaaatttcagtgacatttgccctttatcgatttttcgaatatccatcagctggttaactagacgaagaatacgttcggcattcctataaatagtatgatagtttttttgccgttctccatctttatcagtagagataagcttttgcagtgggcttatgatgagagacatcggggtacgtatctcgtgggatatattgatgaagaattgtaatttggcttcattgatttgctctgcgtgaatatgctctaatatctcttggcgggcacggtaacgatggcgtacttggatgacgatgatatagatgatagctatcagtaatatcccatacattagtttggcccatccggatgcataccatgccgggtcaatggtgatacgtatttctttaatatcagaataagagtcattatcttttgcttttatctggaatgtataatcacccggacttaagttgctgaatgatactcggttgataccttgttgcaaactaatccaactcgtatggttaatgcgatatatataggtaattcgttccgggctgaaaaactccatggctgaaaattctatgctgaaagaattatctttgtgggaaagctggaaatgatcagcatccattactgcagtagtaacaatgtctttacctcctgattccatccctttctttaccattttatcatggatataaaagtctgtgatccgaatctcaggttttttacttgagttggttatttctgctggattaaaataggtgataccgtttgttcctccaaaaataagttcgctttgatggtatgcaaagctagctcctttgctgaattcattgccttgcagtccgtcacttgcatagaaattaatgaaactttggtttttggggttgaaccgactgattccataattcgtactgatccagagatatccattcacatcttccttgattgcacatatataattgctcggcaaaccatcttctattgtatattcgcgaatatcaagactttggggattgaggtgttttaatcctttagatgttcctatccagatgcttccatcactaccctcgtgaagggcatagattacgtctccatataatattctcctgtttctcaaaggagaaatgaagtccatgttttttatgtccagacaccctaaaccgtcataagttcctatgtacagcttgccttcacttgtgtataagagactatttatccacgaattgtgtagcatattaattttagtccagtcggtgttgctattggtaagtatcgggcattggacaattttcctggtatttatatccatgtaaaataagccacctcccatagttcctatccacaatgttttattatcatcttctgcaaagcaatatatgttttctgtcaggttagacggctgtgccgataacttcagatattcgcaacgaccggtttggggatccaatcgagccatgccgtgaaggtaagagcctatccacagattgtagttagaatcttcgaagatactcatgatggttgcggggacagaatgtgggtcatctgtagggacaaagtgcgctttcagtgtattgtccggggcaattgcatagatcccgtcgttgtcagtacctacccagagagttccggtgtgatctttatatactgacatgacacagttggaaccaattacattatgtgcggaagatttataacccatatacttgaatttatttgtcgtagcaggtataatcattactcctttttggaaaaaacctaaccatatatttcctattttgtctttcagaatggaatgtactttagccttttttagattaaatgtagtaacattaaaattggcttccttaatcttttgtttttgagtatcatatattttcattccagaaccatcggtaccgataaatatttcattctgatccccaggatatagaattttaataggtaaatcaggattaggagtatatgtgagaggagtaaatgtatctgctttttcattatatatgaatagtcctctctttagactacttatataaagattgccctgttcgtcttcgcacatacttgaaactgtatttttagctatgtctttgtcacctgtatagtgtttggattggttgtttttatcaaaacggaagataccattatcacctgttgctatccataaatttccttttttatcttcgtatgtatatatgattagattgctggggataaattggcttatttgcttggcatttatgctgtctccctttgtttccagtataaacatgctatgtcctgaagtacctattagtatttctccattattgcgttcaagtattgtcgctatattgggggctattggatctccactggaaagatacatcggaatggtggtaaaactatctgttgcccgatcatatatttgtagtccgttcaaggatcctatgaagaagcgtccttttttatcttcgtacaatgtacgtacatagtcatttagtagagagtgaggattatctttctcatttctataaacagtgaattttgcaccgtcatatcgattcaagccatcttctgttgcaatccatattatgccgtcgcgatcttgatatagtttattaagcatactgcttgataggtccttatcaaccgtgaacattttcccttcttgtccatgaaatgtggcagataagcataaaaataataggcataaaataaatttgatcttcatagttattaattttacgcttgcaaatatacttaatatccgctatatttccttttaaaatatgaacttatatgtcgaatttcttattcagagtttgcggggcttttatgtttttactaattttgaattacggtgtaaatgatagataccacgtcaattgaaaagtaacgaatgggaagatgaagaagagagaaactaatgagcagatggagagacaacaaccgtgttattatccaagggaaggtgcgagtactattgttgtttttatacatggcatagtggaaggaccggatcagtttctgggtttaatgaaacgaagttccgaactgggttttgctgcttcttctttgttattaccgggacatggcggaacaggggaggggtttgcacgcagtagcagacagcagtggctggaatatgtcaatgcggaaatagctcgttataagaaaaactataattcgattattttggttgggcattctatgggaagtcttttatcgtttcttacttatatggaaagtccggagcaaataataggcatagtagctatagatacccctttatatgtgagggttaagggtagagctctcagaaataatctgaaagtaggcttctgcaaagaaattccggaaagtgatcctgctcatactctattggaggcgagtagtgtagctccttgttccatactcacttatttgagttgggtaccgagaatgattgacttgttttgtttgatgaagaaaacaagagaggtactaccacaggtctctattcctacattggtctttcatgcagatgatgatgaattggtaagtgcttccagtgtgaagtgcttcgagagaacaattccggagaagtacttacaacttgttcacttaaaagagtcaactcattttttttatggaaatgcggactgggatttgctttattatacttttagccactttttacaatcctgttagaagttttgcaaaaacttcgacaggctctcttcccgtgacaaacctaatttctttctaagcctgtatcgtgctgattccataccccgttccgatagattgaatagtggtgcaacttctttggtgattaaatccatacggatatatgcggctaattttaattcgctggatgtaagatcgggataacgttctttcaggcggctgagaaagttattgtgtacgatgttgaagttattttccaacttctgccagttatcttcgtcttcgatattggcatgtactttctccagaagtctgttcaatttacgcaaggcgtctttggtctgttctttacgcagataggcagaaattttctggagttcgtcttgcatgaaagtgaaaatttcctgcttctgaattacatagaacatggaatttgagagttcctggctctttaataataactcttgttgaagcttgttattttccagttcaactatcctcttttcctgtgcaagagcttcctcttttagtttgaattcccgtttaaggctttcttcctttagttcatccagacgtttttggtgttgcttgttgaatctctggttcaatagtttatagattccatatccgagtgcaacaaggagaagtacgtacaagatgtaagcataaatacttctataccagggtggaagaattctgagatgaatttcttctactttcgtctggtgggtatgatgattgtaggcacatataaggaaggtataatttccttctttcagtccagtatattcttttatgcctgaagcgttcaatgccagcatttgttcatccagcccttttagctggacggaataagtgattttatcataagaattagtattcggattcatttcaaaccgatatgaagcatccggccgatattttcttaggatagtctgatgttgtctgtcagttggaaagccattgtagaaataagaatctatttcttcattgctggaagagattattacttttttaatcaggaacttgtaactgttggagagggatgacaatgaatctgtagtgatacgataaagactgaaaccatccagagtgctgataatacaagtagccgagtccactctgttgatactttcgaaggtacccatcagattgttttgtaaacgggtggtactgatagaatctgttatataaccatgcggagtaatgtaattgattttcagtttaccggactgcatataccatacacaactgttttcttcattgctgactacacgaagataatctctgttacctatacgctgattccattcttcggataattcgaattcctgcttgatggagttataacgatagataccggaatctgttgtgaagtaaacacggcctttgtctttaaacagattggtctggtaagagttattctgattcggataatgctggcaggatactactttactatattccgaattcaacttgatggcactcagacctgttccatgaaatatccaccaaatatcatcagattcatcatattctacatagcgtaccgagagattaaaaccttttattttccgtgtggatatccagcgaggtgcagactccgtgcctttgttttctaataaaaccaatccggtgtagctgcctgccagcactttggatttattttctccgaccggtgtaaagttccaaaagccattttcacctatcagggggatggccgttccttcctcaatcataaaggctccattattgtgaccgcagaacagagtttttccaatggcggtcagattccagacttgtccatcggcattctttacgggacggagagccaggtggcggatgtctttgataggccaggggctataatataatccctgattcgttccgaaatagatgtatccattatgaataattgacgcatagcctactccgtaattctggtttccggtatagaggtttgataatgggctgttggtttccagataactgatgccattgtcaagtcccaaccatatattatctccttcggtcacgttcaggctcagtacggaattattttgcaggcccgaccgaatatcatattgctcaatctctcccgtaggaatttctgcaataatcagtccgctcttaatcgtcccgatataaatcttgtcatcctttatttctgcgcaatatagctgactggatttgagtaatggatcattttgagtgatgagcggaacagttgttgaattgtcatagatataaatgccatgatattcagttatcagtaatagcttttgatcctgataggggagtatttcactgatatggtagttactgatcttttccgtacttgccaacggtataaataactgtccggtttgcagaaatacccccgcgttttccttgaacacatataaatttccatttatattggcggagcagagcatacgttccttactttggataacagtaatttcatcattcgtaagtttgaatatatggttgtaggatacaaagtagatgctatgatctatgcaatagatatcccatacatcactgaaattgcgatacttatcttccagactgtcggataaggaatgatagtgcatagctcccttttcgtctggcgagaaataaccgaaattattgaatgctcctacgtagatacgttccttgccgtcatggtaagccgtccggataatcatgccattgctgaacagatgccatgagtaaccatcgaactgtagtaaccctgagttgttggctgcataaatccagccgttgttgtcacgggtgattgtccaattctgcgtgcccccaccatacttcatacgactgatgttattgatataaggtaaccagttctttatggagtatatatgaacggagaagatgagtaataacaatgtcagtgtgtatttcatttcagcctcttttgctccaaaaatataaatttattcaatatgagctatcggttcatggatatatctttccattttcattttctctttccacttcaccgtgatgtccggattgatctgtaaccgtgcatctatcttgctgaaaatcaccgtatctccttgccacatcgcttctgaaggccaatctgcattgatgtatgaaaatgctttcacgacatccggattactctccactgtattgaacagctccttgtaccaggtactccaggcgcgattggcctgttccggattggaaaggcgtaactcggaagctacaactcccttttcctgaaacataggagtagattccgcaataaagagtggcttgccatgtttgcgagccaggtctatcatagcctggcaacgcccctgggcaaactggctgtatgcaaaccaatctacatattcatcaccggggtaatattgataaagttcgtccatactgctgttgcctccggtggattgccaaacataagctacattggatatgttcagtgaatcgaatagggtatggatacggcgaaaagctgtaatgtaagcttccggttgatagtgattccaggcatgcccgtcgaattcatagccgatgcgcagaaatactcttcggggggcaatgttttgtatccattctcccaagcgaatgatataactgtcatgttccccgctggctactttttcttcatggtttactaattcaagaccgatggctacgtcacagcctttaagcaggggagatgcaagttgtgcgtccgcaaagcaattgcctgccccccaattggcattcgatgtaagcccgtcaagtccctggtaagtatatccgtaagatacatctcccggacggatgttggtatagatggttatacctgccggagttccgaagaagttaacatatccttctttcccttctataccgcctattgcttccatatcctgaccgatgaaaaccaggcacttgccgtcttccggctcgaacttggcatagtttacggaagacttcttgtttgtacaagctatagcacaaagaactatagcgagataaaatagctttttcatatagcaaattaatagagtttacaataaaggtttgtattcaaagctgtcaaaataggcccatttgccccgtcctgatacatcctggcagcacataccgatgaaagctccggtaaaggcggctttgtattcaaacttgttgcaaacgtaatcatcagatatgatggaagcatccaatgtaccccctatttcctgccatgtattcccgtcgatggaataactgaagttcaacttttctctctgaacggttgcccgtagccatacttctcccttttccagccggatatattccggtaacggctcactccagcgattatcatcattgacgaatatattcagcacatagctgttgagagattcttcccacgacatgaagagatagtaaaagtgccttgtattgtagtaataggtcagtcctgccatttgctggaaagtatctggttgaaattccagtcgggtggtagctgtaaagttgaagtcttgttgtcgcctggctatcatgctttggtgatgggtggaacaaagtgattccctacctttaatactcaggaatccactccgtttcctgagtgatacccaggtttcatccatcggtacacggagtgactggaagtcgataggcatagtctcgtcttcaaaatcacatcgttccggtaaagcctcccaacggcagactggcaagtcgggagcttcaatttgtacctgcggttcattacctccgcttttcagatacagccagccatcttcgtgccacactacttcttgcaggcatgtttcgcgccccagggtacatctgccacgggtcgttaatggtcgccctgcaaggtgggtcaagtaccatctgccatcgggagtagatactaccgagccgtgacctgccttttggagatacaaatccggattgtgagcagaagtcagtaccggattcgtaggatgtacttcgtagggaccggtaatctgccgggatcgtgccagagttacggcatgattatattccgttccaccttcggctgttatcagataataccaaccgttgcgtttgaagagtacgggaccttccgtaactcccaatccagtgccggggaagatgtaataaacctctccgataagccggcgctcccggtaagaatattcctgcaagacaattccaccgaagaattttcctttccggtgatctacaagcagattgggaacccaggcgcgtccgtcctcgtcatggaacaacgaaggatcaaacccgctactgttcagatagatgggatcggaccattcactgtctatctcggttgccgttacaagatagttgtgcgtatctttccatctgccgtcgaagtgcttgacatctgtgtagaccagataaaacattccgtccttgtaggtcagattaggtgcccagactccgcaggagtcgggatttcctttcatattgagttgagacacgcgggtgagtggccgggttagtaaatgccagtgaaccaagtcacgggagtgatgtatctgtacacccggaaaccagtcaaaagtggaggtggctatgtagaaatcatctcctacgcggcagatagacggatccggattaaatccggtcagaatagggtttgtaatcatattcatagtgctaagttgtttttatgagttctttttccagttcttccatgttgcgtccctttgtttcggggtagagcagactgacggagatcaggcagaataccatgatgatagcataaatcataaaggtattgcctgcacccagatgttctatctcgaccgggaacaaagtggtgacggcgaaactgataattccattgaagacacctgcaagcgatatacccaatccttttacatgatacgggaatatctcagacagcaatatccatgtaatcggacctagtgaaatagagaagccgactatcatgcagagcagtccgatcaggataatgacgggggaccccgacatataaaacgtagcagatacagtcagcagtgaggctatcatgatacacgaaccgataatcagcagaggttttcgtccgagccggtcaatcaatgtcatggatgcaagggtcataaccaccatacatatcccgataaggttggattgcaggaaagagctgtcgggggtgaaacccgccatgtcgaacaccttgggtgcatagaataataccgcattgattccgcatgccatctggaagaaggcgacactgaaagcaataaacagtatcagccgcatcgggcgtttaaacaatctgcgtccctgttcctgataggagagggcagtcttttccttgtctttccgttggctccggttttcggtccataccggactttccggtacgaatgttaatccgattaggtagataatcgggaacaaagtacccaatccgagcatccagcgccatttcagttccggactgtcgaaccagccattcaccaacgtattggaagcgtaagccaccagataacctactccgatgttcagttggttgaacgatacgagaaaaccccgcttatcggaaggtgcaagttccgcaatgtacatggggactaccagcagtgagattcctatacccagtccaccgatgaagcggcttatcagaaaaaacagatacgtctgactgagtgcactgcccaatgtgcagaagcaaaagagcagtgctgccagaatgagtgatttctttcgtccgattctttcgctgacatttccggcaaagaagttaccgatgaaggttgccagcatggtgatgcttacagccagcccttcctgaaaggagccggattgcagaccgaaaaagtcgccgaagtacatgcttgctcccgatacattggccgatatgcccagcagcagaccacctatcgagactatgaagcaggtgatgtacagatatgcattgtttcttttatccattgattgatttattcagggtaaataattacagcgtgtttattggggcagtttactccaatccaattccgcagcatgtatatagccattgcccgaaactttctctttccagtggttgcttacatattcactttgctgaatacgtgagtcacattgctggaaggttacatttactatccacatcggttgtgagagccattccacattgatgtaagagaaagctttaactacatcgctgtttttttcgataacactgaagaatttggtgaaccactcatcccatatcttccgggctatctcaggctttttgatatccgcatcgaagtaagtctgtcccttctggaagacgggagtcgattcggctatgaataccggttttcctttcatccgggcaaattcgatcattacctgatccggctgcccgaaataagagtaggcacaccagtccacatattcatctcccggataccatttctgcatatcggataggggagtaccatctcctttggattgccatacataagctacgttgtggatgcctgccgcatcaaaatgatctttgatgtgtttgtaggcggggatatacgtttcgggtacataatgattccagtctgtaccgtcgaattcatagccgatacgcagaaagacgggacggggagcaagcttcttgaaccattcacctattatatccagcttccggtcgtatttgccggatgctatgtccgtttcatttcccacaatggcaagccctacggcgatcattgagttattgaaacgttccgattgagggtataagttggcacaacaatcacctgaaccccaattgtcgatatcataaagaccggatactttatcggtgtcgctaccgcccagtcccagataaacggttattcctgccggagtctggaaatgatcgcaatagccttcattgtactgttccagtccgcctacagctcctaaatcttgaccgatgaagacaaagcatttgccgtcctcaggttcgtatttggagagttcccgctcgttaggttccggggcgggggtatcatgctctttattctcacatccgatgcaggaggtgaaaaggaggggaagtatgatatactttaatattgatttcatgattgatatgagtttatagtttcattatattcattactataccgatatgcgttatataggagtgaactgaagaacgtaacttcttgtgtgatagtgcacttggtgtcccactaagattagtcgtagtgggaaatggcttcagtcgtagtgggaagtatgttcagtcctaatgggaatatagctcattaccgcaccacgttgaattcatcccattactgcctcaaattcggattcttctctgtttcactgtgaggaatgggtagatagtaattgttttcattgaatacccgttcctcaatggttactattttatagttattattgtttccgtcaaactcaaccgtcattcccttgatgggtgcccgtagagtcgctgcttctttccagcgacgcaagtcgaagaaacggtgttcttccagacacaactctacgcggcgctcattgtgaatacggatacgcatctcgtctttagataaaccttccggtaatcccggctggcctgcacgatcgcgaacctcgttgatggcatcgtacacactcttatccggtgcagccaatgcctcattctgcgcttcggcatagttcagtaacacttctgcatagcggaaataaggccagttgttatcctgtgcaaaggctccggagtataagtcggcagatgctccgtcatattcctgcatcattttgcgaagtccatacccgcagcgtgcgcggtaatcgttgggcagacagttgccactccaatccgggttttgcagatggcgatgcataagcaactgacttccttcccagtaacttccatgataaagcaaagtctgatagaaacgtttgtcacggttggcgtatgggtcctgtggattgtaaatagatgtaggatcggttatcaatttaccgtctgtggtttcataagcatcggctaagttctgggtgggatataaaccgttccaggaaccgcggtcggcatcggcaggatcaagactccattgcatgtggatgttatgcgtaatttccgggaactggaagcggcgctcaaagataatctccgtgttggcattcgatttgtcgaagaataaagaaccgtaggcatattcaccgttgcggtaaagatgatacactcccagagtcatgacagcttgtgcggctttggcagcatcttcccaacgctctttagagttggaggcattgttgagcgggctggcaagatagagcagggcacgagctttcagcgccaggaaggcaccacgggtggcacgccctttcatggcgtcggaaacagtcgggtcgagatcttccgcatagttatcgctctcggtggcaatgaagtttatcaatccttcgaaatcggtggccggtaccagcagattgtcttccagttgctgagcttccgtaatcaacggtgcccgtccgaatgtcctggcaaggtcgaagtaacagaatgcccgcaggaaacgtgcttccgcttcgtaatatttcttttcggtcggtgtcagcaccacgtctttggtgtccggaacggcggcaattatcaggttacatttgcggataatgctgtaattgctcttccagatttcgtcgatgaacggagtgctttgcgctgtgatctgtcccgtattgaactgatttacatttgcatcgaacttgccgtcgaagtcgtcggcgccggcatcgaagttaccgccgaaagcggcagcccagtcctgatcccatccctgcgtattacggttgaagccgcataccagtgtaccgtacgtattggctacgaattgatcgataagctttttgtcctgccaaatcaagtcgtcggagacaaatgtcgtaggcttgatgtccagcatatcagtacaggaagtcatgctgatagcggcaagtagtatgaataagggtttaaatatttctttcatgatattgtctgtttaaaattgaatactgatacctgcgttaaatgatttcatttgcggataagaccaaccttgtgagtttacattttcggggtctatctgaggaacatcggtaatggtgaagagattctgtccgctgatgtacacacgtacattctctaaacggaggttgctcaaccatttgcgcgggaagttgtaacctacttcaatgtttttcagtctgaaataagacgcatcatacagataggtctgcacgggcgggaaatccgtattcgggaagttgtgcgtggactgctccagacgcggataacgtgtgccgggattgttctcgctccatgcttcttttacccagaattgaggcagattgccatcattgaagtaaggcattactacgccaccattcagataaacctgcgcatgggctgctccctggaagaggaaactgaggtcgaaattcttccatgccaggcttccgttgataccgtatacgatttccggtacgttgccgtatcccagataagtcatatcaccggcatttaccacttcgtcaccgtttacgtttacatatttgatatcaccggggcgggtcacatagtcgcttcctgccacttcctgtttggcatacgcatctatttcctgttggttctggaagataccgtctgtcttataaccgtagtagctgtagatgggacgtccggtttttctcaggtattcggaggttcctgcggcctcagccatttccaatatcttgttgcgggcataagtgaagtttccgcctatggagtaacggactttgccgatgtgatgattgaacgtcaggttggcatcgatacctttattctccaccttgccgatattttcaagcgggagttctccaccgaacgaccagggcacttcggctcctcgctgtgcaaggatatcggaacgggtttctttaaagaaatctaaagacaggttgaacatatcaaacaaacctgcatctatcgcgatattcatcttcttggaagtttcccaggttgccagcgcattggctatggggccgggaaccaaacctttggtaaccaattctccgaatacgtagtcgccaagattattcgccagtccaccgccatgcgaaccgcgtgaagcgtacaagtcgaagcggctgtaatacgggaaggctacaccaccggtattgtcattacccaatgtaccataggaccctctgatcttcaggaagtttatcttatttttcaaaggttcgaagaacttctcttccgaaaccacccagccgatagacgcggatgcaaatgttccccaacgtttgtcgggagcaaagttttcggaagcgtcccggcggatattcgcttcaaacaggtatctgccgccataattatagttgattctacccacatagctgaggcgtgccgactctctgtcatatccacccaattgctgtccggtactgttaccggcactgatctgatccattacgtccgagtcgaatgagttgcgggatacccatacgttgtggtatttttctttgcgtcccaatgccatcaacagggctgaaacggtatggttgccgaaagaacggtcgtaggtaagatgtccctgccactctatgtattcgttgtcattctgattctgatagagtgaggcgctgccccgtggctgcaagttgtagttgttgtcttggtcgcgtacatacaggtaaggggagagtgaccaggtcttctgggcgtaattgtttttatcgtatgagaagacaccctttattttcagtccttgggttacgaacggaaggtcctgagttagttcgaggcgggttaacagactgttgtttcgtgagtcactgtatcccgcgtctttgctggtttgcgccatgatgttcgggtgagtggcatcgggtactgtgtaaagaccattgtcatacttggcaagtagcacaggagtattacggatcagctgctggaagacattggtactgctctgcgggcttccatgacggtattccacacgaccggatgcatctaccgagagctgagtggtagaagtgatctttacgtcgatattgcttcttaaagagtagcgttcgtagttcagattgtcccacaaaccatcctgatgtacatatccgaagctggtaaagaacttgatgttatcgcgtccgccgtccacggtaatgttgtgctgatgctgcactgcattctttgacagcatttctttgtaccagtcggtattcggatagcgttcgggatcagagccgtcggcgaattttctgatttcctcgtctgtatagattgtattgcccatgtatatgttcttcatccgggcatagtcggtagaattggcaaattccggcagacttgtaggcttctgtattgatacgttacccgagtactttacgtggacttttccggtattgcctcgtttggtggtgaccagtataaccccgttggcaccacgcataccgaagatagcggctgaggcggcatctttcaatacgttcagcgattctatttcattgggatctatgcgggcaaagtcttctgcctggcgttcgatgccgtcgatgatataggtaggtgaagttcctccctggaaagtggcaacaccgcggatatagatttgtgagccgtccagtcccggttctccggtggtttgtttggctatcagtccgggaatctgtccgataagtgcgttggaggtatttgccgattgggctttcaggatctcgtcgcttttcacggaagctacggcacctgtcagatttactttcttctggacgccatatcccactactactacttcatccagtttcatgttgtcttcactcataactacacgcatatctttggctgcggcaagtgttacggtgcgatatcctatataagatatcttcagcatgtttcctatgcgggtttcgagtgagaatttaccgtctatatcggagatggtacctttttgtgtcttctggtcctgtatggatacaccaatcagcggctctccgttttcatcaataaccagaccttgaataagactctcttgtgcgtatccgcttgccgttataagaagaaatagtatccatgcaagaggccgcagtgtgataagtggcagtcttttcttcataatattaaaagatttaatcgttaataatagtgttttcatgcaatacagggaataaggaatatccgaaattagcgcgcgttgtagtccgtccatcctttggcctgtttggctgatacaaaagtagagggtgggaggagtaaaagcaagcgaatcactactctttacatacttttgccggaggtaaattatacgtttaaaatacgtttgctgattgttaatatattgataaatagttgcatatgtaagcatggactttgttcgtgtataaaaatagccttcctgttttcatagaatcagccgaatataaaaaagaggggaagcgttggcttctcctcttaaagataggtttgtgaagtatgtgattaccttctttcattcagcattttcggtgtcgggcattcatggttgtcgataggaagcttcacttgtttcaaatcgtccaattcatgtatcggcctttccacttcgtaagggggacgcatacccgaaaattcctggaagtatagcaggcaggcatctttccaccatacggcatcacgtgcctgtatcttcaggcgtgactgtacatccttgaaacgttccgcatcgatatagttctcagccagatcccattttttctgaaagcttcttacctgctgtacaccatgatcgtaacgatagcaaagctcgtcccataaagtacgtccgctctgcatggtgtgttgccaaggggcatgatggaaccataagagatactcatccggacaagtacggatgtcatcgtaaaggcggcagagtgaatcgggatattgggctgtagcattgctacccgtatgactgcggtcgaaacctatcccctgtttgtctgctttatgatagtaagacggcatccagtcggggcgtgcaccgggcacgtcgcaccaaggttccgggccgtaatggtgtccccatgcaaagaggtgatgcagcccgagtggcatcatatagtctaccacagcctcgcggctttccatcatcatgttatgtatttcataggcaatgggtgcatgtttgggattacttgcatcgaagaaagtctgtttcagccattcttctgcgattgttcccgatgtcagggaaggattccaggccatgcgcccgaaagcgtaccagttggcttgggcgaaaggatggccacaccagtttgtatccgtccctatattggccacacctgctatggctttcagtgaagacggcttcacaaagtcgaagaactcttcccacatcggggcaagataggcaaggtgattggagaagcccagatattcttgtgtaatctggaattcgaccatctgcggagtccggggcatagcgccgaatagaggactatatggttcgcgaggctggaagtcgaccggaccgttctttatctgtacgatgacattgtcgcggaattgtccatccaaaggctggaattccagataggcttgcttagcgcggtctgcatccgttgggctgtagacgaaagcgcgccacatgacaatacctttataaggcttcaatgcatctgccagcatattggcaccttcggcatgtgtacggttgaagtcgcacgggccgggctgtccttcggaattggctttcaccaggaagccaccgaagtcggggatggtacgatatatctctttggctttctgcttccaccaggcgatgacatctttgtccaaaggatcggctgtggaaagcccgcccagttgcatgggggaggcaaagttgatagagagatataccttgatgccataaggacggaatatgtctgccagagcctttaccttttccagatattcagtggaaaggattttagaggaagcatttacattgttcagtaccgttgcattgattccgatggaggcattggcacgagcgtatgcttcgtatctgtcggagagtgtgccgggcagttcttcccagttccagagagatttgccggcataaccgcgctcgatgctgcggtcgaggttgtcccaatgattgagaatacgcaggtcataggcaggattctccgttatttcccggtctgttttcgaaggctttccgaagttctgcatttcttgcagacggatcaggtgataggcagcataaagcaagcccgtttcgctgggagaagtgacggtgagttttccatttacctgccgtatgcggaagccttcggaagatagctgtttgtctttcttcagtacaagcgtaacggggagccctttccatgcctgtttcagttcacggacagctatgtttagtgtcggagactggcgaggcgttgtaatctgtgcgtgggcatctgtcgattgccggagccacaagcggctgccgtcttccgcggatacgggtccgagtaaacaagataataagaataaagagagcagttttttcataaacaaaaagtattggttggtttattcatcggcggggtagcgtactccccattcgcggcgtaagtcatccatcatgcgcatgatgcgcagggtttcggcgtgaggcatatagggagattcgagccacccgttcctcagagcttccatggatgcatatacctggtattcgtatccggtgatttgtggcggacagttgtagacaactgccgtcttataatcttccgttaccaccctgattcgttgtggattgttgatattttcaatgatcagatgccctttgtcaccggaaatgatgccttggcggtcggtcatactcagcatactgctgtgcagtacagcgattttcccatccttgaatgtaagagttatactattctgtgcatcgactccggtatcggtctttacgcaggtagaggtgacacgctctacgtccgtcccgaaaaccatggaagcaaagttcagtgcatacactcccaggtcgagcagagccccgcctgccagtgccggttggcggaggcgctcacggttgccgattgggtaacccagattggcagacagcgtcatggggcgtccgatgattccaccgtttacaaggtcattgatggtttgcgatagaggcatataacgtgtccagatagcttcggtgatgaagagctccttttctttggcaagattcagcagttcttccgcctggcgggcattggcggtgaatgccttttcgcataaaaccgctttgcctttcagcagactcatacgtgcatgttcaaaatggtgagaatggggagtggcaatatataccaactccacctcttcatcatccagcatttcttcataagaaccgtaggcacgggtgaaaccccaccggtcggcaaagtcacaggcagtctgcaactggcgggaagcgactgcataagcttctattccctccattccttcgagggtgattgccatcttttcagcaatccacccggtacctataatacctattttgacagtatccatactctatactctatcgggtaagggttaatccagtccttcaatggtgataatcttcccttcggcgtcgtattccagttcgcatactttcaggctgcgcaaccaggtgcgtccgccggaaggcacactgtcgtgatggaacagataccatttgccccggtattccacaatggagtggtgggtagtccagcctaccaccggagtcaggattactccctgataagtgaaaggaccgtaaggattgtcgccgatggcgtagcacaggcggtgggtatcaccggtagagtaggagaagtaatactttccgttatacttgtgcatccagcttgcttcgaagaaacggcgttcgttgtctccggctgtcagcggttgcccgttttcgtccaggatcactacggctttaggttcttcggcaaattgcagcatatccgcactgagtttggcaacgcgtccggggatggacggctcgttgtctgcgggaaaagtagctccactttccagagctttgttgtcgcgatagcgttgcaactgtccgccccacagaccaccgaagtacatgtagtagttaccgtctccatcattcagaacggcagggtccatgctgtaacttccgcgcatcgggtcgggttggggaatgaacggaccttcgggacggtcgctgatggcaacaccgatacggaagatatcattctggtctttcagggggaaatacatataatatttgccgtctttctcagctacgtcgcaatcccagagttggcgtcctgcccagggaatatcttcggtggtgagtaccaggccatggtctacgatttcacctttcatggggtcatcggtagagaagacgtggtagtctttcatattgaaatggtcaccgttgtcattttcggggataccgctttcccagtcgtgggaagggtagatgtaaagacggtcgttgaacacatgcacggcagggtctgccatataatctccgggtaccaggtatcttttttctttcttcatgactctataattttaaaggttaatattcttaatttgtttaatcttatcgagaaaatagtttcagcttgaagaagctataattttgcgatccactcaataggtatgtggcgatctaccaaaaatgagtgttctctctgttgatctttgcctctaatagcctcctgtagcataaatgccgaccatggttccggtaaaacctccggctgtctgcgtgcttatcaggtcggcggaggcggggtcgcctacttgcgtccagttacctttaggactggtggagtagctgaaggtatagtttactgcattatctccttctactttcagatatactttttcatctgtccgggttagcgggctgtttgcctggctgcacagtctgccatggctgtatgtttccagaagcatgacgggtttgccgtcttggtccaatgtctttccgaagcgaatatagcaattatcatcatggaaacagatgatacccgcgaaatccttcggctgttgtggcacgaagtccaagccggtctgagctgtgaatgtccaattgttaatccagcggccgatggcggcaggctgacgcttttggttaagatcagtgctgctggcggtcatttccaactgccctttgctgtttatatcatagcagggcaccagtggagtgcggatgaaaaatgcttctttagccagtccgtttgctgtccatagtggggcaggaccataggagcggtcggcggtataagtgatgacatcaccctcaggaagaataatgggttgattctctttccaggttaccgggagcatgaaagtctcgcgtcccatcacgtcgtgaccgttgcggtaggggcggacgccgaggaagacagcataccagtcgccatcgggagtttccaccagatcggcatgaccgacgcaggtaaccgggttgggacggtcgcccggcaagccgcgttgcgtcagtatcggattgatggcacaaggtttgaaagggccgaacggagacgcagaggtgaagatcacttccgagtggttggggcctgtgccaccttcggcagccatcaggtagtatgtgccgttgatgtggtagaggtgtggaccttctatccagctgggatgctgggttttgtctactcccccgtcaataatcattttctgttttcctacggtacaaccgtttttccagtcaaattcgcgtatccagatagcgcggtgaccgtcatattcgggctttcctgccggaccgtcattgttcacaatgtatgctttcccgtcttcgtcgaagagaaatccggggtcgatgccgcccacttcgggcaggaaagtgggatcactccagtttcctttcttcggatcatccgtagtgacgaagaagttgccgccaccgtctacggctgtagtgatcagatagaacagtccgttgtgaggattgtatttgatgtccggagcatagataccgccactgatgcgcaggccgtcgtacataggcaactgtgaggggcggttgaggacgtagcccagttgttcccagttcgtcagatctgtgctgtgccagatgggtacgccggggtagaaggcgaaagaggagttgaccatataatagtcgtttcctacgcggcagatgctcgggtcggggtaacaacccggtaacacgggattcaatgtgcccggtgtggtaacctgatcagttgctttatcggtatccttgggagctaccgtatatgtgaactcatcgaatacggcctttttaggttccagaatttctttcaggaagggcttaggctgatagttacggtcgaagagtaggggatattcccgtcttcccggtacgggccagtcattcttccaggagtcgccatccgatactccccaggcggttacgcgtgtaatgacgtccgagtgctttatgaaaagttccatgaacgatttcatacgtgcattccacagattggaaacactatccggcagagcttcgggatagggatttaaggctttctcaaaggctactttgtcggcaatatttgctccgcggtttacggttggcaaagcactcatgtcccattccgttatcattactttagcgcctgtagaggcaaaggcgagaaggctggtttcatattcacctatgctcgggtaatccaatcccatgtgtccctgcatacctatggcatctatgcgcaatcctttttctttgagtgaattgaccatacgtaccactgcgtctcggcgtcccggttcgtgcataccgtagtcgttatagtagagttccgcttccggatctgcctcatgtgcatattggaaagccagcgggatatattcttctcccagtatctcgtagaacttgcttttgcggtaacttccgtctccttcgatggcttcgtttactacgtcccagcctttaatgcgacctttgtatcggcccacgatagtatgaatatggcttttcagtcgctctttcaggacttcgggtgaaacattttttccttcggcgtctacgcagaaccaaggtgagagctgggaatgccacaccaggcaatgcccgatgatgaacattccgttatcctcgccgaacttaacgaattcgtctgccaggctaaagtcatatctgtcttcttccgggtgtatcacttcactcttcatgcagttttcggccacaatggagttgaagtggcggcgcactacatcgactgcgctggtgtcgcgccccgcagcctgttcggaattaatggcgacaccgacaaggaatttatcaccgagaatgtttgttagagtcgggtctgccgcaacaggtttatcactattacaagacattaatgcggcagcacaaactgataatgctaaatactttaatttcatgctataattggtatgatttggttgctgaagggatttactcttaattatacggttttgagggaaagttgacgagttaacaagttgacaaggggacaaggttccatgcggcataggagcattgcgcagccccttgttcccttgtcaactcgtcaactggtttccttcctttctataccattatgaataaatcctatcagcctttacacttaataatcttctttacttctgcgttccgtcagttcagcctgcatctcttcattatacttctttgtaataggatagaagtacagcgctatgacgccgatgaagaacgtaacggccggaataatactggatgaaagcacgataccatgaatagccgattcgctttgtgcgatccctgcgcctgatacataaccgaaaccggagagtaggaaacccaatatagcgcctccaatacccaatccggctttcagtgcaaataccacacctgcgaacacgaaacccgttgcacggcggtgattgacatattccgaatgatctgccacgtcagcaatcatagcccaaagcaacggaacggtaggagcgtatgccaaactcttgaggaagttcaggacgaacatcgtctctacatccgtctcattcgggaaatagaagaaggcggtgaacactgccgtcagagccaaacaaacgataaataccgatttctttccgaaacggttggccaggaaaccggacaggaagataacgccgaagaactgtaccactgctcccagcatgttgaacacaccgaagcccacttcataagccttttcaggactgctgacaataagaccgaaagcattcagtatcgtatagcccaccgaatcactggcctgtgtagccaccaaccccagcttatcgaggaaggcaaataatgcgcccgaatccacataattctcaaaatagtagttcatagcgcttccccacatggcaagggtagtgaaaaggaagagcgtcaggatgaacatagcccgccagggaatattcttgaatacatccttgatgtctttccgggtatcagttttctgatttgccggcggtgtgatacgttcgcggctggagaagaaagtaataaccaggaacacgaaaccgatgactgcgaataaggaaatagtgcacagccaaccgtgccccttattaccgctttcacctgcgaacttgcttaccaacgggagcgtcaagccctgtaccacaaactgtgcaatggtagcggcaacgaaacggatagacgtaatgcttgtacgttccttgatgtcacttgacattacaccacccaacgatgcgtacggtgtattgttgaacgagtaaagcgtcatcaacaaggtataagagattgtagcgtacaccgctaccaaacctttatcctcgatgccgggattgtagaatgccagcacatagaacaccatgaacggcaatgcggtccagagtacccatgggcggtatttgccccatttggtttgtgtccggtcggacaatatacctacggtagggtctacaaaagcgtccacaatgcgggcaatcagcatcactgatcctgcaatggcgccttccagaccgaagacatcggtataaaacttggtttgataaatcatcatcatctggaacacgaggttcgcagagcaatctcctaaactatagccaatcttctcggccatagacactttttgacttagtgcgttcatagtgctgtattattcagttattaatagtcagtaatcagttgttcgtttgctgttatccgtttccggttgtccgtcatttattattctccagcgcactttctgctgcgcgttgtcccagggttttcttatccaatggatgtatatcgttccattcgcccaggtcactgttgcggatgagtcgggtgttccggttggtttcagctactttagcctgttctttgcgcatctcagcccaggcctgccgaccgctgacgtcatctcgggacaggaagtctgccagttctacaatgtagaaaggtaattccgggttgccgaatgtgctacgccaatcagcaatcatagctgtcagtagtgcggtgtattcattgcggcggtctacattggactctccctgataccaaagtacaccacggatgccatagttttgtaatggagcaatcatggcattgtacaggcataccggcttgtaacagaagaacatcattcccggagccggaggcatggaagcacctaatctgtatttccattctccttgcaggcttacttcttcatttccgcaaacaattttataaggcttctcctttacaaagtgcggataaccgttattgctgatgaggcgtatggttactgtattctttcctgctttcaacacacctgccggaatggtatagatgcgtggaggatactggtaggaaacagtacctacgaatgtaccgttcacatagacggagtctgcatctacgatgcaacctaaacgcaaggtcgcttcttttccgttccagtcttgcggtacttccacttccttgcgaaaccagtgcgaaccgtttatcggattcaaaccgttggttccccagtcagtagagaatagatcaacggtcttccagtctttatcattgtagttggcggcataccaaggtgttgcttcgtgcagtcctgcatctccccggtatagggaagtgttccagcgatagaagctcaaaccttctgtctgtttaatgcttttcagataggcatcatcttcatattgccgtttatcattaatatacttcggaaattctttcagtccttcttcgcttatccatgcctcaacgggagttccgccccaactggagtttatcagtccgacgggtatgttgttcttttcatacatggctttggcaaagaaatagcccagagcggagaagttcatgacgttttcctgcgtcagtggtttccaggcaacgtaatccggcaagtccgtttgcggtgcatggaagttgaagatattgggtactttcagttgccgtatattcgtgttctcgtaagcggagatttcattacggaacatatccgtaacccggctgacgggcagttccatattggattgaccggagcatagccatacatctcccaccagaatatctttcagttcgatgtcatttacttgaaggatgtaaggcccgccgggtttcatggcaggcagggtgagggaccattggccgttttcatctgctgtggctgtgtaagtagcttttagtttcccaccttttacacctgtaggggtggcgttcttcaggaactttacctgtacgctttctccggcatctgccgtaccccataccttaatgggttgttcgcgttgtagtaccattccgtcagaaatcaaggcaggtaactttacctttgcgtttaccatggaagtagcgcaaaggcaaagtaacactgccagactcaacctaactttattaaaactaacctgattcatatctaatttatctttttactcactacttagctactacctacttatactcatacaacttcacatgaagtatctggaaatctcccactgagatacgcacatggcgcccctgatggtcttgatcaccattcagacggcggatgtaagagagcgtaccgtcctcgtttaccttcacttcatctacggaaccgatgccgcatcgtgcccctttccacatcaccttatcacttatcactccatcaccctttcctcctgcctgggcaaatccgtcttcgcccaacgcccggactttggcctgattttctgtagctttctcaaactcgataacgataccgctacctgctacgatatactcattgggtgccagtcttaataatacacctccaccttcgggccatacactgccatcggtggcacgcgcatcccagggaagagtaaagaaatggcgacaggttatcttcagatcatcctgataaatgatacgttctttattttcctgatcgaagagtaatcctttcattgcgcctttaccctgatacttagcgagcagaggcatgaactctttcagcgtacgatagcttttcaccaacggagagttgggagagtcggaacctccttcgatggagaacgggctgataccgatggcatcatgttcaccaaagatatagaaagctcttactccattattgtctgtcagtttgatttcggggataaacaacgggttgttgtgtaatttatatttagctacccagtctgtaaagccattgtcgtacaggtcgggagcaagaaggtcgatgttgggcgctccgcaatgccatatatcaataaggtgtgccagcggaccggcagaaggatattctcccggtttccggttgcggctgttcatggcagcgttcacgtatagtggaatattgtagatggaccgggcgctttgtgccattctttccacatagcgggcgtagtgccaggccataaataattcatcggtgtaaatatcggctccgaatacttcttgccaggtgccttgcttcttgctaccttggctttcccatttctcaagcatttgggggtggagcgttttcttatttttctgcaagtaactcattaattcagcgggcaccggtgcattgaacagtgcgttggcctctttagaatagtctctcgcatcttccagcatacctatctcattttctatctgtatcatgatgacggtaccttcctctttatcaatggctgcgacgtgttccatccattgagaaaaagcgcggttgtcggcttggaatacattttcagagaatgcgctggctatttcgagtggttttcctttttgtgtataagcacgcgggtatttcttatagttttctttgaaccagaggggagcgtagcaactcatggagttcttccaggcaccgaaccaaagaaagattactttcagatcgttctgccgggcttgacggatgactttatctgtgagggtgaagtcgaattgtccttcctgcggttctatcaaatcccagtatgcgggaacgagtactgtattcagtcccatccgttgcagcttcgggaagatacgttcgatatcttctgtgcatgctgccgatgaatttcctaattcaccgcctaaaataagaaatggtttgccgtctactactaattgagtagcggtgccttgtttctgtaatgtactcttttgagcatttacatacccaactgtcattacactcaaaactaaaattaaaatccaattcttcatcgtttgtctctggtattgatttgagatgttttccattgcaacaaagatagtgagctataatttagaaagcttttcgcagtgttgcagaaaacttcatttcggttacatcattcctcaatgatgttacataattttttgtttatcgtacatttccctgtttcagggggtaaaataggtgtttttaccgtattcgggaatagtttggtaaatggtttgatgaatggaatccggtaaggccggagccttaccggatttcctgtcttcacactttattcagccggagtttcttctccttctgtttcatacgcattcttccagtcgtcaccgctgaaatctgcactgatatcttttccggcaataccatcgcatacgcctttataggcatgtttgcgttcatagtttgcgtcgaaaaggttcggtgcatcgcctgacagccaatattcatgctctgcggcattatcgctcagcgtccagatggtaatacctgactgctgagattcaggaacgtttgctttgtatgattcaaagatcatctgataaacgttggcctgagttgccagttgttcggcagaggggctggatgttcctaatgctacatccaattctgttacgcgcaccagttttccggtggcagccattgtcttgaacatggcatctatttgttctcttgtgatactggaagcagtcacgtgcatctgggttcctataccgtcaacggtttgtccattgtcttcgatgtaatttacgaagtctatcaaagctgcaagcttacttgggtttgtctccagattgtaatcattaacatagagcttaacgtcggcagctgcatacttgcgtgcatattcaaatgctttcacggcatattccttaccgatgtagtatccccaatagaagtgatcgtttgcccagttcaggttcagaccgttttcttcgtcttctaccggtgcagtgtccggcgcgtcatcaccattactcatgaagttaccgtctatgccacgccattgattgttgtccgcaataggttcgttgatgacatcccattcttttacgcgttccattccctgatgttgcagcatacctttaatccatgcttccattgcacccagtaaagcggcttttttctcttcaggagtcttcagtttgtaacttatgccaccggcgcgggttgatgcacgtaaagtctgggctgttgcagtttctttcttttcaccgaatttgaaattgtcaatgtagtaagttccggcaacttttccgtagttgatgcagaggcgagctataccttcattcttacaaacaaattcgccttcaataggtatccactgatcaacggctgttgcagcacttacgtatccttcaccgttaccgccattggcgtcttgtacctggagtgtgaagtccggattgatgacggttgcctttaccatagcagagtacatgtaggtctttccaacggttaatgtctctgggaatgagtgagcggtctgagcactccaggaatctccatcggaaggattgaccatcaccatgcagtaatcgctgttgtaaccttgtcccttttctgagattgtacgggtagagccattaccccaaccggaccatgagccgagagttccgtcttcaaactttccgtcgtctatgatattgatcatcttttcctctatcttctttccgaacttgaaatcatccacccataccgtgcttcccggtgttccgccgaattggatgcccacacgctcgatgtccttagtgtcgctctctgcataggtaaattcgcctgtgcagcggatccactcggaaggtgccgtaaatgtatctttgtagatgcccccataagaagagttctggcctatgaactgaacggctatgttctgatccgatttcacccagaatgagtaagcgtacgttactcctatttcgagcattccggtaggccagaacagctggcagtcatagttcgcatttgattcgctggtcatggtgaagcgaatggcgtagtcactgtcatggcccggctgctctacggcatagttgtatttgccccataaccctgtccatccatttgcattgcctccttcaaatccgtagttgctgacaatattctcgcatacatcatcatcacctacctcaacgacaacttccggtgcgatcagtgatttcaagtatgtctgtttttgctgagtatgccagaggaagttatgcccatatatctggatgtcggccggaaccaggttcaggaatgcgtcgattgttgtgaaattcaattcaccgttcgctttcactacagccgaatgtttcatggcgtttccggttgtaaacatctggaagttagcatcggctatggttctgtatgccgcatcgttgatgtataggtcggctcctaagccaagtcctacattcatgttaggagcatattgtgccacatacgattttatatagtcataatttgctatcttttcctttaatgcaaggggaatgtcggaggctgtgatacttccgtcggagtttttccattccattatctggtcatcgcaactactccatgtcagtgcgcaagccatcagtggaagaataattctatttagtttcataattcttaatgtttaatgggtttctactgagtttattccgtagtttcttcatcttcaggataatcggagattgtgacagtcttgtaaggtactacacgccagttgtccagatagatacggcttgagaaagctgtggatgtgatgcttacatcttggtaagtaaagtctgtattgacaaatcccataccgaagtttctgtaagtggcggcattgcggtcttctaccacattttggaataccgggctttctttatcttctatcatggtggcgtatttgttgaactggctaaacggaatagttacagtttgccaacctgtggttgagaatggaacgatagcaccttcctgaatccagggaacatagaatgccacttgattggaagcaccatcatcatcggaacctatacctccaaaattgaagttgttgaataagcttatttgcagatgtcctgtgccgctccatgcttcgggcacataaacgtcgaattgcaatgctacttcggtcagtggggtagttgccggtatataagaatacatacgactccaatcatctgctgcatcgtcattgccggctgtccaacattcggatacacgcggtttgccggatataactcctgcttttaataaacgttcgggaacaatctgaacgcatttgccacgtccgctatcataaggatcttctacaaggtcgtcagcatttatcatcgaaccggtttcgctccagctccagaacccttggctgccattgccatcgaaatcaagtatcatacagtctgcaaagttgaagtaagccggagtggctgcctgtccgttggcgccttccgaatagatggaaccgcttcctgaatagttttccggcatgatgaatgaataccattcaccgtcttcatcactttcaatgtcggctgtgatttctattccgccgggcagggttactttggtggtttcctgtaggccggtgccgtatacggttactttctccttgtccttaggtaaagtattgctgatgcctgttatggtaggagatgctgcacggatgatgaaggggtgctccagcgtggcgtcatcttttacaaagcggatcttattgcggtctgcctcttcagcgtcttcaacgggggtattgctgttgatctgaatcaacatggagtggtcggttacgtaggcgcggttaaagtaagtctcatatccgttgatgtagactttcttcatgccatagagtccgctaccttctacacggatcaactgtccgaggcgtgcgaaagtaaccggtcggtcgggtacagacgattcataatcttccagatagatctggtcaaccacaatctttgtgctttggtatttgctgtcaaagtatttatcctcctcattgcatgaggtgaggcctgcggccaggcatgacaagcataatatccatatatattttaagcttttcatatcttctatagtttgttaatcattgaacaaatcattttctgtgacttcttttgcaccgaattcgtaagctaccgggtcgttattcagaagcggattacgtccgcggtctacatccgagataggcagtgtcagattggccgatgtagcggttgaaactccggttccgtcagaagtctttgcatactggcaggcttctgtttcatcccattcgtaaccggcattacgctcctggctgttgaggtagttcaccacttcctgttgctggtaataggaacggcgcagcagatcgtaccagtactgtccttccagagcaagctcgatgcggcgttcgtaatggatatctgaatatgtgatggttgtcagggacggcataccggcacgtttgcgcaccgcattgaaggcgtcacaagctgcttgttcgctggtcgaagcattatttccaagaattgcttcggcaagattcagatatacttctgccagacgcatcatgtaggtattcatgccactgctttgtgcatagctttggccattgtcgtcaattttacctatcacgtatttcttgaagttacatttgttgtcataaccggtttcggtgacgttatacgtgtaccctccgttcttggtgttgagatccggataatattcacctacggtggcgatagtgtaatggcggcgggtacggtcttgaggatcgtaagcgcgtacaaggtcataagaggcataggtggcattaccccagttctgttcgcttaccatagtagaccagccaaaataggttgatatggaattattgcatccccaaccgatggcatccgtgctaccctgcaaccactgcaactggaagatggcttcactgttgttgttgcatgtgcttggtgcgaagaggtctccatagttgtcgagaagtgaatacgggccttcttcgatcaccttcgtggcagctttgcgcgccatatccagatagtacgtgttgcgcgaaccgcggttgaaatcagtagctatattactgccgttgtattcgccttcagtagtcaaacctgccatagagagatacatacgcgacagaatagcgtaagcactgtaacaagtgacgcgacctacatcagatgctgtcttgctgaggttgactgctgcatattcgaggtcgcggatagcgaattctatcacatccacaccacggttggcaggaaccacagagttatttacttgttctgccgtattttcatagatgatacctttgttccataaagagccgatgtaccagtatgccagtccgcgcatgaagcgtgcttcggcataagcttgtactttggctttttcactgacttgcggaccggaataatccttaatattgttgatggcgtagttggattgtgccactacggagtagaaagatccccaggcatcttcaagtcccggactcaatgctgtttccgtaaagttagtataaggatagatatagtctgaccaacgggcggtgatgttgtttgcacgtccgtctcccatgctatagtaggctttatcattaaaactgttccacacatagttataaagcggtgcggtagctgcttccagagcctcgtcagtgtcgaagaaggtctcttggttggcactggtggtattatcgtgtgtcaagaagtcctcgcaggaactcaataccaatgaaccggccaatgttgctatgattaatatcttatttttcatacgtataattctttttaaaggattagaaggatatgtttaatccgaatgtgtagatgcgtggcgaaggataacgcccgtagtccacacctgtcattaatgcatctccatagatggcacctacttcagggtcgaggcctttgtatttgctccaggtgtatacattctgtatgttggcatagattctcgcattgttgaggaaaatcttgtttatccatttcttggggaatgtatagccgatggaaatattctggaggcggatgtaagaagcgtcttctacaagcatatcgctgatacgggtgaagttgttgttagcatccgattcctgcaaagccggcaatgtagtggcagagccgtttactacatggaggttacgatagtcgtcatccggaccgttggggtctatcaaacctatctgtgcatagttcagcgaagatttgagtatgttgccgttggagcggggatcttcaatacggtagcgggtcagattcaaagccttgttgccgtaagaccccgagaagaatattgtcagatcgaatcctttgtaagagaatgtattaccgataccgtaagtgaactttggttccgggtttccgatgtaggtacagtcttcgttgttgatgaccccgtcaccgttgcggtcctcatagatatagtcgcctatccacgtactgttcttggcaattgtattaccttcgggtatggctacttgcttcacgttgccgttggcatctttgtagtagaaatccgtcggttcatcgaaacgtccgattactttgtagccccagaattgtccgataggctgtcctacggtcgttttggttacgatgtagcttgcggaactgggttgataactcttttcaatggaagaattgtccgtatcgagttccagtactttgttacggttgagtgagaatacgaggttggatgtccattggaaatccttgtttgtgatgttagtcgtattcacggtaagctcgatacctttgttctcaagagaacctacattaccccaaggattggaagcggcaccttgtccacttgaaccgagataggcgggcaaggggagttgcagcaacagatttttagtcttcttataatatacatcggcgattacttcgatacggttctggaataaaccgaggtcgatacctacgttataagaatgagtggtttcccatgtcaggtcagggttggcggtattgcctgtcagtacaccggttccccagggagtggttttgtaagagagcagtgccatataagcatagtcgctaacgttctggttacccgtggcaccccaacctgcgcggagtttcaggttgttgataattgcgttgttgcgcaggaatgattcctgtgacgcacgccatgcaagagccactgccggaaaccaaccccacttattgcctttggcgaatttggaggaaccgtcccgacgaatggtagcggtcagcaggtagcgttcgtcaaaagagtagaaggcacgtccgaagaaggaagcgatggaattcaccacgcgtgaaccggtggtagtggaagtggtgacatcacctgcactcaggtcgggagttgtattactcaggaatcctgtggctgtacctacttgtgtctcccagttggagtgtgacatttcctgacctaccattacgttgatgttatgtttttctgcaaacgtattattataagtaaggatattgcgccatgaccagtatttggtgttggtcttggtccaacgtgaggtacgtgtgtcgcttgttttgataccgaactggtagtctggctgataataataatagttattgaagttccagtcagctgataattccgtcttgaaagtcaatcctttcagtaggtttgcttccagataggtattgaaacggaagttggttttacggttattgttggtgcgtatggaagcaagtcctacgggattttcaggcatccacacatcgtccggaccgtcgaaggaaccatcgggagatgtaacggcgaccgtaggttgctgtatcagtgcgctcataatcgtattattgtcggtaccgacattttgcttggattcagcaaacgagaagtttacacctccgcgtaaccacgatttgatttcagtatcgatattggcgcgcagggaaagacgtcggaagctggaccctaatgcaataccgtcttgatcgaggaatccgccgctaaaagcataagtggttttgttgttaccgccactgacagagatattatggctcgtcatgaaggctttgctgaacaattcgtcttgccagttggtaccttcgccaagtaagtcagggcgtacgaaagaactgctttgttctaccagaccaagagccgagcggtcattgtgatgctgtgcatactgtcgtagattcagcatatccagttgtttaggcatttcctgccagcccgcatatccgtcgtaggttacggttgcttcgcctgcctgtccgcgtttagtagtaatcatgatgacaccattggatgcgcgcgaaccatagatggcggttgccgaagcatctttcagtacgtccatggatacgatgtccgacggattgatgcttgataaagggttgctgttttcatcgtcagtagcagagtccaccactacgccgtctatcacgaagataggctggttggtggcgttcagtgagttgataccacggatgcggatagaggtggacgcacccggtgtaccggagtttgcctgaatctgcacaccggcagcgcggccttgcaatacctgatcgatagaagtcggaaccgacttcttgatggcttggtcatttaccgataccaccgaacctgtcaggtccgaacgtttcatctgtccgtaacctactacaacgacttcgtccagcatctcagtgtcttccttcatcgtgacattgatttgtgtcttcccggctacaggaatttcttgtgtcttgtagcccacaaatgaaattacgatggtactgttggatggaacattcagtgtaaagttaccgtcgatgtcggtaataataccgttgctggtgcctttctgcactacgctcgcaccgataaccgattctcctgtggcgtccttcaccacacctttcacagtgatattctgtgaaaatgcccatagaggtatcaggcataataagaatagaagccccaaaggcttaaaacaataatttgtgcatttcataactgaaattaatttagttggataacaataatattctctttccttaataaagatgtgaagacatgtttttcattctcaagtttccatatttgcatttatcagattaaagggttaaacattgctttttcgtttgtgacaaaggtattctataaaaagaaaaagcggatatttaattgtagcctgtgttacatttaaatgtaacatgacttttctctgtgttacaaaatcattcgctggtgttacgtcccaggtttgttgacgtccgaaagatagagaattaagtgataaatcccatattcctttcacttatatcatttattcctttcatccgtatcaataagagggctgatgcaaaaggtggcatcttttgctgtaaaagatgccatcttttgtatcattagatgccacctttcgatgtaaaagatgccatcttttgcaatagatgtataaggcttcctggcaaaagggtttaatgttccgcccctttaggtataatgccgaagagataaagagcatatatgcaatggcttccctgtccatttcgaaagtttttcttatctttgcttgcctttaagtataaaatgcaatgaaaacagctcttaataaaatcctccttatagtcttattgctatgtttgaccgtcctgcctttgacggcacaaaccggtaaattctattctactaacaacgaattgtccagcagtcttatcaaccagatttttcaggataagcgcggatttatctggatagctactgagtacggactgaaccgtttcgacggacttcgtttctccaactataagcatatatccggcgactctacttccattaaaaacaattatgtgcgcacgctttttgaagacagccggcagaatctgctggtaggttgcatcgacgggttgatgaagtatgattcggaaacggatactttccgggagattccaatgatacgtgcgggcaagcgggtttttccacacatcacgcagatgcagaaattgcataatggtgagatctgggtggtaactaccggacagggtattttccgtttggacgaagagaagcagcaggcggagtccattgacgccatcatgaggcaagtgaattataacttccagtcgaatttatacgaagattctgattataatatctggattggtacggaagggcatggattgatttgctatctgcccgctacgcaagaagtccgtgtgttcagatatccggtgattaatgataactatgtgtcggctattggtgaagataagtacgggaatctgttcatcggtactcaaaagcatggcttgtcccgttatgatcgtgagcagaaccgctttattcctgttccctatacgggtagcgaggaactgtccatctattgtctgacgctggtggacgaccgtctgttgataggcaccgacggccagggactgaagacttacaaccggatgaccgggaagatagaggattatagtatcaattccgcaccgctggatttttcggaaggaaagatacacgctatcatggaagaccgggacaagaacctgtgggtaggattgtttcagaaaggtattgtactgatgcccaagcaggagaatccgtttgagtattatggcaacaggtccatttattataatcccatcggacaaggatgtgtaatgtccatctatcaggatagtaaccgtcacctgtgggtaggggcggacaatgagggaatctttgaactggatgcggaaggaaagaggctgcggcattatcagcccggcaataacccgcgttcgatggctaatacgattatgtgtatgtacgaggatacgaacggagatttctggctcggcacgtacacccggggactggcaaaactaaaccggagaaccggtgagtgcgaatatccgctgccggtggacaatgagaagattttctcgattacggaagatcggcataagaacctttatatcgctactttcggttcgggtttctaccgctataatctggtgacaagggagttgaagcattatgagtcgtctaaagatgagtcgggcgacctgacccggaatgaactggcaaatgattgggtgaactacatcttctgtgatagtgagggaatgatctggctgggacactataaaggtatcagttgcttcaatccggtgaatgagagtttcattaactaccgcaatgtgaatactctgattgaagaccgggtagggtatgttttgcaggaagaccatgccggaaatatttgggcaggtacgacggacggactctatcgcttcaataagaagaccgaagaactgacctgttttacggtggcggatggtttgcctaataatgtaatctgtggaatttgcgaagacgaggaacataatatgtggatcagtacctatatgggtatctgtaagtataatgtcgagaacaaccgttacatcaattattatgcgggcgacggattgcagggaaacgagttcacgcacggcgcattctataaagatcaggcgggaaaagtctatttcggcggtataaatggtattacctatttccagcctttatccatagggagtgtgctgaaagacaccaaggtctggattacggacttctttatcttcaaccagcctgtgcggaaaaatacgcgttcgggaaggcataccgttatctatacgtctgtgccggatgcgaatatgttccaactggctcattacgataatacgttcagtatcatcttctccacgttgcagtataacaatccggagcagatatcctatcagtataagattgaggaattgagcaaccagtggctcagcaccgagccgggtgtgaacagggtgacttacaataatcttccgccgggcaaatatactttccatgtgcgggcactgagtcacggcaatctttcggagatacgtacggttaagattctgattactccgccttggtatgagatgtggtgggcgtattgcatttatgtttttctgctcggcttgcttgtattgggcattgtgaattacatcctgtcgcgtatgcgccatcgccgtgaaatcatgaagcgcgaacatgccgaacaactgaatgaagcaaagctacagttctttatcaacatctcgcatgaaatacgtactccgatgacgctgatcattaatcccctggagaagttgttggccgaaaagaagggaggggaagtacaaaagacttatctgatgatttaccggaatgcacaacgtattcttcgtctgataaatcagttgatggacatccgtaaactggataagggacagatgttcatgaagttccgtgaaacggatatggttggtttcattgatgatgtgatgcttaccttcgattatatggcgcggaagaagaagatacatttcagcttcgagcacgctatgccgcagttgaaggtatgggtggatatgaataacttcgacaagatattgatgaatatcttctccaatgccttcaagtatacaccggagcagggtgaaattacggtttcgctttctaccgggcgcgatgctacccgtcgcgatcctctgaaggaatattttgaaataacggtcacggatagtggtatcggactcgaccgggagaagatagagcgcatattcgagcgtttctatcagatagataatgatgttacgaagtcgaatttcggtacgggtatcggtttgcatttgtcccgttcattggtggaactgcatcatggcattatcttggcagagaacagggaggatgctccgggtagtcgtttcgtgatccgtattcctttgggttcagcacatctgcgtacggacgaactggaagatgtggaagcactcatcacccctcatgccgtgctggttaaaccagaaaagacggacttggaggaagtctttgaagaaggagagggtgaagaggatgaggaaagcaagaagaccggtaaggcaaagaaccgtatgcgcatattgatagtggaagatgaggaggagattctttcttatctgaaagaagaattggaaggggactatcggataatgacccggaagaatggcagggaggcttatgatactattcttgcagatactcctgatttggtaatcagcgatattatgatgccggaaatggatggtctgtcactttgccggaagattaagcagaatacgaatgtcaatcatgtgcctgtaatcttattgactgccaagtcgaaacccgaagataccatggagggaatggcaaccggtgcggatgcttatatggtgaagcctttcaatacggagctgctgaagagtacgattgccaacttgcttgctaaccgtaaactgctgaagagtaaattcagtggtgcgcaacagcaagaggacaaggtgcagaagctgagcatgaaatcggcggatgagatattgatgagcaagataatgaaggttatcaatgaaaacctttccaatccggatctgaatgtagagatgttggcggcaaatgtcggtctaagtcgcgtccatgtacatcggaagctgaaagaactgacaaacctttcggcacgtgattttatcaagaatatccgtttgcaacaggctgccgcactgctgaaagagaagaaactgacagtttccgaagtagcttatgctacggggtatacgaatctgtcacatttctccagttctttcaaagaggtgcatgggatgtcgcctaaggagtatatgttggcacatcaggggtaagttttaggaatttatttattatggatgggttatgagggaaagttgacgagttaacaaggggacaaggttccatgcggcataggagcattgcgcagccccttgttcccttgtcaactcgtcaactggtttccttcctttctataccgttttgctttattgccaactttcacttacgaaacttgatttagccactccttttagtaccacattattaatatttacctgtgccgcttgtgcatcggttatcacttctttcttggctaatctttccgcaatcaggcggaagtagccttcctggctttcttgcagccgcccatctgccgtaaatgagtttttgaagtgtttcggtttaggaacgatagaagccaggaaaatactttcttctaaacttaactgtgaggggcgtttgttaaagtagaaagatgccgcttcgtggatgccgtaaaccataggcccccattccgctatgttcaggtaaacttcgtacatgcgtgccttcggagtgaggtgctcggtttcgatgagccagacgataagcgcttcttccagtttgcgggcaatgtttttgttacggttcaggaaaacattcttcaccaattgcatggaaatcgtgctacctccgcgggcaaacttgcgaacttccaggtcatgaatcagagcttctcgcatggcatccggcaggaatccccggtgatagaagaaagctccgtcctcactctgcatgacagacatttgcagcagaggagaaatgctgtccaagggtgtgaaattctcccatgacggaccgactgggaaggtgtatacgggctgtccgttctcgtacgctgtatagataaactcatcggacatcttacctaaatccgtctttccataatggagaatacggaaatctttttctttcagttccgactcaaacttcaaactatccagttgagagaaatccacatccaatagaaagtgataagctaattgtccggtagtgccgagaccttccaggttttcgaaaagtcctttgggcaatgaaccgaacagctcttccgaagggaaccagggtttccggacagaagctataaaatgccactctttcttgtctgtactttttccaatacgttctgcctttaaataaggatggaaggtcagtgcattgaaacgtacaaggctggtactgtccagttctacggcttgcggactgacatttacgtggaaatccagttgtccgcgatccaggttgattgtttcgggcgacaaccgcttatgatatacctgcaatccccgtacttccgactgaccaaccaaacatgtaagcccgttgttagttttttcctgtgagaagttgcacgtcagactatcgaactgtacttctgcaccgaatcggcggtggatataaggaacagtcagttgtggagcatgtaaagttgcatgcaatcgcctttccgaaggattaaattctccttcggtattccattgttggtgcaggctgtcttccagaactgttatttctgattggaaatgatagtcgtcaatcacaaagcggggaatacggaagctgacgaaattacggtctttccgctcagtgattgtaagatgggtgagttcaccgtttccgggtaacaggccgaaaaggagatttaatgttgtattgatgcgacgggtgtaatcggtactggtattgctttcattggaggcagttacttcggaagagggcaggaaaaggaaatcgtagttggctgtagagtctttttttatgaaattgagtgagagtccgtccaggcggacttctttgatcttgatatctccccacagcagtttccaaaggccgatacggatattgagagattgaagggaaagcaatgtatctcttttctgtggaaccacattcagtccgtcgatagagatcgtattcaaccccttcatgtggagtttgttgtaactgatgtctaacccgtaacgctgttccagtctggtaatgcgtttatctgcgatatggcgcagtaggcttccccggaagatgaaaatacctgttgataaaagaaatagcagcatgagacatgctactattactttggttatttttcgttttatcatactctttacttttcgggcgcaaaggtatggataaaaatgtaagttgctactcttggagcctaaaaacagtaatcatttgtttcctttccagatggagagaactttctttcgtatcaggaggatgtttaaagcggataccactataaataagatacttccggtgaggatacagggcagaagagagcctgtttccagttgtggaataagagtttgcaggactccggtgtagtaagatcttaaccagactacaccaatgacggcgaggagcagtaccagtaaattcaagcctacggtcaatacatgatagggcaatgcgactttagaaggactgtaacctattaatagcaggttttctaactttgccgtattcttctgaagcagcaagaatacacttaacatcaggatataaaaagacaagatactgataaatagtcctactcccgaaacaatgcctgtgatgaggcggaggaaataggttgtttttccggcatccagattgtctccttcggtttcatagttcttttgttggaagtagtcggtgatggctgtatctgtgggattcttcacttccacgatgaggcgggagggttgcgcttcccgttcgggggcgaaattctgatttgcccactccataaaagattgaggcacaaggatggtattcaaccggttggagaaaccgacgatatttcctttgtattgttctacacgtccgttgccacgcatgttgatatccatttgtatcagtcccatcacaccttccgataatttcggcaagttgcggctttgcgcaaaaccaaagttgtaaaggttcagataattgcggggaatgatgataggtatggtttgtgtaccttcatcaaagtgccacttgtccaggctgacatcgacaaaagcatcgggaacagattcaaaaaacatatccgtagaaatacggataccggcctgttgcattcccaaccctgccgacactttgaaaagggtaggtgtgaaggcgcctacgctgcgtgtaaaaggttgtgcttccagctccttgatttcatctttggaaaaagtattgctttgtccggtaatgctgccaagagtgctaatctttttggtagcgatgatataatccttcttcatgaaactgtctccctgcgtgaagacgggaagaacatccttataaaattgcacgctcaacagtacaatcagcataccgaagatgttggcgagaaaaaagccacttaattgtccgatgctgatgtgctggcgaagaagtttccaaacaagcttgttcattgaaattatcatttatagtttcatcactttattatattctaattctatatgttttccaatggaagtaacaattattcctgcgccttgccgttcggcttcttcggtcagcatgcgtcccataagtgtgccgttatcatcatccaggtggctgataggttcatccagaaagatgaaatcgaacggttggcagagggcacggatgaaggctacacgttgctgttgtccgaaagataactttccggctttctcgtttactttctcagcgataccgagtgtttcaaaaagtgcaaggatttcttttttcttcttataattggtgagtcggttcttcaattgaacgttttccaaagccgtcagctccgggaaaatgcgcagctcctggaacagcatgctcagcgaatgttttcgcagttctacccactcatgaatggagagcgagcggatattgcgttcatcaaagttgataataccttggtaatcgcggcgatatccatagatatagctgcacagagaagatttacctgtgccggaagcagcttctatcagataacgctctccttttcgtagcacaaggtcttgatgccacacgtcggatgtgatggcatcccggtcggcaaacacttggggaagtgtttgcctcagatgaatgatttccattatttatcgggattagatgcctgcaaaccctttgatgaagtttacgatctgtttcaatgcatttacattcttgtctttcagctgaatgaccatgtctgcatcattattggaattgccggttgcttctacataagctatcttatcaaccagagcaaaagccgttgcatattgtgaaccaccgtattccgacagcattttcacaatcggcaaagcgagaaccgcttctgtattaataacgaaagcaccattcttacctttgatattagatgcaaattcggtatctttgattgaaggattaactgttttatctatgctcttgtacaacatttcgtcattcgtagcatacaagctattattgcggacaccaaagaatatattcagcattctggacttatatacatattcgttctcacccagtttcaggatatcttctccacgtttcaagcccagttcattcttcttttcatacagtaattgtacgggtgtcgcactctttacactggcgtacatcaggaaagtgggagcattgtccattgtgaagtttatcagtcccattgccatatctttctggaatgtgccgaacaactcttttacttcattggccttggcaatggagaagttcttttggaattgctcgttctccagtagcaggttatagaattcctctccgttgatacctgcgctgatatacatcagagtcgatttcgggaaatatttcaggaaagtattctctatggggcaggttgctttcttttgcttatcgaacaaggcttgcagttcaggactttcagtgaagttttcatatttcatgctgatcttacctttttcgaaagaaagacttcccaacatcttcagatccttcatgttaaaaggcatatcactttctttgatcatattggcgtaaggacctatcagacttgccggagagagcatagcatcgatatccccacccattttctgcattttcttgaaaacggcagttgaaacaatactgttttcattggtctgtttcagcagtgcaggaatatcttgcttgattttttcaagttgggtagtacctttgtaattagttagcataagtactgaaggagtgtatgccatgaatacctgattacccatttgcgtgaactgaaagccatctccacttgccaggggctgacaaactttctctttctctaatgtttccagcagcgcgtgcaggtcgtcctcgttgctgacttttgcaattacagtagtgggaaatgtctcagtattgaaaacgtataaaggtgccgatacgtcgattcccgatttcttcggatctttcataatcatttccacttgttggaatgttgcggcattcatgccactcttcatagcatccgtcagcttttgctgcgcttctttgttctccttgtcattgagccctgctttatcaaccaatgatttcatgttgatactgactaccgtagaggcattggcaggaataacattcgtatattcgaacttcttctcggaacatgcgctgacaagagctaccactacagccatcaacgccaaacggggaaacaaacttttcttcatacaattcttattaaaatgtgattatcattgattttgcaagttcagtgtatggcaagctaccagagcagccgtctctgtgcgtagcctcgacttacccagactgatgggagtaaagccgttttctatagccttttgtacttctttttcactgaaatccccttccggacctatcaataccagtgcatcttctcctttgcggaacacatctttcagcagcggcttttctccttcgtaacagtgcgcaatgaacttttgccctttgaagggctgtgtgatgaacttattgaaatccgtcatctcgttcagttgtggcaaacgtgctttgagggattgtttgatggcagataccaatatcttgctgatacgctctgttttgatgactttccgttcagagaaacgacagttcaggaaagtcagttcatcgaagcctatctcagtcgctttttctgcaaaccattctgtacggtccatattcttggtaggggccattgcaatgtgcagatgcccgttccataaaggttcctgataaatggtttccaggatgtttaccatgcaacgtttattggtggcggcactgatttctgcgcgatagaaattacctttaccgtccgtcagcgtaatctgatcaccgatattaaggcgcagtacgcggacacagtgctgggcttcttcttcgggaagttcggcacgggtttgtatgtcgggtgtatagaatacgtgcataagtttattactgttcttttcgtttggaaatttcatccctgatgtgggcggcgcgttcgtaattctcattggctatagcttcctgcaaagctttttgcagcatttccattgtatctccatggaagaattcatcttcgtgtggagaaggattctctcccataggagctatgcttcccgcttcgctttcctttccggttttaagttgttccgactccagaatttcttcgtagataaagatcggagctttcatccgtaaagccattgcgactgcatctgatgtacgggcgtccatacgaatgatagcatcgtctgctttcagatagatataagaatagaatacaccgttgtctaccctgtagataagggcacgcatcatgtttacccctaatacttccagacatgaagcgaaaaggttgtgggtcaacgggcgtggcggaacaatccctttcaggctgattaacatcgcttgtgcttctgccgcaccgatgataaccggtaattgacgggcaccgtccacttctcccaatacgagggcataagctcctgcctgttcctgactgttggagatgtttagtacttccagttctatttttttctttttatccataatctttttccgagtggcggcaactgccaaccacttgcttacttactttttatttactgcttcttccggccggtgcttgtacttgaacaccaaggcgaacaatataccgatgaccagtgcgtaagcagcaaaaataagccaaatctcaggccactcacgacttaccagtttgccgtcggcgtatactgagaaagcatctactacggcaccgctggcgtatcctccaataatggcgcccaaaccgttggtcatcataaagaataatccttgggcactggcgcggatattggaactggtttcttgttcaacaaacaacgaacccgaaatgttgaagaaatcgaatgccatgccataaacgatcatggataggattaacatccacaaaccggatcccggatctccaaagccgaacaatccgaaccggaatacccatgcaaacatactaatcagcattacctgcttgattccgaaatgtctcaggaagaaaggtatggcaagaataaacaatgtttcggacatttgtgagatggatagcaggataaccgaatgtttcacgccaaaggaatctgcgtattccggaatactggcaaaactacccaggaaaaggtcaccgtacgtattggtaatctgtaacgctgctcccagaagcatggaaaacaagaagaaaatagccattttctttcttttgaataatacaaatgcatctagccctaaagaagaaagcagtgatttgtttccggtcttggcaggtttacatgccggcagggtgaaagcatacaggcctagcattaatgcagatgcaccacctacataaagttgggcgcttgaattcttgaatccggtaaggtctactgcccacattgcacagataaacccaatggttccccatacgcgaatgggtgggaaatccttgatcagatcacacttatattgttcaagtgaattgtatgaaactgtattggccagtgataaagtaggcatatataccaataaattgagtaacattgcccaatacatctggtcatatcccgtagcggtagaggcatagaaaaggcatgcggctcctataatgtggcaaagtccgtataaacgttcagcattgaaccatttatcggcaatgataccaatgatgccgggcataattagagaggcaatgcccatggttgcgaagattgcgccgatttggcctccttcgaagtgtagttctctacccatgtaacctcctaatgaaattaaccatgacccccatacgaagaattgcaggaagttcatgataatcaaacgaacttttatactcatgacttttctaatttgtgtgttttcttttcacattaaataatagatgcaaatataatattttcgttgattgcgtgagcaagttaattaataaaaagcgcataaaagtgaagaaaggtgaagaatagatgatgaaaagcggaatggctaagaggtatataaaaaaagaaggctatctatcccagacagccaatctttattaaccttaaatctaataccatgaaaaacacagtgcaaatgtagaggttttatgttatacaacataacgttttactgatttttcttctttggtttaacatcttttagattatagggtagcttttgtcccatttatgagagagtaaagtgcatttttggcaaagatagtattagttaatcttctatcccttgcttacctttgcttcataaatcgagaaatgatgaaaaacagaatcttattgactgctgcgttatgtatgagcatgatggcacagattactgcacaaggttacacttctttgcgggagcaaatccagttagcgggagagtgggagagttctttaggtacctgtcgcctgcctggtacgacagatgaaaaccgactgagtgaaaggaaccgggatacgctggtgacgtatcagttaacacgtctctatccttatagtggtaaagtgatttatacccgtgaaataaatatccctgagagtttccggggtaagaaactgtttttgatgatggagcgtaccaaaccaagtactgtgtgggtagatggtgacagtatcggtagctatggtcatctgtatgcgcctcaccggtatgagctgcctgccctggcagtagggaagcatcagctgaaaatcaggatcgataactcaccggcttctgtccctaaagaaatacagggctctcatgcctggacagatgctacgcaaacgaattggaacggcattctgggagaattttatatcgaggcagttccggtttcttatatccagtcggtgcaggtatatccggaagtggataagaaacaagcattagttatagtggaagtcgatgcggacaaagacggaaaagcgatactggatgtcgatggatatgcctggaatacttctgaaacacataccttgtctccccagcaacttgccgtgcgattgaagaaaggacgaaatcggattgagcttcctgtgaatatgggtgataaaccattactgtggagtgaatttcatcccgcactttacaaactgaacattacgctccgtgccgggaaaaaacgggatagccgaatggtagatttcggtatgcgcaagtttgaagtggagggtacgcaatttgtgataaatggttataaaacttttttgcgtgggaaacatgatgcctgtgtttttcccctgaccggttacggtccgatggatgtagcgtcctggcaacgtgtattccgcgtggctaaacaatacggtattaatcattatcgctgtcattctttcactccaccgcgtgctgcgctggaggctgccgatatagaaggtatctattatcagattgagttgcctttgtgggggtatatcaagcgtgaaaatacggtcctgaacgattttctgaaaagggaaggggacatgttgctggaacactttgggaatcatccttcatttatgatgctgggtttgggtaatgaactggatgcggagatagatgtagtgcgtgaatggctcgatgatttccgtaatcaggataatcgtcatttgtattgcttcggttccaataataaccttggttggaaaggtccgcaggatggagaagatttctttgtgacctgccgtgtaggtggtggagacggatatacgactcatgtacgtgcttcctttgcgtacgtagatgctgagaagggtggcattttgaataatacgcgtccggctacggataaagactattccggtgccattgcgcactgtccccgtcctgtagtggggcatgaaaactgtcagtttcaaatctatcccgattacagtcagatagagaaatataccggggtgcttcatccttataatcttgagatttttcgtgatcgtttgaaagagaaccatctttcttctcaggcaaaaacttttcaccaggctaccggacacttttccattgaatgttacaaggcagatatggaatatgctttccgtactcccggttttggtggcttccagttgctcgatttgcaggattatcccggacaaggttccgcattagtggggattctggatgcttttatggatagtaaaggtatcgttgcccccgaaactttttatggtttctgtgcacctcttgttcctttggcattgatgaaggatcattgttggctgaatactcagccgcttcacatagatgttgctctttctaattatgtggaaggcgattggaatgagcctgttcgctggagtttagtatctgataatggggtatggaaacgtgatggagtactcatggcctccattcctcagggcaaagtaggaaaggcgggcagtattgatctttcactttccggactgaaagaagcccaacgcctgactctgacattgaccaccggtaagtatcgcaactattatcatctttgggtatatcctgatgaaactgccgagtcggaaggttctgttcatgtggcttctttcctgaacgatgatctgcgaaaaaggttggaaagcggagcgtccgttctgttgattcccgatcatgatagtatcgtagcacagagtgttggaggaatgtttacccctgattactggaattactctatgtttaagactatttcggaaaatgccggaaaagaagtttctcccggtacactttccatattgactgatcccggacatccgttattgaaatactttccgactgaatgtcacagtgattggcaatggtggagtattacccgtaattcccgtcccatgatactgaatgcaacccgtggtgagtatcgtccgcttattcaggtggtcgataacattgagcgcaaccataaactgggactggtctttgaatttgctgtaggaaagggaaagctgttagtttgcatgatcgatctgcaagccattgcagggacacctgaaggcaatcagtttcgtacatccttgcttcggtatatgaagtctgatgcttttcaccctaccgaacagttggcctggaaagaactggacgcactcttccataccgatatcaatcaaagacagattattggggtgaagaatgagtcggattatacagtaggaggggaatagaacgaagagttctgaaaataaaatgttcgcaatttagtgaacattttgttttaaatctctatctttgcaacgaacaaactactgcttatgttagttacatttgataaagaatatctcaaggaactctatgtgtccggtaaatgtagtgataagaaacatcgttttcagccggatgtgataaaactatataaaaggtgtattgatacactgattgcatcgaagaatgctgaatccttatataagcacaactctttgaattatgagattttggtgggagacaaggaagggctttcttcaatacgggtaacttcaaaataccgcatagagtttactgtgagagttgtagcagatgctgaaacgatcataagtatatgtaatgttatagaattgtctaaccattataaataagtagagtatgactatgcttgcaaatgaactcactccgttttgccctacgcatcccggtgaaatattaaaagacgaagttgaataccggaagatttctcagcgcgccttggcacgccagatgggaatttcgtattcacaattgaatgaggtgctgaacggtaagcgcccggttaatacggaacttgctttgctttttgaagcagctttggggcttgatcctgaaatgttgctcaatatgcagacgcgatataatatgcaggtggcgcgtgccgatcagcgcacgcaagatcgctggaatgaagtacgtaagttgtgtgcatcgttcctttgatgcacacaactgtatctgttatcagaggttttattccacatacagcaccaaccctttcaggtattctccttcggggtggtaaatacttaccggatggtcagccggttgcgtcagttggtgcagaatacgcacactgcgacctgacattgcggcagccgtaaagaccgccgtgcggaagttttctttgctgacagcttgtgagcaggagaaggtgaatagaatgccgcccggtttgatcttttcgaaagctttcacattcagcttgcggtaaccttgcagcgcattgcgcagggcatcgcgatgtttggcaaatgcgggtggatccagaactatcaggtcgtactggtcgcccatacgatccaggtatttgaaagcatcttcggcaaaagcggcatggcgggtgtcaccggggaaattcagttctacattcttgttcgtgaggtcaatagccttggcggaactgtctacagaatgtaccagttcggcattaccacgcataccataaacagagaagccaccggtataacagaacatattcagcacagaacgtccgttagcatagcgttccagcagtgcgcggttctcgcgttgatccacgaagaagcccgtcttttgtcctttcagccagtcgatatggaattttaagccatattccattgccacattatctgtgctgccacctttcaggaagccattctcagggtagaggtcggctttgaaggggagagtcgtttctgatttataatagatattctctattttatcacccatcacttcactcagggcattggctatttccatgcggtcgaggtgcataccggcagagtgtgcttgcattacggccgtgcgggcataaatatcaatgatcaagccgggaaggttatctccctcgccatgtaccagtctgtaagtgttgttagtcggattttcagcaataccaatgctgcgacgcatctcataggcaatactgagtttgcgtttccaaaaatcagaatcaatagcttcatcctgatgaaaagaaagcacgcgcacggcgatgctgcctatttggaaatgtcccttggctatgaattccttcttggaagtgtagatttcaactacttcaccttcttcgggttcaccgtcgaaatgagcgatggcacctgaaaatacccaaggatggaaacgttttaatgactcttctttgccggatttgagatatactttgtacatgcgattagtgattagcgattatgggttagtgattaatgattcttggttggtaagcggttcatccggttccaattcatagtcaccggtaacttttaattcctgtaatcggttgtatatgttgaggcatgcccatgcatcggtggctgcatactgcttttgaggttcggtcagatgctcagcttcccagttggagagacgttgtgatttggatattttctcaccgaacaggataccatagattttttgcagactcttgtcctgtatgccgaacatacggacatattcttgcaactcgatgcaggaatgttgttcaaaaggagcgcgcttgtgcagcatcataaagtcgtcacgcagcgaaaggccgactttggtaactgacggactttccagcaatgaaataatcggaagcgtcaggccggtaaggttcaggcggaaaaggaagcagtcttcttcagaggatacttgcagtaaggctaccttatgtgattgccctttggtgaatgacgggcgggtttcgctgtcaattcccaacagagaatacttcttaagataagtcactgctttttccgcttcccagggggtttgtacaagatgtattcgtcccggaaagagtactttgggcatctctttgatatcttcctttttaatcgtttttttaataaccataatttaagtctttagtcgtgatggtgatgtccatgacagtggcaatcatcatcatcgcagtcatcttcttccggttcgtcttcttcagactggcggtattttacgtcgtgcaatgcgcgaagtgtgtttaccagggtttgcccccaatattctttaaactgttcctgacagatagccagggagtcgttcattgtttcgttcaatcccaactggaagacgaaaatgaaatctttgatggcctggtaaatatctgccaggtcttcggaaatattcttcttgatgggctggtcgctataaaccatatcttgtatgaacacgtccagatagtcatctttttcggcaagaatcccggcaaggttgatgcggagcacttcatacgtttcttccgttacgtagctttcaggagcgtcgtcgcctattatttctgtttcgggcaacatggctgccttgaggtagagcaacggaagtatctttaatgaggtatcgacaaatgtgtcacgtttcatcgtttccgcctgctccaggaatttgcagaattcagcagctacggtgacgaattccactacattacggtcgaatatcacttggctttcttttttcatatatactcggtttgaaacgcaaagatagtgtaaaccgagtgcagtagcaaatttatttgcattttactgaaatgccgtttcatttattattacgtgatattccgttccccggtttcttctccggctactgattccaagtttgcgaagtgcacgcccgaagtacgcgactttgctgatggctaatcggtctttggtctttttctggagaaaagaaagtatttccatcggtgtcatccacgttccttcgtcttctgtttgtgccgcctggaagtggcataggaagagttgttccaatggagtaggttgttcaaactcttgattgctctgcttcagaatggcttcgtcggtgtcgtccagccagtagcgttcaccttgcgaaatggcagtcatggcttgggcatagagttggcggtagttgatggtgacgttggtgttgatgggaccggttacttcgatacagatgaagcggcgactgccgctgggatcggtcagcaagtctttttgattgctggtgcctatgaaggaggcgtagcggcgtatctcctgaatggcggttccataaggtttccgcaggttggctacgggtttttgcaacagatgtttcaggaaaccttgctggctgacgctgatctggtcgaactcgtcgatgttgatcagaaagaaacgtcccaggcttcgttcggcatcctgtttgcttttgaagtcgatgctgtctgtgtagccgaaacgcagttccggtggtaaaagaatgcggcaaaacgtggattttcgatacccttgggcgcctaccagtaggggcgatgtactgttgccatgctgccggtcaagtccacgccaatgagccgtcatactgagaaaccagcggtagaacaattcccgccaatgcggattttcgcagggaacgaggtcggccagggcacggatgcggtcttttccgtcccagcgcccggtgtcgttgaggtattcttctaccggattatggagggggatatagtcggaagtaaggtagcgtgctatgtcgcggtcccatacccggataccttcttttagggcattgagcgctatgctgcttcgtatccgctggtcggcggggcggaattggaagtgtatggagtcgcgctggcggtattccagctcgcccaacacggtgttgtagcggaattcgtagcggcggttcatgaactcttccaggcggaaggctgtgtcctgttcggcggtcatgctgttgcgggtgccgaaacctttacattcacggtaaatattatgtatggcggcacgtattacgggctcgtccgcttcgcgataataatgcatcagggtttgccggactacctcttcctcggggatgcctgctttgtaacagtgctcggcaagtcgtgtcagcaacgggcgtaggtcgtcaccccgcttccagtttgtcagtccgtcgaatgaacggtttagtgccgcttcaaagagcatggaaaaggtgtccgatgaactataaccgggctgcatacgcaataggggattggtttccgcttgcttttgttccttgaaggtggtttcgccgggtatggcaaagggctgttccaggcagaaggtggtggcggcagggttgtagtaaggttgctcgtccagcgtcatgcggcaactttggttgagcgacggttccttcagggtgatggagtagggcaacagaggttggtaacagttcactgcgaggcggtaggcgtgggcatgaaacagggccatttcactttcgcgcttgggcagtgagccgtcgggcagggcgaagagtacccatattttgacgctacgtccgctgcttccgcagaaggcggcaaaagtctggggtaatagggagacttgctgttttatttgttccacttcggtgctacctgtcaggtggttgacttcaatctgcaccagtccgttgtaaatcttcacccgatgttctccgtctttggtacgggcatattccacggcggggtagatgcgaggcaacttgtctatgttctggtagtgattattggttccttgcagtatggggatgagatggcgcagggctgatacatgcgctgctttgttctctttctttatttttgctatcaagttttcagcttcaagggtactgaaagattctttactggtttcacggtcggtgcgtataagggttagtttcatcgtggttatttttagttactgttttcaaaagacggcgcaagttacggcaaaaagccggggacacaaagtctttctttattttttatgtctcttacaaaaatacggtttcttttttatctgcaaactacttctctccatttatattcttccatcttcatccttcgcttcattcattaaatacaaggatgcagaagtacagaaaaatagatgagtataaacgcagaaaacttagtttctttgtatacaaacctgtagtattaaatattctctagctctttctttattaaaacatcaccctttccttgcttttgcattgctttttctttatctttgcatttgatattttggcttgtccacagctgtgaatcgcgtgcttcacagtcgtgaagcagcaacaccacagttgtgaagcacaagattcacagctgtggacaagccaaaacattgcttgccaatgaaataaacataggcagttagcgaaataaacataagagattaacataagcaatccctgctctgaatatcactgaaagcggggaatgcaataacaaaagaacaatggcgatattatttgattggtacgagaatccaaaaaacaaagagcgtcagaacgaagaactgaccctgcacccgcgcatccggctgaacggctctaccgacaccgccgcgttgcgaaggttcatacaagaatattgttcgctgaccgaaacggatgttttggccgtgctcgatgccctgtcgcactttatgggacgggaattgggtgaaggacgccaggtgcacctggatggcatcggctattttcgccctacgctgacctgcactgaaccggtgaaggtggataccaaacggaaaagcaccaaggtaaagctgaaaagcatcacctttcgtcccgacatggcactgcgaagtgaggtaggcaacattaaagtcctgccgctgaaacaacggaatgtgttgcaaaagccactgactccggaagaaattgacaaacggctggagaaattcttcactacgcacgactttatgacgaaaggcgacttctattctctcaccggaatgacgagaactacagccacccggcatattaggcgtctttgtgatgaaggaaaactggaaaataaagggttgcagaaacaaccgatttatgtgcagaaaaaggcgtaataggaagattattagcggaatatgcgtgtttgtatggagtgtaggcaaattgcttgcactttatttatatttgctgccaccaccgctgtgttgccgatgaatagggagatgcgaagcatgagtgcaagcgtgcaagtaaaagtgcatataaactttttgtacgctgcatctggctgatgcctctctccattcagagaatctttagaagactaaggttataaagagagcaatatttttattacttttgcaccaatctatcattcatttactaaggaattctatttcatggctaagaaaaattctacaaaagatacagaacaatccctttccctgtttggtaaaataagggcgatcttcaaaaatgaaaccattcactttgttattggcttggtactggtcattttctctgtgtacttgctactggccttttcttcgtttttctttacgggagcggcggatcaaagtatcattgattcgggtaatgcacaggaattggcttctaccaataatggggtgaagaattatgccggttcgcgcggcgctcaattggcaagttatctgattaatgactgcttcggtatttcctctttcttcatccttgtattccttgcagtggcggggttgaaattgatgcgtgtacgggtggttcgcctctggaagtggtttatcggttgttcgttgttgttggtttggttctctgtcttcttcggctttgcctttgtggagcagtataaagactctttcctgtatctgggcggtatgcacggatataatgtcagcaactggttggtatcgcaggtaggtgttccgggcgtttggatgattctgttggtgactgctatctgcttccttatctacctcagcgcacgtacagttatctggttgcgcagattgttcagccttagcttcctgaagcgcaaacagaaagaggaagaagagaaaggagaaacaccggaagagtttacggactcctggacggcaaaaggaaagaaaaagccggtttctgttcctgatgtggcagatataaaagaagaagaggctcccgttgaaattcccgaacctataaaagaaccggaaaatgaaattacattggatttgggtggcgttacggaaacacagcctgccaaggtatcgggtgaagaagtgtctatgactattgaaacgcctgttcctgatcctgtacctcctttccacgaaaaagcggcggaacccgtattcgaaatagaagctactgaaaatgatgacgaatataaaggtccggaaaaggaaccctataatccccgtctcgatctggaaaactatcgttatcctactgtcgacctgatgaagcattatgataatgccgagcctactatcgacatggcggagcagaatgccaataaagataagattataaatacactgcgcagtttcggtattgaaatcagtacgataaaggcgacggtgggacctacggtgacgctgtatgaaattacccccgagcaaggggttcgtatttccaagattcgtggtttggaagatgatatcgctctcagcctttcggcattgggtattcgtatcattgcaccgattccgggaaaaggaacaatcggtattgaagtaccgaactccaatccgaagattgtttccggacagagtatcatcggtagcaagaagttccaggagtctacttatgacttgccggtagctttgggcaagacgattaccaatgaggttttcatggttgatttgtgcaagatgccgcatatgctggtggccggtgccaccggtcagggtaaatctgtcggactgaatgccatcatcacttctttgctttataagaagcatccggctgaactgaagtttgtgctggtagaccctaagaaagttgaattcagtatctattcggtgattgaacatcacttccttgccaaactgcccgatggggaagatgctatcattacggatgtaaccaaggtagtgcagacgctgaattctatctgtgtggaaatggatacccgttacgacttattaaaagccgcgcatgtgcgcaatattaaggagtataatgagaagtttattaatcgtcagctgaatcctgaaaagggacataagtttatgccttacattgtggtggtgattgacgagttcggtgacttgattatgacggcgggcaaagaggtagagctgcctattgcccgtatcgctcagttggcgcgtgcggtgggtatccacatgattatcgctacgcagcgtccgacaacgaatatcattaccggtacaatcaaggcgaacttcccggctcgtgttgctttccgtgtatctgccatgatagactcgcgtactattctcgaccgtcccggagctaatcagctgatcggacgtggtgatatgttgttcctgcaaggggcagatcctgtacgtgtgcaatgtgcctttatcgatacaccggaggtagcggagattactaagtttattgccaagcaacaagggtatcctaccgcattctatttgccggagtatgtaggtgaagatggtggcggaaacgatttgggagatgtggatatgggacgtctggatccattgttcgaagatgctgcccgcctgattgtcatccatcagcaaggttctacatcgttgatccaacgcaagttcgctatcggttataaccgtgccgggcgattgatggaccaattggaaaaagccggtattgtgggacctgcacaaggcagcaaagcgcgcgaggtgctttgtgtcgatgacaatgacctgcaaatgcgcctgaacaatttactataaatcgtgttaaactaatgatgaagaatcttctttttgtttatatctgcctgttcggtctggcattaccgctttcggcacagaaactggatgcccaagatatattggaccgtacagctactaccttccgtcaggcgggaggtattcaagcggattttacggttcagacgtatgcgaaaggtgttttgcaggggagttctgtcgggactatccgtctgaaaggagaaaagttcctgttggatgccgacggggtgaaaacctggtttgatggtcgtacgcaatggagctatctcactaacagtgacgaagtgaacgtttccgaacctactcctgaagagttgcaaagtatcaatccttatgccctgctgtctatttacaagcaagggtatcacatgaaattgggcaaaactgatgtttatggcggtaaacctgcttatgaggtgatattaactgcttctgatagaaagaaggatttgcagtgcgttattatttatgtaacgaaagatacctttcagcctttatgtatcagcatgacgcaaaagggtggaaatagcgtggctattcgtattacatcttataaagcgggagaatcatacaacgatcatcttttcacttttgacaagaaggcgtatccgactgctgaagtgattgatctgagatagataataactaaatatataaataacgattatggaaacagaaaaagtaaaatgtctgattataggttctggtcctgccggttatactgctgctatttatgcaggtcgtgccaacctttctccggtactttatgaaggattacagccgggtggtcagttgacaacaactacagatgtggagaactttcccggttatccggagggtgtcagtggccagcaattgatggatgatttacgcaaacaggcagagcgtttcggtgcagacctgcgttttggtattgcaaccgcttctgacttgagtgcggctccatacaaagtaacgattgacgaagagaaggtgattgaaactgatacgttgataattgctacgggcgctacagccaaatatttgggattggatgatgaaaagaaatatgccggtatgggcgtcagtgcttgcgctacttgtgatggtttcttctatcgcaagaaggtggtagcagtggtcggtggtggtgatacggcttgtgaagaagctgtttacctggccggactggctaagaaggtttatctgattgtgcggaagcctttcctgcgtgcttccaaaatcatgcaggagcgtgtgatgaagcatgagaatatagatgtgctatttgagcacaatgccgtgggcttgttcggggagaatggtgtggaaggtgttcatctggtgaagcgtatgggtgaatcggatgaagaacgctacgacctggctattgatggtttcttcctggctatcggtcatcaaccgaactcagatatcttcaaaccctatctggatacagacgagactggttatatcattacagaaggcgacagtcctcgtacgaaagtaccgggtgtgtttgccgccggtgacattgccgatccgcattatcgtcaggctattacggcagcaggaagcggctgtaaggcagcacttgaagcggaaaggtatctttcatccaagtgcttgatttaaaattgtgagtaaaagagtataaaaagaaaactccggattgtgaatcgtaatccggagttttctttttattattaatgtgaatccggagttgaatttgcctcatattgttatagtaatgaactaatgctgataatgatttaggcgcggattacgcggattacacggattcttttcctgtaatatagtgtgatagcgcagccatta

SEQ ID NO: 6285 - DNA, 2065 bp, Unknown
  gut microbiota DNA sequence
tactttcatatcttaattttatttatatctaaatacaattcttcctttcgataaatcgtaaggagacatttcgactcttactttatcccccggcaggattttaatgtaatgcattcgcatcttaccggaaatatgtgcagtaatctcatgtccgttttctaattcaacacgaaacattgcattagacaatgcttcaacaataactccatcttgttctattgcagattgcttagccatattatttttttaaattgctttatctcctaatacttcttctatgaactcaaacgatgataagatatcagctttgccagctccaacagccactgtatgctcaaaatgagctgcatacttccaatctttagttctcaccgtccaaccatcacgctccattactatttggcgactcccttgcgtaatcattggttcaatagcaatacaaagacctttctttaacatagttccataaccacgttttccataattagggacctgagggtcttcgtgcatttctttacctataccatgaccaacaaactcacgcactacaccgaatgaattggactcacaatgttcttgtattgcatatccgatatcacccaaccgttttccttgaacggcattttctattccgatgtataatgcctctttagtaaccttcagtaatttgcgaacttcctcatctacttcccctacacaaaatgtataggcagaatcaccacaaaacccattcatataagtaccacaatcaaccgatacaatatcaccttcttttagtactatatctccaggaatgccatgtaccacctgttcatttatcgatgtacacaacgaagctggaaatggatcaccatattgatttggaaaacctttgaaagtaggaacagcaccatgatctctgataaactcttccgctactttatccagttcctttgtagtaactcccggctttaccagttttgcaacttcagccaatgtcctcccgacaagcaaattactctcacggagcagctctatttcatcttccgttttaagaaatatcatcttataaaaagattaatatgcagctacattactacgccctttaatacgaccagatttcaacagaccgtcataatgtctcatcaacaagtgactttcaatctgctggagtgtatcaagaaccacacctacaagaattaacaaagatgtaccgccgaagaattgagcaaattcagctttcacaccaaaaataccggcaaacgctggcataatagctaccaaagccaagaagaaagagccaggcaatgttatacgagacataatatcatcgatatattcggctgtcttctttcccggcttgatacccggaatgaaaccattattcctcttcatatcctcagccatctgagttgggttaatcgtaattgcagtataaaaatacgtaaacagtataatcattattgcaaatacgaaattataccagaagcttgtatgatcagtaaatgcacgtacaaaaccgctcacatgatctacatttgaaaaaccaataaaggtgatagggataaacataattgcctgagcaaagatgataggcattacaccagctgcattcactttcaaaggaatgtattgtcttgcaccaccatattgtttgttacctacaattcttttagcatattgtacaggaatttttcttgtaccttgcaccaacaaaattgcagcagcaattaccagcaacaggaatacgatttcaattaagaacataaccaaaccacctgtcttatcagtcatacgggaaattaattcctggaataaagactgaggcaaacgggcaataataccgattaagatgataaatgaaataccattaccgatacccttatcagtgattctctcaccaagccacaaaataaacatactaccagctgccaagataatggtagaggtaatcatgaacagagtccaatctaatgaagcatttaaggaaggaccggcctgcattttaagattgagcaaataagaaggagcctgaaccaacaaaataataatcgtcaaataacgagtatactggttcatttttctt

SEQ ID NO: 6286 - DNA, 738 bp, Unknown
  gut microbiota DNA sequence
cagtgtggggattgtgccagctttatggattttctgtttccggtcattcacgttatgcacttacaggttctttttttaatcccggtccgtatgcgggctatctgtcaatggttttgcctgtgtgtcttcatttgtatttgcgcatttgtggctggaaaggaatgcctgttcgttataaaatagaaaaaggtgcggctgctgtggcgggtatgcttattctttgcgtattgccttccactatgagccgctccgcctggatagctgcggcaataagctgtatctgggtggcatatatgcatcgtgacaaacggaagtggaatatattgtggcgtcgctataaaaagcgttatatattgtggggaaccgggatatttttaattctgtcgttggctgctgcgggagtgttctttttaaaacccgattcagcattggggcgtctgtttatgtggaagatgacttgccgggccatcgctgctcatccgtggggatgtcataccggattcgcttgtgcttatggtggggctcagagtttatattttgcctcagggaactatgctgcttgggaagaacgtgtggcaggaagtcctgaatatgcatttaatgagtatctggagtttgctttgacgtatggtattgttatgtgtatattggcgctgtttgtaatctttgcttgtctttggataggagtgagactccgtcgctatggtgtctgtggtgcccttatctccttgcttgtat

SEQ ID NO: 6287 - DNA, 576 bp, Unknown
  gut microbiota DNA sequence
tgcttgtgcttatggtggggctcagagtttatattttgcctcagggaactatgctgcttgggaaggacgtgtggcaggaagtcctgaatatgcatttaatgagtatctggagtttgccttggcgtatggtattgttatgtgtatattggcgctgtttgtaatctttggttgtctttggataggagtgagactccgtcgctatggtgtctgtggtgcccttatctccttgcttgtattttctttttcttcctatccgctgcatcttccggctttcattgtcgctggtatatgtttgcttcttgcctgtgggataggtgatgtaattggtaagtatcttattctgtgtgtttgtctggtggtgtggctcggaggctatacggaaaaatggacgcaagaaaaagacgcttgccgggactggatgaatgcgagaatactctatcgctcgggggcttacgaagctgccaacagggcttatgaaaagctttatccgtttttgaggaataaaggcacattcttgtttgaatatggacatagcttgcacaaatccggtcgttatgacgaatcttttgagtgttt

SEQ ID NO: 6288 - DNA, 60311 bp, Unknown
  gut microbiota DNA sequence
attcgggggcttacgaagctgccaacagggcttatgaaaagctttatccgtctttgaggaataaaggaacattcttgtttgaatatggacatagcttgcacaaatccggtcgttatgacgaatcttttgagtgtttggatcgggcacggttgtatagtaatgatccgatgatattgaatattatgggtaaaaattgccaggcgttgcatgaatataaatgtgccgaggctttttttcttatttctgtcagtcgcctgccgggcagaatctatccttactatctactggctaaactctattctgaaccgaattatcgggataaagacaagtttgaggatatgaaatggaatgtgctgaaccggacgcccaaggttcattccacggccattgaggagatgcgtcaagaagtggaggagatggcgaaaaattggaatacggattatatggaacattaaaagaacgagaaatagaatatggaaacttatcatgataactggaatgcttgtttgttattccgcaataagcaactgactaaacaactgaaagagtaccagaatgcttcggtactggctgaatgttcttcttccttacttgtgtctttgggacagttgcttcgccttcatcagaacccctcctatggcataatccgggaggaaactgaatggacgaatctgttcactgttattgatatgttttatggcggttgcctgtcagagcagttatcttcatacgggttgagtatgcaggagttaaaggtatgctatctgattcgtgcacggttaggaaataaggctattgcagttctttttaatattactccctgttcagtgttgaaggcaaagcaacgtataaaagggaaattgactttatcggctgcggattgtttggataagtatattcaaattgggtagtcggaatgctttattacagattttcatctgtaatttccgaaaaaggaataaatttgccccggattaatttttcttatcttatgctatgatgaatacaaaagtaaaattattactgaccataatatggtgtcatctgcttcctgtactgtctgcacaagagatgatcaacgtacgacattattcaatagaagatggcttgtcacaaaatattgtgcaggatatgcttcaggataatgatgggtacatttggttggctacatggaatggactggaaaagtttgacggatatacttttaagaattataaatcgtatcctacagatgatactaaactaaaatacaatagattagtaagcattgtcaaaggagccgatgatgctttgtggtgtcatacatacgatgataaggtctatctatttgatgtgcgccaggaaaaattcaatgatatttttgtttatcatccacagatagaggaatgcaagttggtagagaaaatgattccattgacaaatgggattatgtggataatagcttctgacggtaatttgtggcgtattgatgaagccctgtataaaaaagataaaggggttatgttccttccttccggttctgttccgcaacatggtaaccgtgtttattcagttgtacgtgatgctcatgataatgaatgggtattgactgataagggatgctttgtctatggaaaacgggaattatcggacagccggaattttaataatgcaatatgtatcgatcatatcctttatatgtcttctccggatggagaactggtgacgtatacaccggaagaaggaataaaagaggtatctataaaagaaactgattacggtatcatagacttgttggaactacccaatgcgaaaatgggtattatgactaatcggggtataatcatctacgatactcaaaacaaccatgcagaaagcattttggtgaatgagaatcatcctgatatacaaccatcttatcatttgctttcaaacaatggcatactgtggatgattaacggaaaggaaaatgttatccggtgtgatttaaagcagaaaagcattagctttataaattatcctttgagccaaaaggaaaaagcgaatatttttatccatgaggataattacggacgtatatggatattggctccaaatggcgaattttcattttacaatcctataacaaatgtttttgagcaaggctatacgtacataaatggagaacatacatattatcatgcaaccgggaggaaatttctgatagataatcagcaaaatatatggttaagctgtgattccggtgtcgatcagctgaccttcttaaatgaaagttacagctacttctctacagggcacaatgataagatacgcgggctgtttgttgattccaaacagagaatatgggtggctgataaaagtgaaagaatagaaatctacaatgataatcatgattattgcggtaatcttagccgggatgggcatttggtaaaagacaagcaacttgtttttggtgcggatatctattgcttttttgaggatgagcagcacaggatatggatggggagcaggacaggaggaatctatgtagcagttccggaagcgggaaagttccggatttatcatttcaagcataatgagaaagataaaaattcattgagttctgatgctattttctctatttgtcaggatacaaaaggaaatatttgggttggaacgtatgggggaggactgaatgtagtggaggggagctttcccaatctgaaatttacgcattaccaaaatgggctggaactctatcccaagaacaaatatctaagggtgcgaagtctgctttgtacctcagcaggaattatgctggcaggaaccactgatgggctgctgactttttcaacaaatgcggatcaatgggaaaaaatacagtttaatctgaatcaatgcgaaacaaaacgtgccaatagtcttagtaataatgatgtagtatatgtatttgaaagtcgcaaaggagatatttatgtggttactcatagcagtggactaaatctggttagttctaaagatcttctatgtgatcatatagaatttattcatttgaataaattaaacggcttgccttccgatctggcttatgcaattttagaaggaaaggataatgagttgtggattaattttgagaatcatatctgtaaatataatccggttgagaatactatagatacttatgatcgcttttatttccattctcacctggccgtgtccgaagtaccattcatcagggataaaaacaatggtatgtatgtagccttgaatagggaagttttatacttgaatttggataaacttaaaaaaagccagtttgctccacatattgttttcacagatgtgaggacccgaaagaattataaacaggaaagatcttctcctgttatcaatcgggaattaacgctggaaaaggatgagcgtaatgtctcaattacttttgctgctttggattttacaggttcggggcatttacaatatgcttatcggctgaaaaatatagatgaagaatggaactatataggaaatagccgtacggcaagtttggtgaatctgccggcgggagactttattttagaagtgaaatcaacgaatggagatgggctttgggtggaaaatacggcacagctggctattcatgtgaaacctatcttctgggagacaggctgggcatggctgttatatatagtgttaatagtagtggtaattctggctatctcggctacttttgcttacatatttaatttgagacggaaagtggactttgaacagcaacttaccaacttgaaacttcgcttctttactgacatatctcatgaattacgcactcctctaactttaattgcaagccctatagaagagattattaatcgggaggaattaagtgaggagggacaggaaaacatacagcttgcaaagaagaacactgatcgtatgttgcgtcttattaatcaattgcttgatttcaggaagatacagaacaacaaaatgaagttgtatattgagcaggcggacgtcgtaacactgtctaaaaaaatctatgataactttacgggcttggctcatcagcggaatatcggtttccattttgtttgttcttatgataattatactctttacacagatatagataaactggaaaaaatattgtttaatctactgtcaaatgcctttaaatatactccggatgggaagaatattgatttgattcttgaatttaaagaaaagaacctgctcataaaggttaaagatgagggaaatggaattgaactgcataaaatagatatgttatttaaacgtttcgagaccttgggacagacagacgctaacttatcaagcggtatcgggctttctttggtgaaagaatgggttgatatgctgcatgggacgattacggtagatagtaaactggggtatggaagtactttctctatttccctgccgggaggacatgagatttttgagtccgataaaaatgtcgagttcattttaagtgattccgaatcttcaatgccgatggattccggcataacgcaaaataatgaagaagcagaagggatatcggttttagtagtggaagataatgaggaactgagacattttatggtgaatatacttcggaaagattatcatgtgattgaagcagaaaatgggaaaacagggctggagaaaatcaagtcgaaaattccggatttggttattagtgatattatgatgccttgtctggatggtatagaattactggaagaagtaaagaaggactataatgtaagccatattccttttgttttgttatcagcgaaagctacgttggatgaccgtataaaggggctggaatatggggcggatgattatataacaaagccattcagttccgggtatttacgtgcgcgcatctcctcattgttaaagcaacgcagcatattgcgtgaacattttatgaaagaagtattacctgttgccgggaaagagcctgttgctattcagggtgatgctttggagaacttatctccgtcggtaccgcaaataacttcttatgatgaagaattcattcataaaatcattcaggctgtggaagaaaggctgcaagattctgatttcaaaattgaagacttggctgatagtatgaatattggacgttctgttttctataagaaggtaaaatctattttgggggtatctcccattgagcttgtaaaagatatgagaataaagagagctatacaattattggaaacaggaaattacaatatatcccaaatagcatacatgagtggtttctcttcttctcaatattttagtcgggtattcaaagagttgaaaaattgtactccgagtgaatataagataaagaactaaaataaatagtgcacagaatcacataaataatgcacaggtgtctgttctacctgcgctacctttgcccacaaagcaatacgagcttagtgggcattttttttataacaatattttaaatgaaagtactatgagaatattttttctttgctgtgtagctgttttttcttttttaagctgtaaaacagaaatcaatgatgttggtaatgttccggaacggggatttcatagcaatcgtccggctaatatttgggaagaatcgttggttaccggaaacggtgtgatgggagctatggtaatgggagacccatacagggaatctattgttcttaaccatgctttgctttatttgcctattcattctccgagaaagcctgtcagccagggaaagaacctggagaagattcagcaaatgatgctggatggtaaatatacggaggcttctaagtttattgtagacttggctaattccgagggataccaaggtaaacacgcaacagatcttttcgttccggcatttcaattcaacatttcaagtgatacttcttctgtgaaggagtataataggactgtggattttactacgggcgaagtagaggttaaatgggaggataataatggaatctattcgcgtaaactatttatttccagagcggacaatgtggttgccctacggttatcttcaaaaaaaggctctatccatacaacattgaatctttcacagataatgaggcatgatgcaggacgtaagaagaaatttacattaagtgagaagaactgcattgataaagttgaatccggtgtaatggaaaacggactttattttaaagcatggtacgaaaggccttgggaatttgaatccagaaaaagctttaagggatatgaaggggtagtgaaagtcgtgaacatggacggtgatatagagatgaactcggatcaaatagtcataaatggtgctacggatgtgctgatattagctcgtgttgaaccttctgacaatatggaaatatcgaaagtacctgatatgatgaaagacctcagtttatatcctactaattatgcggaattactggatgcgcataaaaaaatccataaagaattatttgagcgtgtatcgattgatttgggtgtctctaaagaagaccgtatgaaatcttccgaagaactattggaagcaggtggttccaatccggctttaatagagaagattttcgatgctgcacgttataatgttatttgtgccacaggcattaatcctcctaatcttcaaggtatctggggagctactatgactcctccctggtccggtgactatacgactaatggaaatctgccggttgtcatttcccattatttgcaggctaatactccggagctgatgttgccactgtttgacaggctggaagcatatatggaagattttaaggtgaatgcacgtgagctttataactgccgtggtattcatgttccgtcacgttttagttcacatggcttaaataatcattttgatgctacctggccgatgactttctgggtgaccggagcggcatggtactcactcttctattatgactattatatgtataccctggacaaagagtttttgcagaaacgggcacttccattcatggaacaggccgccttgttttatgaagactttctgaaagaaggggctgatgggaagtatgtttttaatccttcatattctcctgaaaatcatccggcaaatcatcccagccaggcttgtataaatgccacgatggatgtgatggcagctaatgctttgttgcgctcagttatagaagccagtcaggttttgggcgtcaatcaggataaaattccggtatgggagtctatgcaggccaaaatgccttcttatatgctgaatgagaatggagaaatcagagaatggatgtggaaggacttgcaggacaatcataaacatcgccatgcttctcacttattcggactgtatgattttcatgatccccttattatgaaagataaggatttgctagaaggatgtaagcgggccgttaatcgtaggatggaaatacgccggcaagacaatggtggaatcatggcgttcggtatgattcaactggctttctctgcgtgtgctttaggtgaatccgagacggcttatgatatgctgacctggttgggaaacagttattggaataataatatggtttcaacccacgatcctaaaaagacattcaatctggacatctgtggaggatacccgtctttagtgatgaaaatgttggtttactcggaaccgggtctgatatcccttttaccatgtaagcctcagcaatggcgcagtgggcatataaacggagtagccttgagaggtggaattatagtgcaagagctgtcatggaatgaaaaggaagtgaaagtcactttattatctaaaatagatcagaacgtaaaaattcaattgcgggaagcggaaatgcaggaaatagtgttaaaagcagatactcctgctaccttcaactttgcatatgaatagaaaaacaaataccttatttactaattttaaaagcacttttttatgaatcagaatgtatttattcgaagggcatgtatgtctttgatgtttagcatgctttgcttgttgtctctggctcagacacatcaagtttccggtattgtaaaagatgttaccggagagccggtgattggagtcaatgtatctgtgcaaggaaccggtaacggttctattacggatttggatggtaaatttgcaattccgaatgtgaaggagaaagatgttttaattgtctcttacatcggttatctgactcagtctataccggttggaaaacagacttcatttactattacgttgaaagaagatgcacaggctttggatgaagttgttgttgtaggctatggtgtacagaaaaagagggacttgtcgggtgctgtgtcttccgtaaagtcacgggatatcacagctataccgacaaccaatgctttggaagctttacagggaaaagttgcaggattggacctgacttcttcttcaggtaaggcaggagctgagctgagtttcactattcgtggagagagatcattaaaagccagcaataaacctctgatattggtggatggagtagattatggtacgactctggatattaatccttcggatatcgaatctattgaagtcttaaaagatgcatcttcaaccgccatttacggaacacgtggtgcaaatggtattatcatcgtgactactaagaaaggaaaaacaggaaaatcaaaagtttctctgaatgcttttgcttctgttaatatgatttcttcttatccatctatcatgaatggagctgaatatgcacagttaaaacgtgaagcataccgtgaccagacaactaatgaatatttaccggatgatcaggtctttacagtggcgcaggaattggaatatgttagagaaggagtgtctactgactatcgtgacttaatgatgagcaatggtttcaatcagaattatgaactatccatatcgggaggtacagacaagacacaacataatatctccttgggatatagaggtgagaatgggcttttcaaaaatgataattataaacgattgaatgccagggtagcattggatcatgaattactgaaaaccctgaagataggtacaagcattacgtatacttataaggatcaaaacacacgtcgtgatccgttgaatatgtgtaataagattgttccattatcaaaaccttatgatgaaaatggagaagtggtaagattcccggcaccgggatacaattctcagaccaatccattggtggatgatgtggagggggcaataaaggataacacgaaaggcacccgtttctttggcagcttgtatgcgaactggaatatcacaaaagatcttcttttcagaacaacattaggggttgatgctcagaattcaagaagagggtattattgctcggcaaactctttggacggagaaggcaaagacagtaaatcattgaaagaacatactattcaatcgggtattacctgggaaaacatcctgacctattcgaagatattgggagagcatgattttcagataatgggtggtaccagtacgatttataagagtaaagaatatacattggcttcaggtaaagggcagacttatggaggcaatatctatcataatctggcatcaaacaccaaagaagttatgattgacagttatttacaagaagagaatttggcttctttcttcggacgtgtaaattataagtttatggaccgttatattcttacagcttctttacgtgcagacggctcttcactacttgccagtggacataagtggggatattttccatctgtagcattagcgtggagaatgaatgaagaagcttttctgaagaacattgataatttatccaacttgaaacttcgtttaagctggggagaatccggtcaatcggccattgatccttatcaaacgataggtcttttgggctcttctacttattcattcaataatgagctggccagtggtctgtatcctaagactatgtcgaataagaatctgacgtgggaaacaacttctgtattcgatttgggagtggatttcggactcttcaataatcgtctgtcaggttctctggacatttataaatcatatacgaggaatgttcttatgaatcgcaagatcccatcaactaatggttactctgatgtgatggaaaatattggtaagacggaaaactttggtattgatataacgctaaactcagtaaatatacaaaagaagaattttacctggaccacagattttacgctttctcataacaaagagaaaataaaagaactggcatcgggagcactgagagatgaggctaactcgtggtttgtgggtgaagcgtttcaggtgttttacgattataagaaaattggtatctggcaattagatgaagcggaagaagctgctaagaacgggcagattcctggtgacataaagatacaggatacgaatgatgacggggaaattactcccgaagaccgtgttatttacagtaaacgtccgaaagtgacttttggtatcaataatgcttttaccattcatgattttgaattttcgtttttcatttacagccgtttaggtcagtggatcgattatgaatttaatagaggatataaaccagacggattggaaaacagttcgaatgtagactactggactcctgaaaatcccacaaacgattttccacgtcctaaccgtttttacggattcggaaaaaccagatattcttcaaccttgaaatatgaaaaaggctcgtttgtgaaaatcagagatataactttagcttataatcttccagcaaaagcactgaagaatataggactggaccgcgtacgcatttatgcaacagctaaaaacttcttcactttcagtagtattgagaattatgatccggaacgtggaggaggtatttcattccctatgaccaagcaacttgtgtttggtgtcaatttggatttttgataaacgattcagtatttaaaggaataacattatgaaaaaaagtatattattagtagcatcgttgatgctgtttctgggaagtggttgtgatagtttcttagatgaaaccaattatagtgatgtaacttccgaagggggatattatgatacggaagaagggttgaatgccatcgtgaatgcatgttatacaccattgcgcttttgggcaggtaaagaagatgccattggattgagtgaaactggaacggatattatagcagcagcttccggatgtgtggataataatatggcggcatatacgcagtcgcttgatggtaccaattctgcatgtaccttttattttgaccgattctatgcagctataaactggtgcaataccgcaatctatcatgcggaaactgtacctaacccatcgaaagatgaaacattggctacaacattgaataagcgtgaggcggaagccagagtactgcgtgcattttattattggatattgactgaaacatttggagatacctattacatagatgtgccttcaagtagtatcgtaatgaatccggttaaaacatcggtaagtgatatttatcagcatatgtttagtgatctggactgggctattacaagtaaattatctactcagcagaatgacggtggtcgagttacggtatggactgccaaagcacttaaagccagactactgttaacgcgtgctagtgtaacgaaggatgcaaagatgtatgaacaggcttataatttggccaaagacgtgatagacaatggtccttttgagttggctaaagattttgcttctatctgggatatgaagaacagtgatggaaattccaataatgaagtaatatggtatgtcgattattcaacaaatcagctgtataattcggaattggatgataaaccggttatcagaaatggaggaaataatgcgcatctgcttttctgcatgaaatatgatgatcaaccgggtatgacacgttccatagagtatggacgtccatttaaccgttacatgccaacccgttatttgattgacttgtttgatgaggaaagagatcaacgttatggtggcagtttccgccatctatggatcatgaataatgagaaaggaaaaggtaagtacacggcaatggctgatacggctatttatataattaaaggggaagcaactgctgcgcaacgtgcttgggcggaaaaccgttaccagctgtttgacagaaatgatatttataatgcagatggttctactaaaaacatgaagcaatctttagagttatgtaagtttgcagaccctgcacgtgcttctaaagatgaagatagaagtacgcgggacggttttatgattcgtatcgctgaaatgtatctgattgtagcagaagctggggctcaaacggataaatctgatgctttggattatatgaataagttacgtatgacccgtgcagttgccggttatgaggaggatatgtgtgtcaacctgtcgcagattcaagatattgattttattttggatgaacgtgcgagagaattggcaggggaacaactgaggtggtttgatttaaagcgttttggtaaagagcagtttgtaaaaagaataaagaaatgtaatcctaatgcggctaatgttgatgaacaccattgggtacgtccatttccgcagacatttttggatgcaattgaaaataaaacagagttcactcagaatacaggttataaataattaagtattgttttatatgtacccggctatggaaaatgcttttttccatagccgttttttttgaaaaacagtcttcaaaatataaagaaaagacttgtacttcttgctctttctcttgtaaatataatgacatttatcctaccttttgggtatcttcctgaataaatactaaataaaagttctttggaaaagcaaattgacagaatagaatttgcaatttgtcatggtttctataaaatagccattatccaattgtaattttttatggcagtttatagagtggataaactgagtttttatatctttggacatcattaaaccacaatgaacaatggatgaaacattaaggaaacaaattgatgcttggacagaaactgacgagcatggtagaattgttgatatgttaggacagatttcgcctgaagaaagagattctgaagctacaggtttgctggcacgtgcatataacaacctgggtgaatatgaaaaagctttggagttacttgattccatcgaggaggaagaagccggagatactaattggaactttcggaaagggtatgcactttactttctcgacagatacaaggaagctttggcttgctttaagaaggcggacgaactgactccggaagatgaagatacgattgagttcatccgtagttgcaacagtcacctgcctttccggaagcgggtgaaggacttttggaagtggtttaccgataacgaggaggagctctcccggattgttgagaaccgcgggcagcttgacggtggtgatactgttgagtttgttaccgccggtacgaatttgatagatgaggatgtgcattttaatctgggtggagactatgaattcacattctccgtagagggcaatacacatttgttctatctctatccctacattgtgtcgcaaatgcctgcacaattcaaggataaatggcacttttttcctttcaatcaggggacggatgcaagtttctctttcggcatgtatggggcgaatgtagatatggctcaggtgcaggtatctgctgcttatcaggaagatatcaatgctttcaatatccatttctatgaagaacagttatgctctctggaagaagcacaaagctataatgcttattatatcatgatggagattatgctgggtgagggactttcttaccagtatattgccagtgtggagtgtgcagatgctccattggagaatatgataaagcttcctgaactcagagcctacattacagatacattaaaggctcatggtaaggagatatttgataatccgcagcaagtctataccagctatcgttttgagcctcaggagaacgaggaattacgttttgacgtcatggcaggcagctcctgcttccagcctttggtggccaattattataatggttccacagaactgttcgaccgtttgaatggatttggtgcgcaggctgtatttatcgctttcccctatgaaaataaggaagaaggtgatgggaagaaagtgctggatttccgttatgaactggaagaccgcctggcggcggaattgcttgaaccggaaggtttgggacttttattagggggagctatcggtaccggtacctgctatattgatcttcttttgtttgatgagtcggcatttatggaaaagattgttccatttctgaaagactatccccaatatcacttctatctttccgacttccgtcagggtagtgacttgtgcagactgtatgaaacggaggatgacgagtctgaggaataaaatgaatctataattataaatatatcacaaccatgagtataggtttcagattaacaacgaaatgcaaaagtatttcttcattccagaaattgttggatgtagttgctgcccggcacgaggcatctgtcagtcatacagaagattattctgaattatcagtctgccgtttaggaaatatattcttcaattatgaacaggaagaagatgatatagctgtcataggtgattgtcagactaacctgttgggagcaggttttcataaggctgcgatagatatcgttgacgagttggtagaactgagagacttctctactgaggtggaggacgatacggaatattatgagcacagggactttgagcggatgcgttccgaacatttctatcgttggttgaacgccatcgtagaactctgccgtgaacgtatgaaggagaattgcagcatgtctgccatttgttgggattgcaataagtacatgccccgtgggatagaaggaacggtggtatctcctttcggaagaatatgtccggagcacttagtcgaacggataaaagatgaaggtatcgagaggttggcaagcgaatttttcatgtggaataatgaagagcgtgatgcattattctatcggaatacggctttgagtgccttgtgggaagattgctattttatgccttccgcgcgtagcgaagaagatatggaaatcaattcgtttattatagaaaacttggagaaggctgccgcaatggatacgtctcttgctttcccgaaagaagactatctgttgctttgtcgtttggtggaaaaagagccggtagatgtttctgcattgccggatttcataagtgaatttccgattggttatcgcaaggacaaagtgacctatacattaggaaatctgaagtttgatcttccgggtaattacctttattttgaagaggatgattctcgcgggtattatgatggagaagacgagaattggcatgtagtgcggatgttggcgtattctatgcccgatgacgaagcggactatctggaagacgatgagaatgtgctgattgaagagaagttttttgaaaacggtaagtgcaggctttatgatctgggtggagaagaagacagtgatgaatatgtgtgccagtgccagattatcactgaacatcagttcaccctgtttactctttcgtgcgagggaaaggatgaagcaatgggcttttcagctgactttattgatcatctgattgctaccaaaacgaacaagcatgataagttgcttcagcaaatagaacaatggaacgcggacgatgaagaacagaagataattgacgctattctgaaagttcctgaagaggagagaactgcggaattgacggggcttctggcgcgctcatacaataatcaggggaattataatgaagccattgaacagcttctttcagtaaaggaagaatgtaaggaagatgcgctttggttctatcgactgggttatgcttattattatctgaaccaactggataaggcgcagaaagcctttgaacgttcattggaattggatcccagcgatgaagatgcgaaggaatacattgaaaattgtaagaatggtgttttgcctcataatcctgagatgtacgaagaggaggaattggatgctcttgaagcgcatattgacaagttcttcggtcattcggatcatgtgttccatgagatcgcctcaccggatatccatgtggatatctttattgtcgagccgacggctgaaaggaattattacacgctggtcacatcgggcatgggtgcccatcggatgaatgtacctaaggaactggctgagtataagctggagcgtgcggagatagtggtatatttacctgccgactggaatatttctgaccatgaagaaaagaattactggccgctacgttggctgaagatacttgcccgtctgccattggaagaggactcctggttaggttggggacattctgtacccaacgggaaaccgtttgcagagaatactcagctttccagtgtattattgatcaatccggagaatgtggaagaaggagctgctgtttgccaattgcctaatggggaagaagtgaatttctatcagatgattccattgtacgaagaagaagtcaatttcaagattcagaatggtgcggaaacattgttagggaagatgggagaaataagtgcagtggtagatattcatcgtttgaatgtctgcgagggatttgggcggccgaaagaatagggatttcaccacagagtaacacagaggttcacagagttcaataatttctaaatcaagaaaataaaactctgtgaacctctgtgttactctgtggtgaaatctcttaatcctgagaaacaaaagtgataacggaacgtgcaggaattactgctatctgttcgtttttcagtttcttaatgggtagaagatcttcacctgcttcatctgaggtgcggtagccttgccatgactttactttggaaccatccactttgaaagtgaaatttttctcctgatcagcgtagttgataactaccattacccattgtccgtttgtattctgataagcagaacacatgagtccttggggatcagtatctccttccgggattacctgtccggatttgtctgttgccttaatagacatgcgtacagctcccgggcgtataaagcggctgtaattacctaatatccataataatttggagtcttccactttaccgtcatgaagatcgggatcagtgtattcgcgtagcaatccgtctttgtagtcacctcctatggcacgccaccactgccagctacgtgctcctgcataaacaatgtcgtgatgaatgatacgggccacatagagggctgttttcattgtatgatcaaatccaccgcctccgccaatttcttcatcgttccccataatgcaggtttccgtttgccagaagtcaactttgtatttgtccaatgtatcacgtaactgacgacggtaatctctcagactttctaaaggtgtattggtccaatagctgtgccctgcaatgagatgggggacattcggggtgtttcccaaataagtatctacactgtcggagcagaagaaagattgtatttcgtatccacgttcatggtttgtcatatgtgtggagaacatacaacgatagtctgacgcttcgcagatggtgatttccgtatcaataccctctttcacaaactctttgctgatgaggcgtacggcacgggcaatttctttctttgttgccggggtaccttcttgtttgggacctatccaattccagtgtccgtccggttcgttgaaaggggagaggtaatcgaacttaatgccgtctttcttttcaactcctttgatcacatttgccagaaaacgggcgaagtcttcataatgttccgctttcagattcagtgtgccgtcacgtccggtgttggtggcaagcccgttttgagtgaagtaaacgggtggagagtttaggaaagcaaggaatttattgactccacgttcctttgctaatcggaggaaattacgctgtccctgttgtttgtcccaatcataacttccgtccggttgcaggaaacattcggtacgcatccaaggggagcctatctgactggcttcgccctgttccgtacttcctgcacctacattgaagcgccacagagaaagcccgattcctttgggctttccgttagtgtcattgtcagtactgaacaaccagtcagctacttggtcctgtttctcctgaggccatttgcctatgatgtgcatgctccaggcatctgaagcactgaaatgatccatggtttgctgaggctgttcgggaataatctgatagtttatatctgcttgtggtgaacacgaagtagttattgcggcgagggcgagtaataatactttgtatttcatataaatatttgtttttagagggttatttagcattcaagacaatctctgttccttgtaaaagtggtgaagtaaactttacgcgaatctgacctttctcacccgtggtctgtatgtaggtaagtagacgtccgtggaaggcacgatggcgattatcggtgtagtcactcatgtcgctgttatcggaaccttcgagccccagtaaatgtgccggaccttcgatggtacaagtaatgtcattatcgcctaatttcactacgacacccttttcatctatcacttctacaatgagatgcgctgtagcgcggttgcaagatagattggtacgatcggcacttacacggagagcgtaggggcgaccggaggttttgatggaatagctggacaatatatttccgtctttatcgcaaccttcggctttcaattcacccgcccgatagggaatatcccagtagatgatacctgtcttttcatcatagggtttcatctcacctagcacttttccatcaagtaacagacgtgcttgtggagcattggtatagcagactacacgtatttcctgaccgggatcatagttccatatatcccatgcatcgggtgacaggaaggtacgccgggagtttttgaaacgatccggtatgggataagtacccacataagtaaccggtttttcgcaccataaggaagcacggaagtgaccgcggggtttggggaaactaccaaagtcgagcaatccggtatatagtccgcgtgagggccatgcacccgattcaccaaggtagtcggtacccgtccagatgaattgtccgaagatgaattctttatcctttacggcataccaggcttcaagaccggaaccgttttcgctaccataaatgacacggttgggataggtggcatgatcttcatcatagcggttttcagtatagttgtatcctactacatcgatggcttcgggatattctgtttgattggacataacaactcctgccagtgctcccgttacggggcgtgacgtatcgacagcacggacgcatgcagccagtcgtttggctatctttccgatacgcatggcatcaggagcatccggtttgtaaccgccaaacatgggttgattgatggttgatccgtcaagaataggatgcgagtaaggatcattcggataatctacttcattaccaatactccacatgaaaatggaaggatgattgcggtcgcgacgtaccatattggttacatcctgttcaatccattcttcgaagaaatcgaaagaaccgtcataggcgggttcccccttattccagcctttcacccatttacgtttcgggaattcccattcatcggatgcttcatccatgatgagaagtcccagtcggtcgcataggtcatatacaacaggagcctgtggattgtggctcatgcggatagcatttacacctatttctttcagattgtttaaacggcgctcccatacttccggaggtactacagcaccgagtacaccggcatcatgatgcaggcatacacccttgaccttcatccagttgtcattgagcgcaaatcctttattagggtcaaacttcagtgtacggagtcctactttagtctcacatccatcgatacgttgtccattgctgagcaattccgtttttagtgtataaaggtaaggatcgtccaggttccaacggtgagggttagttattttcagtgtgagattttctttagtaataccttctttaccgtcagaaacacgagtgcggcgttgcgctacttgtttgccggcagcatcgtatagtgtagctgaaagttcaagtctgtcgttggttgctatgtgtttctgtacttccatatcgacggctatggtagcctgtcggttggtcagagaagtggcatgccaacctgtgccccattgtgccaggcgtatttcaggagcggcaattagccatacgtcacgatatatgcccgatcctgtataccaacgggaatcagcatagcggctatggtccacacgtacacttaacacgttgtccccctctttcagataaggagtcatgtcgtagagaaatgagatataaccgttagggcgtttgccaagcagatgtccgtttaaatagacttcactgcgattgtatactccttcgaaatagatataatggcgtggagcgtcatccgtgatcttgaaatgtttgcgataccagccgattccgccaggtaaatagccggtgcagcttgctaaagaaggtgaaagttgtccttcaatagaccaatcatgcggcaatctgagtttgcgccattcgctgtcattgaaggcgggatttacaatggttgagtcatcggtcagccggaagagccaatcttcattgaatttggtggcattaccaaatgaaacctgcgcctgtgccggaaggccggtgagcagggctgtcatgaatacagtcagcgtgaatatagcgtttttcattttggatgattattttagattatacactactgtggttacactttccgcttccaaaagtacagattctccggcagatacggtggcttctgtcagttttttgctattggtagtggtgtaggtccggattgacgtagcttcgttgctccatccttcatgagtttcgcttaggcggacattcttgctggacatattggtgaagacggctactattttatctccttgcggggatagccatgcagatccaaagaagttgagcgattcggtcagttgcatgttgatacgttggtatccggggcggatgaacagactataattacccaatacccaaagggtggcagtgggttggaaggtaccttctttttctatgttgtcattgttgtcgttgattccttcaccaggtacgagggatatcagaagaaaacggtttttatgtccccaacgggctacgtccatggaagtccagtagctccatgaagatactcctgctacggtaaggtcattgtgtatcactctcgacatataaaatgcgatatccatttctgtagcattgtcatatcctacaaattctgtgttgctgtagttgtctcccagcatgctccattcactttgccatacatctacaccatattgcgttgctgcttgtgccacttgcttacgtacgctgcgcataccgtcccaagtaccatcggtccaatagctatgaccgcagattagtttctttacatgatttaagtcacctacataagctgacgagccgggggtgaaaaaggcagacataacgttactgcgattggcatcgtctttggtcttatataagtattcccagtcgcccgattcaccgagcaggatatcggtagacaaattacgttcggttaaggcatcatccagttcgcgggccaatctggcaacttcgtcattggtccagccgcttccttcttgtcctccatcccagttgtattgcggttcgttgaccggtgagatgtgcgtcacaggataacctttatctatgtagtattgagctacatcgcccatgtaagcggcaaagtcatcgtagcaatcgtttttcaggtttgatactcctccttggttggagaaacctttgccgttctgtgtatattgtacgggtggtgtattgctgaaaaggacgatactttcgcaaccgaactctttagcacggttcaggaaataacgttgcccttcgcaacgattccagtcaagggtcaagtcgtttgtcaggtatgactctgcgcgacgggatttatcggtaatgccgcttgcatcaccttgttcggcagttccaccgcccaggtttacacgccacatggagagaccgatacctttggggcttcctgcctgaatttcggaagagaagagtaattcggtgattttctcacggctgttggtccagtatttacctacataggaaggattccagcagtctgatgcaccgaatcctgtgatagtctgataggtttttccggcattaatggtgactagtttctctacactattcggtacatccggttgatcgggagtatcgggtgtagaaggagaatcgtcactgcaagccataaaggaaagcagggacagcagagtgaaataatattttagtttcataaatattcgatggtttaaaaaagactgtcgcggataatctattatgaaactatccgcgacagagtataaagacctattgaagaattctatttagacattcaccggggttaattccaacccggattctgaacgatagaaccattagacattgtgatttcatacaaaggaatggggaataccatgtcgcggttttcatcaaagccagcacctttattacttgcttcgccctggttctcccattcatagaggtcgcgggtagcggcatctgtgttatacttaacgaaagtaccattggttcccagcagattggaaatcaccttcttgccattgtcgtcggtccagcggcggatgtcatacaagcgattttgctcccatgctaattccaggcgacgttccagacggatatctttgcggagatcgttgccgcttgattttacatcctccaggtttacgcggttacgtacttcattgaggtatttacgtgctgtagcgtcatcacccagttcgttgcaggcttcggcatacatcagcaatacatcggcatagcgcaagatgcggtgatccaaaggaatcttgtctgtattgtacacttccggacgcttttcgataggtacgaaatatttgcggacgatacgtgccgatttatgttgtgcagggtcaattatatagcaatccggatcccaaccatacttctcgatataagtcttgtaattagccatgtctttgctattttcaatgaacttatcgaagttatcttcaccggcaatctcggtacatccggttttgatgatagtccagcgaaggcgttcggtatcacctgcgtcaatgtaagcctgttcgaggttggcagtaggctgaccccaagaccatccgtcgccgggaccattacgtgcaccggtgattattgtcagtgaaccacctaatgaataagtaccgtcgtacatatactgtacttcaaacagactctctttactgttgttgtgatcaacactccatacgtcaccgaagttatcaagcagttcgtactctttgctgtcgataacggtttccaatacatcatgtgcttcttgccacttttcctgatagaggtaaactttacctagcaggcctaaagctgcaccactggtagcacgtcctatatcggtggcagcatattcactacgttttggtaacgcgtcggcggcagctttcagatcatcttcgatgaacttatatacatcttcggcagaagcgcgggtaatgccttgtatctcctcgggcaacaggaagcttgtaacgagaggtacaccgccgaagtttcttaccagttcgaagtagaaatatccacgcaggaagcgggcttcgcctatcagacgattcttcatgtcttcgtccgagaattcggattgtgagatacgttctacggctacgttgcagcgtaagatgcctttataacggtattgccagaagtttgagatggctccgttgctctgtcctgtaccctgataatgtgctaaagagatataatcactctggctttgggttgtatttcccatccaaccgtcatcgctgcacatttcggaaagtaaccataccgtattgatgttccaccagccaccgaaagtgatggcctggtagcaaccggtgatgaatgactcggcttcctctacactttggaaataggtgtcgagattttgttgcccacgcacttcctcggtcaggaagtcctcgcaagaggtgaatgtcagcgaggcaatcaatgtcaatattgctaatatctgtttcattgttatcaaggattaaaatttaaagtcaataccaaacaagaatgtacgtgggttgggataggcaatgccatcgatacctgtttcgattacacttccatcattaccaatctgcggacgttcgggatccatacctgaataaccggtgatagtgaacggattctgtgctgagaatgaaagacgcaactctgttccgcgcaacagcttcttgggaagagtataacctacctgaagcagtttgcatcgcatgtacgaaccgtcttctacaaagaagctggatacgcgtgtatagttctggttcaggtcgttgtatgacaagcgtggaatgtcattgctggtaccttcgccatgccatgctttttccagcgtacctgcccatacgttctgcccgcttaccccggaatataatcctttggttttattaaagatatcgttgccgagtgttccgtagaagttggctgtgaagtcgaagttcttgtaattgaagcccagattcaaacctaccataaggtctggataagggttaccgatccatgtcttatcgttttcgtccagtacaccgtcatgattcaagtccttgaagcggatatcacctggctgtgctttatcctgtatcaattttccatgctcgttggtatgagcatatacctcgctccagttttggaagataccatctgccacgtatccgtagaaccgtgaaattaaaccaccgtcttcgttacggatgatctgatcactattgaacccaccagtctgaataggtccgtctccagagaatttgatagctctgtttttcacagctgaaaggtttacacctacattgtaagagaaatcagatactttatcctgccagttcaggcttaattcccaaccgctggctttcatactaccgatgttcatccatacagtgctgttccaatcgggataaccgatagcgaagatattctgtttctgatagagcatgttgctggatttcttttggaaatattcaaaagttacacctaggcgggagtttaggaatgacatgtccacacctacgttccagtcttccactgtttcccattgcagttgattgtttcctacacctgatatcatggtaccgggtacacggacgggagttgaaccaaatacatagtcagcttgtcccagtagggtaagagtagcatcgttgtcgatgttctggttacctacacgaccccaaccaccacgtagtttcagattgctgaataccttctggtcttgcataaagctttcgctgatgatgcgccatgaagcagataccgcggggaagatagcatatttgtttcctttggggaagcgggaagaaccatcggcacggatagatgctgtcacatagtaacggttatcatagttatacatgatacgtcccaagtatgatatcagcgtgttgtaggtggtagtaccgtcacctttctgattctgtgtaccggcatttacttcctgcatgatgtccatattgttgggcacatcgtcgcgtgaagccttggtctggaaccatgcaaaacgttctgctgtgaaaccacccattatattgaggttatgctttgaagcaaaagtgtcagaataagttgcagtattggtccagttccagtcgagccattcttgcatctcacgggaaacattactcaatgtagattgttccaaagcgtcgatatagaattcgggtgtgaatccatccgagcgacggaagtgagcattagctccgaattgtgtacgtaaggtaagcttttcaatcggatttacttgtaaataggtgtttacaatggcacccatttcacgtgaatgtccattctggcgtgacaacgaaccggctgggttccattcctgattgttgtaagaacgctgatagttgttaaactcattatccacccattgatcttgtggtttaaatacaggagttgtcgggtccatggacatagcagctgagaaaaggttgggagtatcatcccatgattctacgcgcggtgcaatgtcaaaacccatttttacgtatttgttgaaggtatattccgtattgagacgtgcattgattttatcccagtatccgtagtcgtattgtgaattattacggaaataacctaagctaagattataaaccaatttgtcattaccaccggagatgttgagtgagtaattctgtactaaagcagtcttattgattacctcatcccaccagtcagtaccattcggattggtagtggcaccggtgtcattccagatagaggtacctccatcatttgtatagcgggtattgaacacttctttgtattcggcagcattggccatcttgggtttagctaacgtttggaaacctgccgatgcactgaaactgatatttgtttttccggcaatacctttcttggtagtaatcaggatcacaccgttagaggcacgcgtaccgtagatagcagccgcagaagcatcctttagaacttccatggactggatatcattactgtttaggaagttgatgttcgtacctaccggcataccatctaccacgtagagcggatcggttccgttaactgtagttacaccacggatcaatactttaggttgtgtacccggaccaccaccgctggttacctgtacaccgttgatcttaccttgcaaggcgtccatagcattaccggttacagtttcggtgatttcatcgcctttcactgtagcgatggaactggtcaggtcgctctttttcacggcaccatatccgataaccaccacttcgtccagtagttcggcagattccgacaacacaacgttgatggtggtctgtccgtttactttgatttcttgtgtctggtaaccgatggtagaatacacaagtatagcgtttgcaggaacattcatcagtgtataatcaccatcgatgcctgtgatggtacctgttccactgcctttcacttgaattgtagctccgattaagggttccttatcggtagctgaagtcactataccttttactgttatctgttgtgcatagctgcatattgacagtaacaaaagacatgcaattaatagttgctttctcatttgtcagactattattaggttaatttactcgtactaatttcgctctacccaggtgggaatcaaaccagaattgataggtgccggttacagtcactttgggtttagaccatacatcttgtgttgtagtgggaccggtgtaattggaatttttaaatgcacttccggtgtaatagccgaatatttcaggctcttcttcagtatcgctgcaccagcggacaaagttccaccattggtctgtgtgatagttgtgaataatgaagttcattgattctcctgctgtcagtgacataggctcattgtagaacaagtgcgggttagtggcatcttgtttgaaagagactactccggtaggattgtcagatgtcagaccgaacgtaaagtccatcatctcaccgctgttgttgttccatttatccatggtaggtaagccgtatttcatgcttgcaggccatgggtctacagcttctgcaagtgaataagtttccatttcatacgtcttcagcaagatattgatattgattttatagtatacattagcttctgtcagtacaattggtttagccagtgccggatcatcggtcagcatggcttcatctgtcggatcaataccataacaaacaggagaaaaacttgtcttttgcggtaagaagaagatttccgtattagctttctggcaataatagagagcttgatattggaattcgcccacatgatctatgcgcatcggtacgccgaatacatcgctgtttagttctgcttcggtagctacgtctgccagatacatcttttcgaaatcctgcacatcggttacagatacagtacattctatcattgtgctttttcctgtcttgtcgacagcagtaagtgtcatcggatagtccttcttttcattaggcattgtgatgttgaatgagtgctcaaaagctttttcaccatcagcatctattttcaggttttcatatccttcgatgccttcgatatttaccaatagataatccagtccgcggtcgtcagttatcgagatattcatgttgagtgtagggatttcaccttctctcagcaatacggtgaccataccacccttttcgggtgcaataacgaatactggatcttcaaagtctccgtccaacgttacaagtacatcttgtgaaacagtacgtccgcctacatcggttacggtaacttttacggtgaactgttcaccgatttcatccggttgaattttgaagtcgtagctcaattcgtaagtttcgagaggtttctcataaatctcgatcaaatcgattgttttgttgaggttcaggtcggcacattgcagttgaatggttgaaataccatcagcatctttaatcgttccttccagtgtaaatgtgcgaccatttgcagtctgaatgtgttcaagtgtcatttctatggaaggtgcctgtccgtccacatcaggatagccatcgtcgtcgctacatcctgtagtccataaagtcagtgataagaatgcccagagtagggcggcattgaataaatgcttcttcttcatacatattacttttaaagttaaacaattagatacattctttactaaaatatcacttttagataatgcaaatgtaagctatcttagttttcttgaactgcataaatcttgcagtgaggggatgtaaatcttgcaatgaacgatttgtgtatctgaaataaagaatttatttatacttttggattgcaatagaaaattgatgtcatgaaaagcagattattactttacttactgttgttacctgcccttctgacggcacaaccttatgctgtcaggcaattgggaattgagaagggattatccaataactatgtggttagtatagcccaggacaaagagggctttttatggtttgcgactgaagagggcttgaataagttcgatggaacgcgcttcattacttactataagaatgaaacaaagaacggctatggcattacggggaatgaactgaactgcctgctggatgatccgaaggattccatcttatggattggcacacagagggcggggttgaatgcttataattatgtaaaggacacctttacattctaccggcataatgaggctgtgcctgaaagtatcattacggatgacgtaaccaatgttattgccgctgctgatggaaatctgtgggtgacaacttattggaaaggaattgaatatttcgataaagaaaccggtcacttttctcattataatacggcaaatataccgggacttgtcagtgataacatctggactgttgctgatggggggaatggtaagttatatgtaggccatgtccataatggttttagtattctttccattaaagataaaagggcgaagaacttcgtgcatgatccgggtgatcggcacagcttgccgggtaatgaagtgagatgcgtatataaggatctgaataataatatctgggtagggacaaacaaaggtctggcattgtttaatcctgaatcagagaatttcatccagtttaattcagacgggaatctttcgcactatatctacgacattaagcagcttgacgggaataagttgtggatagctatggaatttggcggaatagccataatggatttatcgcagcgtttgttcctgctacccgaacagactcaatttcattatatcagggaaggagatgacggatacagcctctctaattcaagtacgaggtgcatttttcaggattcattcaagaatatctggacgggtgtatggggtggtggcataaatttcttaagctatgagccacctttgtttggcggttattactattctcccaatcagaattcaatgagtcgcctgaataataaaacggcaagcagcgtttgtgtggatagccaaggtaaattgtggattggaacagatgggggaggaatcaatgtctttgatcaaggtaaacgggtatccgtttatcaggaagagattgaagatatgagtggaaactctgtgctggcctcactgcgcgactcggaagataatctgtggttcggcttatttatgggtggagtgaattattacgatgcgaagagaaagatattccaccggaacttccttaaagaattagagcacgaggatatccgttcgttctatgaagacgaccggcatattctgtggattggtaccagtcgtggtatctacaaagttagtctggctgataagaagatcgtgggacattatgagtttgagaacaatctggtgcggtgcgttatgaaggactctcagggacgtctgtggatcggttcttttgggagtggcctggggataggagatgatgagttgcaggatatcaagctctttaatatggagaacctgttcccttccaataccatcaatgcaatttatgaagacagcaggaagaatgtatgggtcgggacaggagaaggtctggtgtgtttctcttcgccatccgattgggaatataaggtttaccgccgtgaagaaggcttaaccaatacacatatacgtgctataacggaagatgcgaatcataatatctgggtgagcaccaataagggaatcagttgtctgttgcgggataaggatgttttctataactatgaccattgggataatgtgccgatgggaaattttatgagtggcagtgtagctaaggatcagaatggagagatttatttcggttccatcaatggactttgccacttcaatccggattttgttctgacaaagcgtgagtctcctgcggctgtcatcacggaaatgaagatatttgctcctttgggtaatatgggagacaatgaagaagtggtcagtattgacggtcagtcgaaagtaaggctgaagtatatgcagaatagctttaatattacttttaatatacggaactatgcattggtcaaccaggtggagtatgcctatatgctgaaaggactggaagatgcatggtatacggtgacagaccccaatagcgtaaccttccgtaatgtgcctcccggtgattatcatttcatggtaaaaacccgtatcaagaaccaggaatggtcggatgaggttacaactttggatatccatattgttccgcctttgtggcttacctggtgggcgaaatgcagctatgtattgttgagtggagccatcctgttcttcattctttatgcttacaagaagaagcttgatatggaagttctgtacgatctggaaaaaaagaatcatgtgcaagagcaggaactgaatcaggagcgtctgcgtttttataccaacatcacgcatgaacttcgtacaccgctgacattgatactgggcccactggaagatatgcagaagagtaattcgctttctaataaggatgcccagaagatatcagtcatccatcaaagtgccatacgattattgaatctgatcaaccagatactggaattcagaaagacggaaacacagaataagaagctttgtgtggctcatgacaatattgccaatctggtatacgaaataggacttaaatataaagaactgaatcgtaagccggatattgagtttcgcatcgaactggaaaaagaggatatgcctctatactttgataaagagatagtgactattatcctggataatctgatctctaatgctattaaatataccgagaagggttctatcaccctgggattgcacaatgtggtacggaataatatcagttatactgaaataaaagtaagtgatacaggttttggcattactcctgaggcattaccccatatctttaatcgttattatcaggaaggaggcgatcatcaggcttcgggtaccggcatcggcttggcactggtgaaaaatctggtgacgttgcatgagggggaaataaaggtggagagtaccttaggcacaggtagtaccttctatttcagtctattgactgataatacttatcctcatgtattacatgccgattcaccggaaagaaccgtagatgaaaaggaagaaaaagaagagattcctgagtcagcttccggtggaaagcgtattatgttgatagtggaagataatcaggacatctgcaattatattgctgaatccttctctgatgattttgaagtgaaaacagcggcgaatggcgaacaggggatggagcaggcattaaatagtattcctgatatcattgtgagtgatatcatgatgcctgtgatgaatggaattatgatgtgtaaaatattgaaagaagatgtgcgcaccagtcacattcccattattctgttgactgctaaagattcgttgcaggataaagaagagggatatcaggtgggagccgattcttatctgacgaaacctttcagtgctactctcctgcatagtcgtatcaacaatttgcttgaatcccgcaagcggctgacagagcgttttaataccagtactccacatcataatatggatgagaaacgtgctttattggcagagtctttgaataaactggataatgagtttattgagaagataaatcagctgatagaagcccggttgtcatccgagaagattgacataggttatctggctgataatatgtgtatgagtaagtctacgctgtatcgcaagatgaaagctttgacaggcttgtctaccaatgaatatgttcgtaagataaaaatgcagcatgctgaacggttgcttctggaaggcaggtataatatctccgaagttgctttcagggtaggtataaacagcgtggtttatttccggcaatgctttaaggaagagtttggggtattgccctcagagtatttgaaacaatagtgctttgtcgcacctctatttgttctattttgtttcttcctattgaaacaaaagtgccttgcctatggaacaaaagtttcacaggcaagaaacaaaagtttctcaggtaagaaacgaaagtttcacagataagaaacaaaagtctcacaggtaagaaatgatggctgatcaataatgcttgtagttatcattaaatattcgtgcttaattatctgatactatctgtcatcctgagcttatcgaaggagctcattctcttcatcatttcaagagaggagatacttcgactacgcttagcatgacagatactcccaaagcataaactaattatgctcacttgcttatcatttcattgaagaaatttatttctcttcgaatgtattgaaagagtgcggttgaagttcaatgttcaggtaacggtcccgcaacttcacggttacttttttagcttcatcattaaagtttccggctatcactacctttttcttttccggagtttccactaccaagaccggtgttcttccttctgttgaaggcttgtaggctattacacgtgaaccgggtgttacgaactggctataatgtcttacagcataatactccggtgtaagagttgccgtacgggattttgaatcaatatgtatcaaagcattctgtttccaaccccagggactttcaccgttatcgcagagggtattgttccagaaggtgtactcttcgcagccattacccaggtagtggttaatcagatggaaggtgtgttcgcctgctctccagtcgaaggtgcccccaccgcattcgctttctgtctgcatatacttgtactgagggtatttagcacgtatcttaggcaatatctgtcctccttcccactgaaagccaactccctgaacgctttgcggcatgcgtggatcggaaagtattttatcaacatagtcatagcggttggtattgaaagtaccaaggtaaagagctacttccggatgatgtttctttaatgtgggtgccagatactctacgttgaaacgtacagtaccctcagctgtccaggcacaaccgggatacggggtataactgtatgcttcgttctgatacatgatcatatcgatgggaattccttgttctttataggcatcgataaatttgcagaagtaattggcataagtttgcaggtagcgcgggtcctgaatcatgtagtcattcactgcgagttgtcgggggaagacgttatcgcgtgtctccgtattatcctcatagagtactacatcagacagaggcgacatcttattagtcctgtcactgcgaaccggatagtcattgttaattttcatccagcttggaggcgaccagggagacatccagaaagtcatacccggattatacttttgcgctgcacggacaaaggggataatagccagtttatcacggttgatgttgaaatacttcagttggaagtcgcctgatacttcgtcgcagctataccagtcgcgggcatagtcattggcattcatcgaaatacggcctctgttgaaacgaagttctccttcaggggaaaacattttcttcaacaggtcatcctgttcatcacgggtgagcatgttcaaggcatcccagcacagttcgttgaaggtggttccccatgctttgaatgtggtgccttcttccgttccgctaatatctaaaagcggggtttggccggcgctcgattgtaatttcacttttgcctgtttccaagtgttgccttcggtactactgacccaattgaaattctgggcataggtattagcagccaaagcggtgagacaacacatgaacactcttttgatgtttttttctctcatgataatagttcatttaagtaattaataattattgattgtagtacaattcaaactgagggcaaattaaaataaataatagaaaagagtgggggtataaaagaagcaaaaagggagacaaatcaccctttttacttgttttgaaagaattgtgccctataaaccctatgaagaggaggttacaaaaatagttttcatcacagattacactgatattcacagatcgtttatgctgaaaaccattatctgtataatctgtggcggtttttagtatatccttctggctacgattattcttcacttgccgttgctgatattaaataggcttccacttcatttccattcaccttgcatgtaaagctgaatgttttgttttgaggatcgtagcttccgcttccttctgtaacatccaggttcttccatccggcaaggctgagtgtgttatcttcgttcactgtaatggtgagtccggtatctttcgctcttgccagttcctcagtgcctgtataataaatacgaattgtattcttgtttacggcaacggcattacgaatcaaactaaaggaggctccgttgttggtaccgatgtaattgtagtatcccgagtagttgttgtaggtctttatagcgaacagaaccactgtttcagcctgtgcaacgggatactctttgcaagattccattttcagtggaagggcatataaagagtcgcaatgtaatccttccggatggatagcgacaggtatgcgggcataagattctccggcacggatcactgcattcattgaagatatgttgtaattggccgtgggaagtgcctgatattggatttccgtactcgatttatatttttgattgtaagaagtgatgcctgagggatcttcaatcaatgtacagtgaatgtccccatccggattcaatgagccgctggtgcctaccgatacgaaagtttctgcactttcgtccgcatagttgacgttgcgggtcactaatgctccttcttctccgatacctaccagataggcttgttttatatactgttcctcttcccaaacattggtgttctcacatccggtgagtacaaagagcgaacctattgctaatgaaaataaaatatgctttttcataattgtcttaatattaaagttaattaccagcctggattctgaaccagttttgcattatgatccaacgttgtctgtgggatggggaagaaatacatcttctgtgtaaatacacgcttctgtattctctctgaatcccatattgtacgggtgtagaatccggtacggttatttactctggctttggtgttccagccgataatctttgtattataagctgcgtccgcatcgccccaacggcgtaaatcatggtagcgaagtccttcgagggcaaactccactttacgttcctgcttaatagcttcacgcatatcgtctctactattcagttcggcatcggtgatgcccggcataccggcacgataacgtatcatattgaaatacttctttatttcttctgtattacgggtcacggtgatacccgtggcttcatccgtataacttccttccaattcatttaatgcctctacataattgaggaggatttccgcatagcggaatacggcaaatgttttggcacgacaggaacctttcatgttatcttcctgattgatgtatttacggagagtatagcctgtacggttgtaattgtccgggtattcgggaagcgggcctgcattaccatcagagtaataagtcacttctacattggtcaccgggtcattgcctacataagaagttccaggccagatacaatgattatatcctatggttgcgtaaaagcgaggttcacggtaggcgtctactttggctacattgccattcacggtataaccgtcagataccctgtaagcaatatctatcggatcacctgcatgagaggcatcagggtaaggatagtttgcgctggaatggtggatgtcatatccatctatcattttataggaatcaatcaaatccatacagaggtttataccgttggcacctcccagagcggtaggagtcgccagccattgaggagagttctctttcactatggcattgcaataataaatatattccggaactaactctgcattcacagaaccatcgaacaggctcttgtaagatgcgtaaggatcgatattaccggccccgtcagggaaaccggcctgtgaaatattggacgggagttcctgtgttctttctgtacgggcagttgtatagagtgcgtattttcccatatcaatgattcgtttggcagctacagcggctacaccccatttagagttatcgttgttttgagaaatgaaattccgcccatcggctgttttccagtccgcatagcgggtatttccgttgtaccatggacttgccgcataaaggcgtaagcgagacattaccgctaatgctgcacctttgcttgcaatatactggaattgttgtgtacgggaatccgggaggaactccgctgccttttccatatcactacagatgtagtctatgcactcatcgtatgtgcttcgttcgatagaggcttcgtcggatggggtatcggcatcgaaaggcttgtcgggaacgataggcaccggtccgtattggcgcagtaaactgaaatagaaatatccgcgcaagaagtaagtgcgtcctgtatagtcacggcgttccatatctgacaaatctttgcattcgctgatgcgggtcaacacgatgttggctttgcggatacctttataaaagcttccccagttattatagttcgcgctttggggagtttcatctcccagcaacagagccattgcggcatgtctgtaagggtctttctcatttttcccataatcgtccgcccacgatgcgaagcattcgtcggaacccatgccgaacgggaaataagaggaggtgaacagtttactttcatccggcagtatggtggcaatgccgttaatgtattcattgacgcgaactttactttgaaagattgaatcaatatttgtctggtcgtagaagtaagaatccacatccagataagactcgcatgaggttaatccgagactcatccctgcccaaatggatatgccgcaaagaagagctttaaatgtatatttggtattcataatcatatcgttttttaggtttagaactgaagatttgcctgtatggtaaatacacgttgtagcgggtataccgcaccgttgtcagatgcttgtgccggatcccatagtttgatcttgtcccagcagtgaagattatcaccgatcaagctgatctggcaaccttgcaaaccgatctttttgaagcatggcagagtgatgtcatacataatctgtacattcttcaagcgtacataagatccgtctgcaatccagaatgtggatgcctgactattgtttttgttttctccgtaggtgagacgcggaaaacgggcattcggattctccgtgtctttggttccggaataagaagccggtgtccagcgattgctggcatccgctacaatgctgagtacgtttcctgtttgtccaccgttgaaagggtgaaaaccactgcctccatacagaaagttcacttggcctactccttcaagcagggcacttacagtcagtcttttccaatggaattccagaccgaaaccgtattgcagacgtggaacattggagtagcagataggtacttcatcgtaactgtcaattttaccatcgccattgatatctttgtatttgatatcacccggcattacactggttacgaaggtttgtttggggcttgaatcgatatctgcctggtctttgaacagtcctaaggcaactaatccgcgttgagttccccaaggtgttcctttccatgcttggtagggatatttaattccgctttgttcgtattcaagcagtttattgttagagtaagtgaagttggcgcgtcctgtcaggctcatatcatttttgaaccggtaagtgtatgagatgttaccatccgctccccaacttttcatttcgcctacgtttgcccaaggcagcgtagccaatcccatttcatcgggaatacttgcacgttgctggaaaattcccgtacggcgttcactgaaaaagtcgactgtaaactccacactactattaaatagttgtccgtcaatacctatatcgaacttctttgctttttcccagcgtaagttttgggaagcctcctggctttctactatattcttgccacttccccagataccggctccactaccttcggtcatggtagaaaggaacggaaaacgtgtgtcgttaccaagtcggtcgttacctacgataccatacgaagctctgatcttgaagaaattgataaaagacaagttcttctgcacccattcatattgtgtaggtacccaacctgctgagatggctggaaatacgccgaacttctgtcctttctcaaatgcttctgaaccggtatagccgatgttaccttccaggaaataggtatccttgtaagagtaggttgcacgcccagccaaacctgtataccgttttgggatagatgcgataagtgtttgcgcttcaccggttatgaagtcttccatataaaaatcggctaatccggttacgcgatgatcattattgaacaggcggttatagttaacacgggcgtcaaaatagattttccgtgtagacagattggtggactcgtatttatcatctgttttggctactttttctatcagatttaaggagccgtctttgtttcttccttgtgcatagtagagcgccggagtttttgtttgagactgtgttaaggctgagtaattattgattgacatggtggcttctgccttcagaccttttatccattggtcaaaatcttgttcaaggcgtaggcggatactgcttgtcgtttcatttttcttcttataacctgtatagtttagtaagatatatgggttctgttggtcggcactggcaccgtaggctggaagcgaaccatccgaataaagtaccggaacggtcacaggggtcaggttggcttgtgtttgccacaaggctttcgtatcattggcatatccggggaaagaattggttacaatctctgttgataagcccagctcaataatagtacttttggtcagattagcatcgatatttgcgcgaaaattgtatttattataacctacactgttatcatagtttttaattcctttatcttgcttatagatggcatccttatgttgaagacccacactcatgtagtagcgtgcatttgttccaccaccattgatactaatgtgatgctgattgttccatacataatctttcagcataacatcacgccagtttacattgggatataaatccgggtccagtcctgtttctatcagatttaactcggcattactgtatacgggacggccacctcgtacaacggaagcttcgttggccagttgtgcgtacgtatatccgtccacatattcgggattgcgtgcagaataggaaagcccgacattacttttcacactgatattcagtttacccgatttaccgcgctttgttgtaacgagtaccacaccgttggcaccgcgtacaccatatacagctgtagaggaggcatctttcaggatggtgaagctttcaatatcggcaggatcaagtatattcaggtcaccttccacaccgtcaatcaacactaaagcggatgcacctgcaccgaaagtactgataccacgaatccagaattcagaaaagtcattgccaggctcgccgcttcgggttacggcaatgatgcccggtacacgacctcccagcatgtttgttaccgaggatgaaggaacctgtaaatcggatgcttttacgttagttaccgcacctactaccgagattttacgttgagtaccgcgacctacaatcactacctcatcggtttcatttacaatttctttcagtgcaatcttttgcttggttttatttccgtttaccaccagttcctggggtgcataacctatgtaggtaaacaccaatactgtattggcgggaacattgtccatgcggaaattaccatcaacatccgtgatagctcctttggagggattgtttttatattgaatcgtaacaccgggtaattcttcaccttgctccgtcatcacaataccggatacggtgaaaccattctgtgcggcaagtggaaacacacttgcaagcaataggaatgaaagtataaggaaaaatctatttctcatatattagtttatttattgatttacgggaaggagtttattctatagcgagtttacgcacattcaatcctgcacctccggctatatagaagttttcttcagaatccatagctatatctttgggatataggaatgtacattccagtggaagtccgtctgtttcagtctcgcccgacatggtgccgccggcagcaattgttacgtagccatccgggtaggatatctttcggatggattgtccgcctgcgtttactacatatatgttgccttcattgtcaacagttactccatttggccaggcaaactgtatgtcttcccgataaccttccgtattggtctggttaggccagccgtttccggcatatctttcgtccgaccatgtgccgtcagcgttctgcttaatccggtatacagcatgtgtcctgtcttctgcaaaatagaagcaatcttctacacggctataagccagatagctacaatgatcagaaacccaagcttcaaagtcccagcggtgttcaaggagtttttctactttgtactgtccgctatcatctttctctgtcagattgatacgtacgaagatccccaggtgatttcttgtatagaggtatttttcttcatcgtcaataacgcaggaccaggtttcaccactgttggcggataattcggtgataccttcgcgcaatagctccggttgccagctattttcacggcgcaggatatatactttagctgatttgacatcaataaaatacattttatcacgggttttattgattgcaggtttacctgctttgaatccgcttatcagggttgtaaccaggttctcgctctctgaaatcaggcgtacccgttgtttgtccgactctactgctacaatgttatctcctgccactatgccgacagcaaatacattattgaatagtgcatcgtagatgtttccatcggtatctcctctcttattgtaggttccgcaaactgtagaaactttctgtacctgcgtgtaggcaaatgttttgtcgatggtaagctctttatcgtctacaacgactttaacagaattattaccgcccggttgtttaggtacggtacagtaaatagaagttccgtcacttgatatgatgttagcctctttggtatcggcaaagatcactttcatcttggacaggtctgtaccgaagtttccctgaacaatgattttgtcacctattcctcctttttccgggataaagccggtcagtgcctgaggctttgagggatcatacttgttggtgatgacgggatgtttcacgatgtcttcattgctacaactgctgatgaagaacagggccagcaacagccagctttttctttggattgatttaagaaatttgtctttcatatatattattattaaaaggattggtcactgaaactctttatccttgttgttgatttacggtctttaaggccgatgcaaataaatatagaaaagaacagggaggagtactcaaatgaggcagaaaggggtacagagcggggaatgcgttatttgtataccttaactgcgtcaaaaatacacttgttgctggagagggattttgttgtagtataggggaaagcaaataataaagtagcaattggttggaggaattcaaaacggaaaatgaaaggaataaaatgatgagcaataaactccgccaacgggtaagtcgtttatttatcttcttcctttttctgatattcggtaggtgttacgtcaaattcctttttaaaacacttcgtgaaatactttggattgctgaaaccaaccgcataggcaacctcggagacattaatgaaaggctttttcaggagtgtacacgcatgtttaagccggatgttgcgaataaactctactggggagagaccggtcattgctttcatttttctatttagagtggacttggaaacgttgagttccgaggcaaaagtatctatatcaaattcggtttcaatcagatgttgctctatacattcgatagctttttccaggaactgctcgtcagtactctgatattccagtgctacaacattgatttccgtatcgactctgaacttctcttgtcgcttctggttggatttcattagattgtcaatgcgtgcattaagcattttcatatcgaatggtttcgtcaggtatccgtttgctcctgcattgaaacatctcacttggtcttccactgaactttttgccgtaagcatcaataccggtatatggctggtgttgatgtcctgtttcattgttgcacagagctcgattccatccatttcgggcatcatatagtcgctgaccatcaggtctacgtcttcgcttcttacaatttccaatgctttttttccattcgtagcagtgagtatattgtagtgtgttgccaactttcttttcatcaatagcaggaactcttcattgtcatctaccaataatatcgtatcttctttctcttctgtatcttcattcggtactgttgacggtatttcactggtttcgataatgtcctttatttccggataataattccggtcgatagggattagaacagtgaatctggaaccttctccgatgctgctttctacctggatgtctcctttatgtaaggtcaccagtttcttggttaatgaaagccctacaccgtttgattgaggtgcataagctgttttgttcacatagaatggagtgaatatcttggatatttctttctggtctatgccgattccttcatcctgtacctctatccggaggaatcgggaattatccttttgcagagtcgatacattcagctctacttttttatcggcaggtgtatatttggccgcattcgagagtatattgtacagaaccttgtctattttgtcaaagtccatatatccccaaatgtctttttcttccagatgaagactgaaatgaaggtttttcttttcaatgatcggtcgtatgcctgtatggtagatttcacggatgaagctgctgatattgccataggtaggggtgagtacaaacgagtcgttttctactttccgaaaatctagcacttgctggattaagcgttttaagcggagcacattacttttcaatatatgtacatcttcctgtggagatgcctttgtttcttccaaatcatctgctacgcagctgatggtagtgagcggggtgagcagttcatgacttatatgggtgaaatattccagtttagtcttggtcagttctttctggaatctaacctggtcggaccgtcttatcctgtgcaggtaatagaacatgatggaataaaggatcagaatgatgagagttatataggtaccgtatgcccaccatgtttcgtaccaagccggctttttatagatacgtagttctgtgacgtcgtctttccagtagccgtattcatctgtagagcgtaccttgaaagtatgatatcctttaggaattttattgtagaaagccgaccgattaccggtttcggtgtatacccactctttgtccacaccatccatcttgtaggcgtatcttattctcgatgttgctgtaaattgaagagcggagaagaagatttcaagattgttatcttcgggctccaaccagatgctttgggttgataaatcattcgactggcgctggggattgaagaagaaagaattattggatactttgatatctgttatgatgaccggattggaattgatcttcttagatgggaattttgaggaagccatcgatacaaagccaccatgcccaccggcataaagcttgccgttgaacaagtctatgacgtccttcttgaacgagtttatctgaacggattcgtctgaatttgaataatgaatgtatctatctgactggatatcataggcagtcaattgtcggtttgttagtatccaaagggtattcctgtcatgtttcatccctaaaatagactgtccggtcattccgcatgagttgctgaagtccttcattatctctgagttgagatccatttgcaggatggaaccttgagtagtggcaatccataaatggttttcctggatcactatcttgtcaatattgttactgggtaaggatgaattttgggttgagtattgtttaatcggtttcagtttatcccctaaagaaaccttatgtaaaccggaatcttcggttgccaaccagatgttaccgtgtccgtcttctgcaatagatgtaatgttgggcagagagaattcggggatgataaagtctttgctgtccggttttagatagagctgtccggtggtagctacccataaattccccttactgtcttcatacatggatgtaatgttgccagtagtcccctttggtgtatataagtcctttgccagtaggtactcaatttctcttttactgtttagttttgccttgtagagggtgggttggtctctgcatcccagccagaattctcccggctgtttcgaacggaggatatatcctatattatgcactccggaatttgtattcgagtagtcatagaatttatcttgttctatgtcataccagcagagtccccaacgttcctgattgaaccagagcccgttgttggggtcaatacccagagtggttatattcgtgtcgaaacctacatgtcttttcagtttgggcaagaagttattagctatggcaggatttcccattagcaagtgatacccgctgtcataggccccggcccaaaggttgccttccctgtctttgatgatctggctgaacattttgttataatcgaacatatacgagctgaggtccactttttccagatgtccgtccgccactttgaaagcataaagttcgtggtagccgaatatccatatatagccgtaaacatcatcttgtactacactgaagaaggcggtttcaggctggtgcagtttttcattgaagatttcttgatgcgtgtacattttatcctctgttgcatccggatgaaaacggtagataccgtctccccaagtcaatatccaatattggtcatctttgtcctgaaatattttaaacggattattattcgctccgagtgtagggaaactcataaatgtatctgtattcttgagatacttatataaacctcctccccatgtgcatacccatatattgccgaaatgatcttcatatattgagtttataccattattgggaaccgccgggatcaaatttccgtagcgcttcttcaatgaatagtctgaattatagtgagaaacctgattacgggtacatatccatagttctttccggctatctaccaacatgaagtttatccatgtattctggatttctgtatctgggaatggccgtatctgatagttgcttttatccaccaaattaaccccctgtcttgttcctaccagcaggcaattatcatcttcagcaaaacaccagatgaagtcatcggttaataaatgaggctggttaaagtctgatttgaaagtctggagttggtatccgtcatatcgtcctaagccgtttttagttcctaaccagatgaacccattctgatcctgatgtaagtctattacttcattggaaggcagctgctccagaaaaggcatttgtttggctattatttgctgtgcatatgaggaaatgctcattaataggaagatgacaatgagaaagggggatacatatatctgaatttctgtacgatgaattctgttttccataatgttacaaggtattttctttggtggcgattgcaaaaatagggtattattggcaatacttcaatcaaaatggcatttttgtgaacctccctgtaaagtatgggcataaaaaaaggagtaccgctgtactccaacctttgttaaccttaaatctaatactatgaaaaacacagtgcaaagatacggacttctgggatatctgcaaataaaacaaataaaaaagagtgttttataacatgttttagtaaaagtattgtttttgttaaggcttactaaggatttgagtccccccagtacttgttttctaaaaaagaattatctttgcatggctgcgaaaatagctgcacttttgcatattaataaatttataaagaataactactgtgagcgaagaagatattgtccttaccccgatgatgaaacagttcttggacctgaaagccaagcatcctgatgccgttatgctgtttcgttgcggcgacttctatgaaacttattctactgatgctgttgttgcagccgaaatcctgggaattaccctgactaagcgtgccaatggtaaaggaaagactgttgaaatggcgggattccctcatcatgcactggatacgtatctgcctaaactggtacgtgccgggaagcgtgtagccatctgtgaccagttggaagacccgaaaatgaccaagaaactggtgaagcggggtattacggaactggtaactcccggtgtttccatcaatgataatatactgaattaccgggagaataacttcctggctgccgtacattttggtaagggaacgtgcggtgtggcatttctcgatatatctacgggtgagtttcttacagcagaagggcctttcgactatgtagacaagctattgaataacttcgcgcccaaagaagtactttttgaacgtggtaagcgggggatgttcgagggaaatttcggaagtaagttctttactttcgaactggacgactgggtatttacagagaccaccgcccgggagaaacttttgaagcattttgaaacgaagaatctgaaaggttttggtgtagagcatctcaagaatggtatcatcgcttcgggagccatcctgcaatatctcatcatgacgcagcatacccaaatcgggcatatcacttctttggcacgtattgaagaagataaatacgtccgtctggataaattcacggtccgtagccttgagctgataggcagcatgaatgatggaggcagcagcttgctgaacgtgattgataagactatcagtccgatgggtgcccgtttgctgaagcgctggttggtgtttccgttgaaagatgtactgcctatcaatgaacgcttgaatgtagtggaatattttttccgtcagccggatttcaaagaactgatcgaagaacagttgcatttgataggtgatctggaacgtatcatctctaaagtggctgtaggacgtgtttctcctcgtgaagtagttgcattaaaggtagctttgcaggctattgagcctattaaggaagcttgtctggaggcggataatgctagtctgaaccgtatcggtgaacaactgaatatctgtaagtccattcgtgaccgcattgaaaaagagattaataatgatcctccgttgctgataaacaaaggtggtgttatgaagtcaggcgtcaatgccgaattggatgaattacgccagatagcttattccggtaaagattatctgctacagatacagcaacgggaaagtgaactgactgaaattcccagtctgaaaattggttacaacaatgtattcggttactatattgaagtgcgcaatacacataaggataaggtaccacaggagtggatacgtaaacagaccttggccaatgccgaacgttacattacacaagagctgaaagagtacgaagagaaaattctcggcgccgaagataagatattgatactggaaacccagctctacatggaattggtgcaggctctaagtgagtttattcctgccattcaggtgaatgcaaaccagatcgcgcgtctggactgtttgctgtcttttgccaatgtggcacgtgagaataactatatacgtcctgtcatcgaagataacgatgttctggatatccgccagggacgacatccagttatcgagaagcaacttcccataggagagaagtacattgccaatgatgtggtgctggatagtagctcgcaacagatcatcatcattaccggtccgaacatggcgggtaagtctgcattgctgagacagacggcgttgataacgctactggcgcagattggcagcttcgtacctgccgagagtgcacatatcggtttggtagataagatatttacccgtgtaggtgccagtgataatatctctgtcggagagtctactttcatggtggaaatgaacgaggcggctgatattttgaataacctttcttcgcgcagtctggtgctttttgacgagttgggacgaggtacatctacgtacgacggtatttctattgcctgggcaattgtagagcatatccatgaacaccctaaagcaaaggcacgtacgttgtttgctacgcactatcacgagttgaacgagatggagaaaagcttcaagcgtatcaagaactacaatgtttccgttaaggaggtggataataaggtcattttcctgcgtaaactggaacgtggcggtagtgaacactcctttggtatccatgtggcaaagatggcaggtatgccgaaaagtatcgtaaaacgtgcgaatgacattctgaaacagcttgaggcggacaatcgtcagcaaggtattgcaagtaagccgatggcggaagtaggagagacgcgtggcggcatgcagcttagctttttccagctagaagatcctgtgctctgccagatacgtgacgagattttgaatttagatgtgaataatctgaccccgctggaggcattgaataaattgaatgatattaagaggattgtaaaagggaagtaaagcttcccttttttattcttatccagtgacgctattcgttgatagaatccatatctgtcaattctttcttcacactatccttctgctgttccctatattggcgtggtggcataccgaaacgctgggagaataacttatagaacgttccgcggttattgaaacctgtcttgtccataatttcctcaatggtatagttctttgtcagcagcagtcgctcggccattgtgaggcgatattctttgatgatatcagcaggagatttgtctgttataggttttaatttacggtagaactgacgggtgctatagcccaggtcactgctcaatagttcaacggataagtcagggtttgtgatattcttttctatggtttctatcaccttatccaggaattcctgatcttctttgtggatacagttcccgttttccactttgaatgaactgaatatggaactataatattctttcaggtccgattctcttttaatcaatcggtagactactttctctaagtattttacattgaaaggtttcgtcacatacacttctgcaccagcttcaatgcctttcacctgatcgtcttcgtgatgaagggcagacagtagaatgagtggaatatggctccataacttgttttgcttgattttctgggcaaaggaaagcccgtctatttcaggcatcatcacatctgaaataatcagatccggctgcttcagttctaggctggccaaagcttctgcagcgttattgaaagataatacattgtatttatctacaaatatttccgagacgaaccataacatagaaggatcgtcgtcaatgatcataaccgtgtgcttggaagtgtcgaaattaacagtggtctgttccagttccatgggctccgtatttgtagtcagaggtcctgttgcatacactttttggggtgtttctgcttcctgtgcagtgggcgatagttccggtaaagtgactgtaaatgtagttatctcattctgaatactgctaacattgatttcaccgttcaacagagtaaccatattcttacaaatagccaatcccagcccattccgtgaattcttgccattcatttcaaaagaatccaatatcttatagcgatcgaatatctttgcaagattctctttcgctatcccctttcctgagttggatatattaagggttagaagctggttttctactttcagaccgatggtgatattcccttcttccggagtatatttgaaggcatttgagatcaggttattgacgatcttactgaaacaactgatatccgtattccattcaatgtccggttcaatatccaaccgatagttcagattcttattttcagccaattcacagaaggattccgctatgttccggagtttgtccgatacggataatctttggatagaaagcaccttatgaccggtttccagtctgcggaattccagcagttccagaatcaagccattcagtttttctgtattctgctgtatcatcttcccgtatttgcggatgtacgaatcagattgcgggtaggcaagtatcttttcgcacggaccataaatcagcgtcagtggcgtacagaattcatgagtgatgttggtaaagaagcgcagcttggactcatagacttcttctttcttttcccggttcaatttctcaatcatgcggtgctgcttccggcggtattgatgaactatcctgtaaacagcaagaatgcagaacaaagcgattaatatgaaatagagaatatatgcccaattacttaaataccagggaggagtaatctgaatcagaagtttctgcggttcgcactcttttccattcatgttattcttgtatttcactaacaaagtatattgtccgggtgcaagattggagaagatggcgctggccgatgttccactttctatccactggctgcttacttcgtccaatttgtaagaataagagtaattgttaccatttatataatctattgccataaaatcgatgcagaagaagttccggctataatccagctgaagtatcttctttccttttttgtcgtggagaaaatcatgaatattgtattcttttccgaagatagataatcctttcaggtttatttgaggcatatagtctgccataatataagcattaggcttgacggtaacaaatccgtttgtccctccgaagaacaaagtttcggtccgcgagtctttatagaaagctccatcactgaattcagtgacttccagtccgttttcccggtcgtaagtctgcccggtattggttttaggattgaaccttaccagtccttgatttgtgctgatccaaaggttattttgctggtcttccaaaatgccatgtactgtgttgtttgagaaaaggtcagccctgtcatgataatgtgagtaatcttcattgaagtgaagtagtccggaactggttcccagccaatatcctttctcatttttataaatggcgaaaatatcattggctgtctgactgttcactacattatcaaacctgtatggagttagctgttcggtttcgacattgagccggtaggctccatagccacgattaccgaaccaaaggatagaatcattctcctggaaggaggtaaagaaataattggaagccatacgcccgtcatccagaacaattctggtagccgatttaacggaaggagagctaccggctttatccaaaataacttttacgataccttcacctacagtggatacccataaagtggtatcatttagttcgttgatagagtgtacatatttcaccttctttccatcggctatcactgtaaacgctttcagttgtttattctggtatgaatagtagttaagcccgttttccgttccaatccatagtctgttcgcagaaccgggggcaaagcaatagacggtgttgtcggttaaagtactgttgctgatggaaatccggtcgaaagaaactgctgcattggtttccggagaataattcctgatacgcaatatacctcctcctttggttcctatccataaggtttgttcctcgtcgtagtaaacggtacgtacggggttgtttatctggtatacaggagtatctagcagtgtattggtaatggagaaagtatcattgaaatacatgtataccccttgtccgtctgttcctatccaaacaatatcctgatatttgtccttcatcaggcagaagatgccggaatggatttctgtatcttgcatctggtattttattttctgattggacatatatttcaatacgatcaatccgctacttttgaagccaatgtaatagtcgttttgttgtttgatgatggaagaaacttctccgcgtgtttcgacttctgctttgagatctgcaataaagtattgctgttgatttccgaagtcatattcatagagtgagtaggtcttatcgatgaaatagatcaggtcttcttctgcgaatgcccataataactgttcggaatgtttgaaaagattgttgggggtgagggctatctcttctttattcttgattatctgatagctgcgggtgtcattattcgaagtgaatacccatagaatattgtttttgtcgatgatagtggataatacgtgtccgaatgctatttgaggtacttccaacttttggaagagttgtttttccggttgatagtaatagatatatccgtcgtcttttacaatgaaaaggtcattatccctgctttttgccatatagttcttgtctttgaactccgtaaagcttttggatgtctggagtttagtatccagacggtccagtccatagttggtctgtatccataatacatccttttcagtctccatgatgtcgttaatcaggtttccggataatggggctttcgtcgggttgacaggattatatacatggatattggtgccgtcgaaaatattcagaccatcacatgaaccgatccagatgactccctgatgatcctggtaaagggataagatagcactgttggataagccgtttttgtttgaaaattgccgtagactgtatgcatgaatcaaatgcggaaagcagcataagatgcagataagcagtgaaacttgagggaagtagtgtttgtttttcatatctgtatatcggactaattaggtattgcaaagatagagaattatggtaggatatggttgggaagcatagaaaaaagagtaatacttttctgacttttttgtgcgttttacagccatagccatgtaattacacttttatggcataaatataggtatgcttttaggtaagtgccgctatttttgcgattgataaatatctgtattattcacaatagaatattttactatgaaattaccagttatcctattagcatctgcgctgctttgttcaggtagtatgcatgcacagagtgcaaaaccggagaaaaaagcgaaagcttatatggtggcagatgcccacctggatactcaatggaattgggatgtccaaaccaccatcaaagagtatgtttggaataccttgtcccgtaatctgtttttgttgaagaagtatcccgattatatcttcaattttgaaggaggtgtcaaatatgcttggatgaaagaatactttcccagtgaatatgagcaactcaaagcatttgtgcgttcaggtcgctggcatatcagtggcagtagttgggaagcatcggatgtgctggtaccctctgttgagtcttccattcgtaacatcctgcttggacaggaatattacagaaaagagttcgggacagaaagtacggatattttcttgcccgactgttttggctttggctggacgttgcctactattgccaaacattgcggtctcatcgggttttcttcgcagaaactcgactggcgtaaccatcctttttatggagagagtaaacatccttttatgcttggattgtggaaggggattgacggttcttctattatgcttgctcatggctatgattatggtaagcgctggaataacattgacctgtcggaagataaagaattgttgggactgactaagcgcactccattgaatacggtttatcgctattatggtacgggtgatacgggtggttctccctcaataggctctgtcagttctgtagagaaaggtatcaaggggaacggtccgttagaaataatcagcgcaacgagcgatcagttattcaaggattatcttccttatgaaaaacattcggaattgcccgttttcaacggtgaattgctgatggatgtacatggaaccggatgttatacttcgcaagctgccatgaagctttataaccgtcagaatgaacttttgggagatgctgccgaaagagcggctgtagcagcggattggttgggtatagccggttatccgggtgaaagtctgacagaagcatggaagcgtttcattttccaccaattccatgatgaccttaccggtaccagtatcccacgtgcttatgagttttcgtggaatgatgaattgctttcattaaagcaattttcaggtgttctgacagcttcggtaggggctgtttctgagaaaatggatactcgcgtcaagggtattccggttgtgttctacaatgcacttggatttccggttacggatgtagcggaggtagcgattgaagctcccaaattccctaaaggtgtcagtgtttataatgcggaaggcaagcaagttgcttcccaattactttcttaccggaatggaactgtgtatttattgatagaagcaactatacctgctacaggatatgccgtgtatgatgtccgactttccggaagccagaagcaggcagattcttttgtttcagaaacaacagtggagaactctgtctataaaatctcattggataagcagggagatataatctcgctttacgataagaaaaacaataaagaacttgttaaggacggcaaatctattcgtctggctctttttactgagaatgaatcatataattggccagcttgggagattctgaaaaagactattgaccgtgcacctgtttctattactgaagacgtgaaaatgaatctgtgtgagaatggtgccctgcgcaagactttgtgtatagaaaagcgccatggcaaatcgttgttccgtcagtatatccggctttacgagggagaattggctgaccgtatagacttttacaatgagataaactggcagtcaacgaatgcactgctgaaagcagaattccccttgaatgttgataacgagaaggcgacctacgatctgggtataggcagcgttcagagaggtaataatatattgaccgcttatgaagtatatgcccaatattgggcggatttaaccgatagtgacggcagttatggtgtttctattatgaatgacagtaaatatggctgggacaaacctgataatcatacactccgcctgacattgcttcatacacccgagactaagaacaactatccgtatcaggaccgtcaggacctgggatatcatactttcacttatagtttggtagggcatgccggcggtttggacaaggcgcaggtcgttaaggagtctgaagtattgaatcagcgtctgaaggcttttgctgctgagaaacattccggaacattgggcaaagccttctctttcgcatcttcggacaatagtaacgttgtcatcaaagctttgaagaaagcggaaagttcggacgaatatgtggtgcgtgtgtacgaaacgggtggcaaagctccacaaaatgcagtgctgacatttgcaggaactattacaagtgccgttgaagcagatggtacggagaagagtataggaagtgcggacttcagcggtaatcagctggaagtctccatacagcccaacagcatcaggacctataaagtccgtttcaatgataataagaaggaagaattgcgatgcgaacaactgcctctcaattatgaccgtaaatgtttcagctggaacgaattccgttgggaggctaatttcgaagccggttattcttatgccgctgaattaatacctgccgatataactgttaatcgtgttcctttccatctggaaacaaaagaagaaatgaatggtatgttatgtagcggaaataccttgcaactgcctgccggacattcctataaccgtttgtatatactggctgctgcggcaactgctgaagaagatgttagaggcgtattccaggcagggaagaatttgcaggagattgtcgttccttcttataccggtttcatcggacaatgggggcatacaggccatacacaaggctatttgaaagatgcagaagtggcctatgtcggtacacaccgccattccgctgagggagatcatgcttatgagtttacttatatgttcaagtttgccattgacatccctgctaaagcaactgaggttatcctgcccgataataaagatattgttatttttgctgctacattggttgaagaaccatatgcacctgttaaagcactatctactttattccagactgccaatgaagatgataccagcttgcagaagacagcagaactgaagatcaatctgttgaaaccggaacatatagttgcttggtcgggatataccaacgacaatgagaaacctgcatttctcattgatggaaacgagaatactaaatggtgcgatacctctatgcttcctaactatattgattttgatttgggaatggaaaaggaaataagcggttggaagatggtgaatgctgctcaggaaagctattcttatatcactggcagctgcttcttgcaaggccggaataactcgaatgaagcatggcgcacattggactttgtaaccggaaacaagcagaatgttatcaaccgttctttgggtaagactgagaaggtacgctatctgcgtctgttggttactcaaccggtacaggccgctaatggcaaggacacacgtatttatgagtttgcagttttttaataagtatataacattatatcaataacgagaatattatgaaaagtctttttgttctagcttcagtttttttcatagcggcagaagtaaatgctcagcaactgacaacggaaactccgttagtcgacaaagcctttacacttgctactaagacattatataaaaatgctcctgacagtttgattaaagccgggggacaatatggcggtgagtggacacgtgatgtttccatcaatgcttggaatgctgccagtctacttataccggagaaaaccgcttattctctctggagtgttacaatcgatgaccggaagttgataggacatcaatactgggatcagattatctgggttatggctgcctatgatttctatctgaaaaacaacgatcttaactttctgaaacaagcttatatagcttctgctaatacaatgaagaaattggagaaggaagcctatgatgagaaatacggtctattcacaggcccttcggttttcaacgacggtattgccggatatgaagagcccatctacgaacctaccaataaatcttcttatgtgttggaccatccaggatcaaagactatcaagtgtttgagcacaaattgtatttattttcgagcatatgagttgttggctgatatggcacgagtgttaggagataagaagaatattaaggaatacaagcaaaaggcctctatccaaaaggaaaatatacgtaaatatctctatgataagaaacagaaccgtttgaactatctgattgatggaaatggcaaagtgcatgcttatcaggaaggattgggtatttctttagctattttgttccaggttgtgactcctcaggaagcaaaaaaaatcatcaacggagtttatatgggaaaatacggtttgccttccatttatccggcatttaaacgtttctcaaaggagcatcccggtcgccataatcagattgtgtggccatttgtcaatggcttttgggcggatgcctgtagcaagagtggacgagatgacatcttcatgaaggagatgatgaatcttgctgatttagccatcaataagggtaataactgcttttatgaaatatataatgaggatacgggcaaggttgatggaggctggcagcagggtggccaatggaattctgtatatgatcagacttggtcggctacggggtatataaacatggttttcagtggtttgcttggtatgtcattttcaacttcgggggtaacttttgcacccaactttaagttgatgaaagatttgggttttaaagaacttaaagacttgcgttatcagatggggacattggatgttaagatggtaggaacaggcagtaagctatccgccatgttggtaaatggtgttaagtataacttaaagaaccccattgtcgctactcaagaccggacaatcatagaatttgtaatggcagaataggccattataaatggtcaccctcatactgagaagcgaggccaactgagcgaaagtgtatttgatatttatcctattatccatttactgcccggtataaatgagatgatctttgctgttacgaaacagcaaatgaatgtactcactgcaatacaaggtatagccgcaacggtaggcagtgccagagtgtgcttgaatactgttacccacaacccgagccagaatatatgcatgagatacatgccatagctgagttttgatgcttctgttagaattcgtgggggatttggacgattgatgcatgtgaaaataaggaatgtacccgttgtaagaagcacacaattgattgtacagaaagcccatcctatttctattacaggtgtggaaagaatttctccgggcacagcctggatatagaatgaataaatggtccatacagctccgatgatcattagaatacctcctacggtgagacgtttggaacggttccatgtaaggtgaacacgtatgtaatgtgccaatacgaggtatcccagatagcctgagaaataccatagcatgtggtactcattccagaaacattgcccccatacttcaccacaccagcggttgagatacggcatacacgttgataacaggaatagcccaatgaagaaacgttcttctttctttgtggctttactcaaccacggtgatatgatgggtatgaacaaataaagactgatcaaaggatacataaaccataagtgtccggcctgtgatgggaagttcagtaatattcgcgacatatcgttcaatgatgtctctccattgatcgctccccacaacattggtaaggtactatagagtatcatgaaaataaaaaatggtggcaggatgcgtaagcagcgctggcggtaaaattgccatgtggtctgttcttttttcatcggtgcaaggaggaaggcggaaacaatcatgaatagtggtactgccatgcgtgagaaaccgtcgtaaactgctacccatagtcggtctgtttcactggccaaataagactgaggtcctaccatatctgtagatccggcagcgccataaaagttttcactggcgtggaccaaaatgacaaggaaacatgcgaatacgcgtacataatctaaaaaaacaatacgtttcattttttatttgagtatttctgttaataattttgtgttaaagtaattctcagggggaggagattcaaaaaa

SEQ ID NO: 6289 - DNA, 23601 bp, Unknown
  gut microbiota DNA sequence
cttatagttaacttatctccctttctaagtgtacgctctttcatacgataatccatagcttggcggttagcgtttattccgtcttcaaaagaggtcatacggtaggtttgtccttctttcaggaagttcaggtttagttcaaagtctcgttgttgctctctattattggtcatgccaccgatataccacttatctcctttgcgtttggctacgatagcgtattcgccaactttggctttcagagcaatggtttcatcccaagtttgtggcacttgggtgatgaagcgtgtacattcgtcattacggtagtagagagttggattgtctgccatcatttgaattccgctttcgaatataatgaataatcccatctgataagcgcgtgtaccgatactggctgaattgggacgctcggaacgatagatctccggttgcatactcagcatagcgcccggagtataatccatcgggcctactgcatttctcatgaaaggcagataaacgctattgtccggttggcatccacccatttgctccatacctcttactccttcataagaaaggacattggggtatttgtattccagacctgccggtttaaatgatccgtggaaatcgacgaacagatgatgttcggctgcttctttggcaactctttcataatagtttaccatccattggtcgcttctgtccataaaatcaattttgacacctttcacaccccatttttcaaatgtctcgaacaaaccgaagttcttttctaccgttaaccatgtcagccaaagtacaattcctacattcttttctttaccgtagcggataagttcatgaacatccactgttggattgggagtataaggatctcttgtggacatggcccagccttcatccatgatgatataaggtattccatagtgggcggcaaagtcaatgaaatatttataagtatccagattacagcctgctacaaagtctacatccgctccgtaaggggtggcaccattccaccattcccagcttgccaatcccggtttaatccaagaagtatccttcaatacatttttttgtgcgagctgataggtcatggtattctctattaattgttcgtcgtttgtgctgatgacaaagtagcgccaggggaaactgcgttttccattggttcgggcaatgtagcttgcttctttctctattttgaggctacggtctccgtcttcaccgaattccagaggaactttgggaaatatggaagacatgttgttatcgccattacttttaaaaaacaaagccggatagtctgtcaaatctgattcactgatcaggattttatattctttccgtgtatctataagtacaggtaggagtatcattggatctgacgttttccattcattactttgtatgtggcggtactcttcttcataagctgttttaaaaccgcccggttgctgcacatgaagcagataattctccgggaagtttatctgaagagtttcgctgttcacatcgattattcctttcttgtctgtaatgaaacgataggcgactccgtcattgaatgcacggaattcaatagaataatctcctttgaattttagtagtagttgattgtatgtgttggatacgatggaatattttagtggaattaccggtgtaagtgattcgtttatgctttttctgcttacttttgtgagtttaggattgcttcccaattgttggttacctacttccaatcgaagagcacattgttgcagcaatatgtcgttcctgtacatcacgtcgtactgaatcttatctgaaaggttaatgactatccggaggttaccatccggtgattgaagttcgtgtgctttttgtccgtacatgcacaggattgtgcaaaaacttagtaataaaaatgatagttttttcatgataatagtctttgatttcctatttgcaaaggtagcgtgtgacatgaataattagttatagatttgtgacattatagtacgtttccagtcttgttagatctttagcgttacttaacaccaccaagcagtgcaaactgatgaacagttccaatatcaatcgcctaagatgtcttacctgccataacagctttgcaaattacggactgaaagtatacttttttctagaaaagaaaaatgtattgcaacaattaatgcttaaggcattcgttataacatcaaggaacagatatgattactctattttagtgcgcatgtattgtgcaggagtcattcctgaaatctttacaaaagctcgatagaatgtgctacggctattgaaattagcctcttcggcaatcgcgtcaacggaaagataaggtttttctttcatcagtttaatggaatactctattttcagaccattcagataatcgttgaaattgtcagagcccgcatatctccgcaacagggggctgagatcattcttgttgatatcggtgacacgtatcaagtcgtcacgcccgaatccgggtttcaaaaaaagcttttgttcgataagttggctttccatcttcatgaacttagcataattttcatcactatttgtccccggagctgccacatctgtttttgtagcggctgttaatgtctcttcctcaggcagggatgaaccagttctgatttctttcgttgtttcatgagtatttcttgtttgtgtaaacaccttacgcaattcttcacgttgcgccaacagttcatctatctgtttggctgcgatacggttccgcatctttgttttttgcaaattcacaaaagtcgtccaaaggatgataatgagcagaaccgtcaggacacacgagcctgccaacagaagcatacgccgttcggacaaagcgtgagatttggccaactgcaactctttttctttcagctcgaatttagaagcgtactcttgtgccttacttttgctctcgcgggtataaatgctatcttgcaccacccagccacgttgggtgaagacatcggctaagtcaaaacgtttcattccacggctggctcgcgcacgatagttgagcaaaatcagatattcatagcttacggtatcatttgtaaaagcagaaatgcatgtatcgcttagagctgccgcttccgcatattgattgatattcagcaaataaggtacactatactgtttgccgataagagttttcgaaaagctggtagattggtatttcctgaatatttctgttgcctcttctttcttaccttcatcgtgcaacagcacagccattttggcataaaggaagccatattgctggtcaatatatcctggaggaggtccggggagcccgctcatacgctgtatgacggtttcacggcggtaacctatttcaattgcttccgccatccggttccgattgatatagaaggacatgtattcaccataaatagtcgagagacgagacatttcacgcacatcatctgttccttccagcagcttcaccgcccgctgaaaatactcctgtgccatttcgtcgtttgtcatgcctatgcagacgcgcgccattacggagtacatatctgattcttcttttttacatgccagattgcgtgccagatcaataccttcatggcacacaccgatgctttcctcatatctgttctgtctttccaagatatttgccagcatcgttatagatgaaagtttacgctccggtaccaaacgtattgagtcgttctgcaacgcacggcgcacacagatttccttggcagtcaggtcgtgcttgatttcataacacatcgctcgcaatagatcaatccgaaagggaacgataccggaagccggacttttttccgcttcgtccaacagtcgtaaagcgctatccggatagtttacataaatagaacggatcgtacgttcggtcagcaggctatcgggaaccgtggcactcgtacgaaaagaattaaccacccaaaggaggaagaatgccaagaaacaactcaatttcatttttattatatttaaaacattggcaaatgtaataaaccgtcttgattaagccaaaagatcatctcttcaaccttgtagttttcgctatgttttccagtttacacccacattgagtaggcatcataacaaattatatatcaacgtgtatagacaatttgagatatactaggacaatttgagatatactaggacaatttgcgacatacactctcgaacagttcacttatttttgcccaggttaaaaaaacatcccgagtcattatgaaacgaagtaaattaccattcttttctataaacacagatattgtgttcattattcaaatagtcacgacgataatctcattggtaattgtggtggtgtctattatttttttagtgatcggataatgtgcgggaatgatacgagaacaataaaacaacaagaagtaaaacaaatattaatcaaaaaaaggatcaaaatgagaatacataatttatggaaaaatgtgtctgccttgctggtggcaggttgtatctgttgtaccatgccgttgtgcaacaacgacgaagcaccggcaaccatgcaggtacagcactgagttcattggctaataaacggaatgaagcaggcgaggcaaccttgaaataaccgtttgatattaagtaataagaataaaagatagatttcatcatggcaaaaaacaagacaagaattgcagatgcgacacgatgtctgatgtgttatcagcctatttgtgacatagcttgtcagaaaaaggttttcccggccggaattatacatgctttacatttgaagaatgaggctggagcatacttgcggtcagcagaaaatgtttcctgcctccattgtgatgatgcaaagtgtgaaaaagcctgcgcacgcggacgggtagattctccaatccgaatacaggaaatttgcagatatgtatcccaaatggaaaacatatcacgagagagcacacaagcagagttgtcggtcaacttttgtggcatcagatgtgaaaatccgtttttccttgcttcatcgccagtggcttcgtcgttcgagatgtgttgccatgcttttgatgccggatgggcaggagtatcatataagacaatcagtttctatcagagccgggaagtttctccccgctttgatgcgcttcccggagaacatcccttttcattctgcggattcaaaaatctggagcagctgtcgcctcattccgccgaagagaatttcgagattatccgtcgtttaaaggaacgttacccggaaaaggtcattatcgcttccattatgggtagaaattgcgacgaatggactgtccttgcacgcatggcagaagaagccggtgcagacttgatagaatgcaatttctcttgtcctcagatggccaagcaggggttgggaagcgacatcggacaagatcaggatcttattgcgctctatacccgggctacacgcaaaggaagccgtttacctatcatagccaagatgacacccaacataggcaatatggaacttccggcaatgactgcgattgccaatggagcaaactctttggccgctatcaatacggtgaagagcattacgcgcatcaatactgaaaatttttcttcctatcctgatataggcggacaatcagctgttggaggttactccgggcaggcggtgaaaccgatagccctccgtttcattcgtgacctggcctcctatccaccgctcaaaggtatccctctgtttggtattggaggaataacaacctggcaagatgttttggatttcattttgctggggtgtacggcattgcaggtgtgcacatcagtgatggaatatggttatcgcatcatcgatcatttgaaggaagggatttctatttatatgaaacagcacgacatcgcttcgcttgacgagttgcgcggattggctttgcccaacttagttcagccggagcagttagacagagaacgcaaacttcattgcgagatcgacagccgacggtgcatacattgcgggcgttgttacatctcgtgccttgacggcggacatcaagccatcggatgggaaaaacgtactccgatgattgacaaatcgctttgcgtgggttgcgggctttgtacgttagtctgtccgaccgaggccatttcattagtaaacagtttataaacaacgattaacgctcattgtcccaatagttgttccggtcatttcattggtagttgagccatgtgcatggaaaagcatgaagacaatagcacaaagaaataatatcatactaactaaaataagaatcagaatgagaatatgtaacttatggagaaatgtgtctgtcttgctggtggcaggttgtatctgttgcgccatgccgtcgtgcagcgatgatgatgcaccggcagtcattgaagccgcacagccgtgtgcatccgcttacgaactgaatgaagtgggtgatgtcgccttggaatttgaagtaatccccgaaaacgcccaagtgaacgaggtaaaaatcataggagaaaacagagcgttcgaggcgcaaggcttcacatccaaaggaggaggcaaatggctgttgaatgccagggtaaccgacttcacgcagatcaagcaggagaatacagtcattctatccgttagacagaccggcggagctgccagtgaagttgagcttgtcgtaaccgacccgtacactatagaaaacaagttcacccttgccaatcccaaaggattcaactactacagtgctgataaggaaaacctgtatgaaaccggtctgccggtagtcatcgcagcagagaaacaggaagaccttgccttgatcgacagcaaaaacatcaaggtggttgacggagcagtgtcccataaagtgggagccgtccacttcaatataattcccatgacggaagaaaccggctttacgctgaatgtgaaccccgagaagctggaagaggtacaggaagccatcccgacatacagtacgttagacttcaacgtgcagctgacctccaagaacagccgagtagccagcctgccactgacagttaccgcctgtgcaccgcaggcaaccgtggaagatgatgcgctgaccttgtcgcgatccgagttgggcaaccctgactttgaaaaaggcttcgacattgatgtaacccataaactcagacaaatgggcatattggaaaagagtggattcaaagtaaaaagtcttggtctgttggacgaaaacgggaaatcggtggacgatgggcctttcatcgagacacagctcgaaatcatggatgccgaaggcaacaccaaatgcagcgtgagcctgacaggagatgcccgatacaactatgccccgggcacctactactacgtactgcgttgccgccagccgtgggaatacaatggcaagacatacaatccttcttgtgccaatctgaaattcaaaatcgtaattaaataaacagacgggcaggcgatgaaacagttttttgataaggatttttggaagaacacggccgggtgtaccgtaggcaccttgatcggtatcctgctgacttttggtacgagttcctatttggaaaaccggaacaaaaccgaaatggcacggaaaaccgtgatgcttactttgcacaacctggatgcatccacccgaaatatgcagacgcttttggatgaattgcaacagtacgatacgctttttacacgggccgcttcccttatgcccgaccggctcggccagatggggagtgactcgctgcaaatgttcgtcaatgcattcggctcacgccggttgctgatgacggaccataccacaagcagcattttctccaacagtttcgaagtgtggcaatgtctggacgacgaaaaggtaatcggacggataggcaactgctatagtgtcctggatgtatgtcgcaaagagtacctcagaatggaagaattgcgccaaaaggcctatcaagcctattggtacgaatgtccgcccatgaattaccccgatgccgaaaaggctgcaaaggcactcctcgaacggtacgacgtgcgttatgtattgtccatacattccaacgtcatccaaatgctgaaacatacgcacggtattgtctgccagctgaatgaacgtaacaaacaggtgcttcacatcacacaggaagaattggatgaagtagggaaactcttggagcaaaactcctacaacatcaaatcggacgatatgcagacaccggaaaacaatttgaatgaaaacgaagtaaatgaatagaattaatgcttatgaaacgaatgatttataccaccaaatttatatcggttcttgtcttcatcgccctcatgctggccgcttgcaacaaagacgagtggaaagacgacgtggatgcgctcaagcaaccgatgcccacgggtatcgtcatcatggacgccgtgtcagtcacggcggtgaaaggaacctcatttcagctgcgtttccgggtgaacccttcaggcgtggcagttacggaaggtaatcttgaactcgacttgcagaacagcgacacctacctgctcgtaccacctacccgaagtgccttctctgcccagtcgcggacctcttacgtcaccccgtccgactgttataaaatcaccggagtggaacccgaccgcaacggtagcggtgagattctcgacggccagtggattgtgaccatcgagacccagggtgaagggaatttccgcaacgtttcggacctctacctcgtcatgaactataccgatgcagcgggcgtggctcataaagtcagctcgccggttttgcccgtgcagattgtccccacggcggacgaaggggtggagtttcgctactcgctggtgcagaccctacgaaccgcgcatggggagcttaatccctacatactctacacggacgtaaacacttatcgtaatgcctcgggcggggagtgggtctacgatatcagcttcatcacgaaggctgagtctcagggcgaggcgatgaccctcgattggctcaccctgcacgagaaacaatacgtgtcgctgattcccaaggaaggccatgagttgtggacctcgctcgaagagggcaaagagaagaaggtgagcactgcgtcacaagtggcgatcaccgacttcggcggcacgcagaagattatcgacctgcccatcacctactgtccgcgcacggttattattcgccgagacatgccgattgcagagctgaacgccaaccgcgatgacatcgattacgtcatcgacctgagtgccgaagctgccgaatacgggctgacggcggacatggcttcgcatctgacgcgcaggccgacaagcatcgacttccacggtgttttcatcgacaactttgggatagacgagatcaacacggtgggcgaggacaacacgttcgtcctccaggcgagtcccttcattccagacgaactgacagccggtttcataacggctgacgctgatgccgccatcgcgaactatatcctgcatagctttcctcagtatggtgatcccttggacaaaaacacgttccagttcctgctcgatatggagatccgtatcctgatcaacggtgtggaatagatcgaaagaaaggacgactatatgaaatgaaatactcacaaaaagcattgaaaacttataaaatgtacagatatctcaaaaagcaaacaataatgtttatgaaacgaatgacttatactaccaaatttatgtcggctttcgccatcgttaccctactggcgttgctgactgcctgccgcgacgaggcagacgacgtgatacagcctggcgtacttactgccgacaagtccctgaccgaacagtttgatgcaatctggcacggaatcaaccagaactacgtgttttgggaggcagacccgaccgattgggatgccgtctacagccaataccgtccgcgcttcgtggagctggacaagcaggaagcggttcctaccgccgacttgcagaaactgtatgaagagatatgcggttcgtttattgaccatcacatgttagtccagttgaggaatgtgaaggcaggtccggaagaaacggagcagctcttctatgtccaacccggcgcaatggaggtgaagaaacgggaagactaccaggagtatatcccccgcgaaggcttccaggtatatcgtgacaaactgaagaaggagggacgcatcacgcacgaccgggagttcgtcgataataaccccaatcccgacttggaccacatgttcacctacgttattgacaatgacatcctctacctaagattcagcaacttcagcatcattgcccagttggggaaccataataaatcgggcgaagaggtggcgcaggctgccgccgcggtctatcgcgaatacgccaaccaactcttgttcaacccgaacatcaagggagtcatcattgacgttcgcagcaacgggggaggttatttgtgggacatgttcaccgtattgggaccgctgttgaaagaagacatacacgtgttcgacacaagaaccaagatgggagtgggacggctggactacggcgaatgggttcctttccgggcgcaagtcatcacgcaacggaaattaggcgaactgctcgaaatggaggaaccactgcccgaaaccgactgtatcggtgaccgccaagtggtagtgctgacagacagttggtcagtgagcatgtcggaaatgacagcagagccggtcaagaaattgccctatgccacggtgataggcacacgcacgttcggaggtcatggtcccttgacttctgaaacacacttctccttctccgggcagtttggcgacccggattgtgcaagtgtaagctattatgtttataccagtacatcgatgtcacgtacatccgaaggcgaaatactggaaggcaaagggataacacctgacatcacggtaccactggatgtggaacaatttaccggccagcacatagacaaccaactggaatacgccatcgacttcctgcatggcaaaaaatgagacaataacaagattaagacataaaaataaacaagaaaaaagatatgaaacaaaataaatggatagtaaccagcctgctgcttctggcaggatgcctgttgcccgaccgggcagcagcgcagtggaaagtgggagtgagcgccggttatgcttacaaccagtacagcattgatacccaatatgcatacgacttcaacttcgacgggcgcggtggagtgaccgttggtattcccgtggaatacggcatcctggactggctggcggtacgtgccgactttgtatatctgcaaaagggctactcaatgcaacgtgcctatgaccaaggcttccgcgaccgccgcgaccactacctctcgttgcccgtaatggcacgcttctctttcggcggtgaaaagttacgcggcttcctccatgccggcggctacatgggctattgggcggatagccgggtgaagggtacagaaatatcctgggataatctgatagatgattttttagccgacaatgagtcgtttgtctttgcaccttacgaccgccggtatgaattcatctccaaacgcgacaaccgtttcgatgccggactggtgggcggcgtgggcgtgtgctaccgtatccacccccatatcgagctggaagcggaaggccgttgctactatgcactgacctccacgaccaaggattatatgaaacataccaaacaaccgcaatacaacaccaccttcacaatacaggctggggtaaagtattgtttttgacaaacatattctttaatcactcaaattctcattcacaatgaagaaaacaactacatccaccttcgcacacttcctgctgtggttagtgtgcgccaccctgccgctcggcttcatcgcctgcagcgacgatgaagaccccaccaccgaacagagcgccgaaccggagccggaacctgacgccgactacaccgtcatgctctacggatgcggcggcggaaacttggatgatgccctcatctacaacctctcgcaagtggaaggctacggctattcggacaaggtgcagttcaccggactggtgaaattctcagtcccctatcaaacgggcgatgatgctcagttccaaggcacgcggctctacagcctcacgcccacaggtatggaaaacgagcgcatagccgatgccgactaccgtctggacaatcccgaccacctggcctcgttcatcagcgacgcggcagagcggatgcccgctaagcggtatgtcctcgtgctgtggaaccacggctcggagttcacgcctgtctatgaccagcccagcaactggcccggcagcagcacacgcggcgtggtgttcgacgacaacgttaaggaagccggcgtggacagccatctctccatcttcgagctggaagaagggctgaagcggtcgggggtgcacttcgacctcatctatatggacgtgtgcctgatgaacatgatggagaacatctgccagatagccgactacacggactacatcctcagcgcctcgcacatcacccccggctacggcggtcattacggccggctgatggacaaactggagcaacacagcgaagtgttgcccgccatgcaggaatatgttccgctgacggtggagttgtggaaaagtctggataccaacaactcgtacgacctgtcgctgaccgacacccgcatgttgcaacccgtgctcgacgagatgcgcctcttcaccgacgcgctcatcgaagaacgcaacagctgccagaatgacgccgagtccttggagctgttcgattattaccaactctattccatctaccaattcgaccagtatcccggcagttactccatcgacctcgactattatgccaaccacatcgccaactactgcatgaacgggacgctttccacccaagcctacctgttgtccaacgctttgcagaaaatgcagcccgtgcgtgcaagccaccataacgaaggcatcatacccgaatttaccgtaggcatcacttggatgcccgccgaatactacaacaggaacgacttcgtgatagaggacgcaaacggacaacagtatgaatatgccgactatgccgtcctctacccgatgctgaagttccaccggcaaacaggatggggcaatttccttagcatcaacgagttccagccgaaatcagagaatccataaaagaattcaagtatggcagaagacatcaagtaccagattaacggcctgccggccgacaacatcgtgaacatcatcggaagtgatgccggaagaagaagcggcaaaggcgcttggcatgtggatgaagaaagacgataaaatagaatcttaaataatacattgtttacattaaaagaatgaacaacatgaacaaatacctgaattatctcgtcgcctacctcctttcattggcggccttgtcatcctgcagcgatgacaacgaaccgacacccgttcccgtgccagaccccacaccgagtggctactgcctcatgttctacatgtcgggcggtgaccccgaacacgacattctcctgatggaaagcgcacgccaggctgccgaggccacgggcgacgatgtggcggttaccatcctgatgaaagcctccggcaaaggagaaggcgaagcgcacaacggcacgtgccgctacaccgcacaggacggggtgctgacacaagataccgaattcggcactgtcgatgacttcgccgtcaccgatcccaccaaccttgccgaatttatccgctggtcagcagagcaatacccctgccggcgctatctccttgccttcggcgggcacggcatcactttctcgcccgaaaccgacttgcccgatccggcggatgacacccgtgccgaccggcccggcacccgcgcctcgctgtcggacaacggcaatctcatgaccgctgcccagctgggcaatgccatccgccaatcgggcgtggacctcgaagcccttattgcccactcctgtcagcagggaagcattgagatgctggccgagtgggagggcacggccgactacctgctcggatcgcctttctccatacccgactatgcctatgattatacctccctcatcaacgacctccgggaaggctgctccgtggaagagaccctgaagcgtacagcccatcgtgccatcaacctgtggcaggagttccacaatcagggcgtcagcggcatggtgatggaagtgacccgtctgcgcgacctcagtcccctgtgggacgtgttgcggcagaccctcgacctgatgcacgaatcaatggacgaggtgaacctcacgaccgacgcgccggccgtttacggtgagacctacggcaaaggctacatgcgtgccttggttgacaagtatgagagggaccattccgactttttccagaacacacgggctttttacgctgttgatctgccgggctacctgcatgccgccttcgtacatagcggcaacatgagccttgcctcctacatcaatcggctggacgaggtgctggccgacatcgtggtcacccaccggcaaaccgacgggaagcacgacttcctctacaatgtctataccaacctttccaactacagcagcagtgaggaggcgcgcgaacgctatcacgactgtcgtttcgaccaactgacgggttggggcactttctacgaagatctcatggactatgtgaaccaattgccggacgagccgggtcgtatcctgacccccattgccgatcacctcacaggcaaatgggaagttacgaagcttttctataaggagtatggcgagtgggtacccgaaaagctgcccgtaggctctgcacagaccttcacgctgcgcgccaacggcgagttgttcaggactcgtactgctgcctactggaccaacttatacctatcggactggggagacacggacgataccgactttacgttccggatggacaaaagcctctgcaaaatccaccgcctcaccaagaacaagctggagcttaccgaagaaggctttccccaatacaagatgcgtctccgccgtgtcagcgacgaagacgagaagaccctggccgagcgcatggtgggcaagtggatcctgtccaaacgctaccagaaggtggacggagcatgggtggaagtgacggacgacctgcctctggaatgctggagtgagtataccgaagccggtaagttcaccacctatacgcgctgggccgacgaagaacacctgaacgaggacatgacgtggagagtacacgaactgaccggagtaataacctattggccatcagaagaagcctcgcttgcctacttccggattgccttggaagacgacgacacgctggtcatgaactacgccgagaactacaacccgacccaggaagaacaagttaacacagagtataaggacatattggtaagaaactgagtttacgaaacgacataatttatgaatctcaaatttcaagaaacaatgaagaaatatctcaaccatatactggcgctgtttattgcgctaacggctctgtcatcctgcagcgatgacaacgaaccttctccggttccggaaccggatcccacgccgagtggctactgcctcatgttctacatgtcgggcggcgacaaaaaacatgacattcttttaatggagagtgcccggcaagcggcagcagtatcggatgacaacgttgccgttacggtactgcataaaaattccggtgaaggaaaagacgaagcgcacaacggcacgcaccgttacaccgcgcaaaatggcgttttgaccgaagacccgacattcgattccggtgaggattttcccattaccgaccccaaggaactgacggatttcatccgctggtcggcggagcaatacccaaaccgccactatctgcttgtaattggcggacacggtaaagcgtttgtcccatatgaagatgaggatgcttccgcacctaaaacgcgggctaccctctatgatgaccacaattatatgtcgtcagcacaattgggaaatgcaatccgccaatcgggtcagaatcttgacgctcttatattcaactcttgtcagcaaggaaatattgaaatgctcgcggaatgggaaggaactgctgattatctgttaagttctccgttcagtattcccgactttggttatgactatgcctctcttatcggagatttgcaacaggggcggtctgttgaggaggctcttgcacgtaccgcccaccgcgcaatcaatctttggcaggaatttcacaaccaagaagaatgcgggatggtgacacaagtttcccgaatccgtgacctcactcccctgtgggagacaatgcggcagattatcggcgcgatgaataaatccatagaagatagaaacttcactaccgatgccccggccgtgtatggacaaccttatggacaaggctatgcaagagcgcttgtctccaaatatgtcggcaatgaagacgatttttttgaatataatcgcccaactttcgcattggatattgtgggattctttcatgcagcttatgtgcaaagcggcaacatgagtctcgctccatatataaatcgtctcgatgagattcttgctgatgtaattgtgacccatcgacagaccaatggaaagcatgatttcatttatcttgttttcaatgccttgtcaatttatgataaggagttagatggacaactttatcgtaaatgccggttcgacaaactcacgggttggcgtgatttctatgatagcctaacggattttgtctataactatgaggaggaatgtgagattctcactcccatttccgaacacatcattgggagatgggatgtaaaagaaatgttacgtaagcgattcaatgaatggatacctgcgggaaatgaagcgagcgatttgggtgtcatgatttttcggcctaataatgaaattgtcaaggtaaataaagctggaggatatacacgattgggcattaaccattggattataacagaagggaataaaattaagcttactgattttgatgttgatgctgaaacagatatacttcaacttaccgaaaatgatttagtcctcatggaaacagtctcatatagtaaaatgaaggtacatttccaaagggcaaatgatatggacaagacgatagctgaaaggatggtaggcaagtggtcgctttccaaacgctatgagaaagtaaatggcgaatgggttgaagtggagaatctacccgttgagtgttgggccgaatttttagaatcaggattattaaacagttatacccgtttgtccaccacctctgaaggagttaaaaacgataacatgccttggcgggttcatgaagaaaccggaactgtcatgtacataaatcctgccgatcgagttccgagatttttccggatagcgttggaagacaacgacaatacaatgattatgaactcctcggaaaacttcaacccggagttggaagaacagacaagtaccgagtataaagacattttgattagaaattgaattggattatatattttttaattctaaaacccaaaaacagtgaagaaatatctcaatcatatacttgcgttgataattgcgctgtcgggattgtcatcttgttccgacaaagacgaaccgtcacctataccagaagagccagaggtgaacggatactgtctgatgatgtatatatcgggcggcgacaaggagcacgaccttatttttgctgaaagtatacgccaagcaaccgatgctaccggtgatgatgtgtcggcaactgtgttgttcaaagcttccggaaaaggggacggagaccaacacaacggtgttcgcagatataccgctcaggacggcatcatgacagaagacgggacattcacccccggcgatgactttgccatctataaccccggagaactgacagaatttatccgctggtcggcagagaaatatcccaaccgccattacattcttgttatcggcggtcatggtagccacttttctccttataatgatttaaaagagcaagaaactccaccctcaacaagagctactctgtacgacagctaccatagaatgacgtccgcccagttgggggacgcattacgccaatcaggtcagtatatggatgccgtgatattcaactcctgcgagcaaggaaatatcgaactgctcgctgaattggagggaacggccgacctaatgctcggctcccctttcgtcatacccgacctcgcctacgattacacctcacttgtcaacgacctgagacaagggcgctcggtggaggagaccctgaccctgaccgcacaccgcgccatgaatctgtggcaggagtttcacaatcaggaagttgttggtcttgcggttgtggtgagcaggattggaaatttgacacctttatgggaagttctgcgtgagactattgacaagatgagcaactcaatgcaggatgtcaattataccacagacgctccggcaaaatatggccagacctatggagaaggttatttaagagccttgcattcaaaggtgagtcatgatttggatgacttctttcagacgatgcgaccctattacagtttggatcttgtggatttcctccacgccgcctacgtcgagagcgggaacatgcgtctcgcgtcctatataaaccgtctcgatgaagtgctttcagacattgtggtgactcatcgacaaaccaacggcaaacatgattttctctatactgcctacaccaatacatccgactaccaggctgatgtacgggagcaatatcgcaaatgccgatttgaacagcttaccggatggtgcgacttctatgaaaacctcatgtcgtatggacatgagttgtctgacggaaggggtcttgtgctgacgcctattgccgagcgcatcattggcgattgggaacttattgaatcattcagaaaggaaggaggaaaatgggtcttaaacgacaatgatgacgattatatcttaaaatattcattgaggcctaatggcgattttttcatggtttcctccattgatgatgaaacagacctctcgctcaataaatggggcgatgtaaatgacgatgaacataccttaaaaattcttgatgaagaattggaagtatatcaacttaccgaaaacatcatggtacttgtcaacacattaccgaatatgaggtacaagatgcgttttcaacgtatcgccacagatgaaaaaactctcgcggaacgaatggttggcaaatggtcgctgtcaaaacgctatgcgaaagccaatggagtatggactgaaacaatcggcgattatccattggagtgttggagtgactttaccgaaagcggggttttcactacctatacgcgctggcctgctgaggaatggaaaaacgataatatgtggtggtctgtcaatgaatcaaccggtgtcgtcacttactatgttcccggagaacggaaagagagatattaccgcatatcattggaaaacaatgacaacacgatggtgatgtattactccgaagacttcaacccggagttggaagaacagacaaccaccgaatacaaggacgtgctggtgagagagaactaactaataattaacaaaagaataataaaaggaacagactatgaagagacaattaccagccctcctactcctcgccgcagcgattgtgggagcggcaaccctctgcggatgcagcgacagtgacaaccctatcaagaaacccatcgccgaacacatcttaggcaagtgggaagaggtggagacctacacgaagatagacggcgaatgggtaaaagacaaatcacccgaggggtttgccgagaacgaccattaccggtttctgcccggcgggaagttgataagaagtatcgaagacatcaagagaagtatggtatatctgatgaacaacgagtggagcgtaaacgagtccaaccacacaatgacagtaaacgaatacgaatataccatactccggctgacggacgaggaatgggagttcagctatgaacccagcattgacaaggaaaccggtgaggtggtggaacaagaggggaaagccatctaccgccgcattgacgaatcgaagaagtgcctcgtcgagaagatggtgggcaaatggaaactctccaaacgctacgtgaggaaagatggtgagtgggtggaagacacccaagacctgcccgatgaatgctggcgcgaatatacggaagaaggcacatccatccactattcacgcatgggcagcgaggagaaaaagactgattacaaggcatggtacatcttcctgtacgcaagaacaggaggcatctttggcttgggtaccgacatgatataccaccttcacgaggacaagcaactgataaccttcgatggcttccagatggacgatgacaataccttctccatcacctatagcaactcctttgattttgatgaggaaggactgaaggagaacggtggtagtaaggaggtgttcgtcagagaataacagccagggtgccgtcatcttcaccgtgggtgaatgaagaatgaagaataaagaataacaaatatagaataaagatgaagagaagatttagaactatgtcagcactgctgacaatggtgttggctgagatgttttgcgccttcaccttcactgcttgcagcgacgatgataatattgaaaatgaagtgacttacacctacggtttcgccgagatgtcggcctcacaccccgactttctcgaagaaatgggtaagatagagaatgccttcaaatcagccctcggcactaccgggagcagcttcacgaaacggggcacagtggaagagtgcgacaaggaagtctatgcagcctgcgagaaagcctaccagtcgctccaaggtgatacatggcaaggtgattacatcttcgaggtgacaaacaccctcaccggtgaggtagtgtgcatagctgtattcaatgctgacaacgagaatatttttggtggctcctcgaagggtgcgatgtatagaacgtcaaagaactttatccagttcgttaagaatttggatcctgactttcctacttcagtgtccaagactctgacgtgcaccgatttcaggagccagcaagaagcccatatttacctacttaatcagattgactacgatgatgttaaagcaagagagtatttttcccaattaaattactttgctacagactacgtgcgggtgaattatcaaactgaaaatgtcaaggatggttttgccaaactggatatcacctttagaatggagaaaaacagcccgagatactacattatattcaaaaatccggacaactgatgagaccggttaaagctaataaaagaatgagacagcttatatatattatgatggttatggcacttctgtcgtcatgccaacagaaaggagacaaaaatatgacaagtgaagaacttatgcggaaagccatcgtgcttgccgaagaaaatgtggacaatggcggcggtcctttcggtgctgtgattgcacgcaacggagagattatcgcgaccggggtgaaccgggttactgccgagcacgaccccaccgcccatgccgaggtaagcgccatccgtgcagcctgcaaaaaactgggcacatttgatttgtccggttgcgagatatatacttcatgtgagccttgtcctatgtgtctgggcgcaatctattgggctcatatcgacaagatgtactatggtaacgacaaagccgatgccaagcgtatcggttttgacgattcattcatttatgaagaaatcgctctttcgcctgaaagcagaagactgtcttctgagagggtgttgaaggacgaagctgtcaaggcttttgatatgtggatgaagaaagacgataaaatagaatattaattaagaaatactttatgggaaagaactttttaacgatagtgtatatcgcaatgatgggaatggtcgcatttacagcttgcggcaacaaggagaataaagaggaagccatcggcaaatctatggccgagaaccttcccggcaagtggacaataaccaagagctatgagaaaaaggatggcgagtggaaagaagtgatcgagccggaaggcagcggcacaacctatcttttccgcaccgacggctccatgatgtccgccgttacctacgccaatcacgacacctatctgagatctcggacttgggcggtagaagaccatgacagtacattgaaaatcaattataaaacatatccggtggagtacaccctgatgcgcctcactgccgacgaactggaattcggctacgacaaggcaaccgatatgaccaccggcgccacgcaagagggagaattcaaatggctcttccgccgcatagacgaggggcagaagaactttgccgaacgccttgtggggcgctggcatttcagcaagagctacgagaaaaagaatggagagtggaaggagatcacctatggcatccccgatgaggggtggcacgaatataccgagcaaggcacttttagcacctactcgcgccaaggcgacaacgagcataccaccgacccgatgcagtggaaagcgaatgccgtcaccgacacagtctcctacaagcccctcgacagcgacaaggtgtcccgagtgcgcatcaccttggaggatgaccgcacgatgtacgtgttctattccgtgaatttcgaccctgctacaggagaaatgcgcgagggtgagtatcgagaccttcttctgaaagaataaccactaaaaatattgacagatatgaaaacaatcagacgctacttcttgttgttacccgtcctcatcggactggcagttattgccacgtcctgcgatgacaacgattctcccgaagatcccatcctgcgccccttggaacagcatattcaaggtgtctggcaggaatggaaaagctacgaggtgaaagatggcaagtatattgaaacgccaaaccctgaaggccacatgctggagcatgacctgcggcccggcggtgaaatgataatcagctacagtttctggtattcgaccatctatgctggtacatggtcggtaaacgaaaaagaagacctgcttatctgggataatttctcctctcgcatttatcgcctgactgccgatgaaatggagataggcgcaaatacagccatagatggtgagacgggagagacactacacggcgaattccgctggatttaccgtcgcttcgaccgtctgcatgacacatacgccacaagactgttgggtaagtggaaactccttcatcgttatgaaattaaggataagcagtgggtagagacttctttgggagcggacgatgagggatggcgcgaattccgcgatataggcacgagcacctactacgaacgtataggcggaaaagaattgcgtatcgattatgactactggggagccagagattacgaaggttgggagaatgtattccaatcatatgaaggtatcgacggagagtcatacaacgactacagcgctttcactttaaacccggatggcactctgaccgcctattcgctcgacttcttcgacgctggtggcgaaggtgtggcagacgtgggacgcaaggatatattggtgcgtgaataaatcaggtgaaataaccatttacaatatcaaatacagaaatttaaaaaaataattaaaaatgaaacagaaaattttaacgatcatgtttgcttcagtgatggcaatgcttgctttcactgcttg

SEQ ID NO: 6290 - DNA, 13764 bp, Unknown
  gut microbiota DNA sequence
aaacattaaaaaatgatataatgaaaaataatatatatatattcttaatactgcttccacttcccacaattgctatgtcccaacaaatagtagcaagttatccatttaccattgagtgttatggggatttttattccgatccatataatattcaagggcatcaaagcatcgaatatgttatcaccctagctcgtaagatgaaacttaccgtagagcattgtgcaactgataattatgcttatacggaacttaaatcttatattaatggccaacataatataatatcgacgacctgtaacgggttaccaggattaaaaaaattttcttcaacattagagccgggaacttacacctttacatcttccggagcagctaatgctgatgatgccatactagatataactttttacacagataaaccagacgcttctatcaatggaaaaaattcacctattgacatcggggcactagaacaagggaatattaaacaatatagtatggatagttatacttatacgaattcatatgttggagtgagtaatgaaatgggaggagatatttactatcgtttttcattgttagaacaaatgaaagtctctgtcaataacatagcagacagtaatattaccacgcattttttaaattcttcttttgaattaatttatgaaagtattgcctctactagttgtgccgttttaccagcaggcacttattacgtagtagtagaatatacagcaggatatgatgggattatacaaactattatatcaactttgaattcagacattccaacgtatgatgattctaatcaggtaactttcccaatatctgacactcaaagaaatatagttcgtactgctacgctacttattccaacagcaggtcagaatactgtaaacttaactatggaaaactccatacttgaatatctatatattgacgaattaggacgttcatctgaagtaattcaaaaagaatacaatccagattttgcagatatagtaacattaactcaatatgatgcattagggcgcaaggaaaaagagtgggttcctatttgcatgccttctaatagtggcaaatatgtctctcctaacattatcgaatctcaacagaccgataatgcagcatacaataggattatttatgaagattcccccctccatcgtattattaaacaaataggtagtggagatgcatggcattctgtacaaaaaggaatcagtactacatattccactaactcagacagggatgttaaattatattacgtaaacaacagtggtaaacttattcaatcagaatactacgcaacaggtgaactttctgatatgacaataacagatgaagatggggtatccaataccattttcactgataaatttgatagaaaagtattagaacgtcaaggtagtaatgatacctactttgtgtatgatgattataataacctttcatttgtacttcaacctatgtatcaagaaaatgctgatctctcattatatgcttttcaatataaatataataatcgtaatttatgtatagagaaaaaacttcctggggctaatcctattagatatgtatacgaccaagctgatagacttgtttttatgcaaaatggcaatcaaggcagtaatcaatggacatttatattctatgacgctttaggcagagaggttatccgaggcctttgtactgccaactctcttcccgatatatctaatcatagtatgataacggaattttcgacatcggcagcaggcttatttcaaacaggatatatttgccctgagatagtgaaaaacgggataaattacactaaattattaactatcagttactatgataattatgattttttgaatctttcctgcttagcaactcacaaaagctcattatcttatggatttgaaaatggtacacaccctacagactatactcaacaatatattgcttctcctgaaaatctttctgctaaaggattattaaccggaactggaaccggattaatggaggaaaatattgtactatttgcttctttatactatgatgataaagatcaaatagtacaaagccgctctatgaaccacttaggtaaatatgaaaaggatttcttcagctattcatttagtggtaaagtcctcaaacatctacatattcacactgcaaatgagaaagagatgcaaacagaattatatacttatgtttatgatcatgcagaacgcctgcaagaagtaagacacaagttaaatgggaatagtgaagtaaagcttgctatcaatacctatgataagttagggagattaaaaacaaaaatgcatcatggcacttcaggacataagctgacttatgaatataatatacgtaattggttgacccaaatcagcggaatacttttcgaacaaaatctttattataacacagggaatggaagtcaatgttataatggcaatattggaagtatgacttggaagagtggggaagacggcatacgtggttataaatttacttatgataatatgagtcgcatgaaaaatgctatttatggcgaaggaacaagtatcactcctcctacaggaaaaaacttctcagagaatgtgatcggttatgattataatggaaacattactggtctacaaagatatggtaaggtgagtgggagtacttatggaaagattgatgatttgtccttaacgtatgtgggtaatcaacttaataatgtaaccgatgccgcaacagatcctctttataatggtgcatttaacttcgttgatggcaataaaacttctattcaggagtacaaatatgatgctaatggtaatttagaacaagattataataagaaaataactaagattcaatataatagtttaaatttgccaagtacactacaatttgcaaatggtaatagcacgaattacttatatggtgctgatggtatgaaacgacgagtaacccataaaacggctattgccaatatttccgtaccaatgggacagataaaggaattggcaagtagtcaaatttctcagactaatactattgactattgtagtaatgtgatctatgaaaatggagttttaaacatgattctcactgaagaaggttatatgacatttagtgggaatactcctatttatcattattacctgaaagatcatcaaggcaataatcgcataattatgaatcaaaatgggacaacggctgaacaggttaatcactattatccttttggtggcttgtttgaagagggtctagctacaagtaatcagaattataagtataatagtaaggagttggatcgcatacatggattagattggtatgattatatagctaggatgatggatagctcattaggacgctttatagcactggatccgttagctgaagaatattactcgataagtccttatttatgttgtgtaaataatccgataaatgcaattgatccagatgggaaaagtacttgggtcattaataatagtgatggaacttatcgtgtagttgggggattgttagaagataacgaccccaatatatatgtatatactattgaagatggacaattaattagaggagaatctatcggtatcacaacatcaatgacctcattttacgatagtgatatgaatggaggcaaaggtgcatgggctgttggaagtataataaatcccaatgatcagagcggaaaacagttcctaaaagattttacacaaaatcctcctaacattggtttttatatggataatgcaaaaacgaatcaattttacgactttaaagtgacaaatggaacaagtcaaattctttataaaaaacacgaagatctctatagaggaatgcctgttaaaaccaagaaggatggtacaaatgtttattcgtcagcacgagatattggtaatatcgcggctggttacatcgcaggaagaaatagtattccttggtcgatagcacggaagaaatatgataaacttcaatcccaacaagagaaccgtaaatccgtagaaggcatatcttctcaaaatgcacaatatcttggatggaaaatcggaatttataatgccacttattctcccgtagctggttatcctatagtgaattttgtaaataatgttttaaataatctgttttatatatcaacaaagaaatgaaaagaatactactattaattattttaaattgtatcgttctatcatgcataaacgataatactgtaactaaagaaaaaaaacacaacttttctttttatataccggaaatggaccttacaattacaacttcaaaacaagtaggagcgaaattttatacattgttttccaaagacagtatcgtatggctaccagacagtattgtatctctacccgatacaattgactatattataaatcaaacccatgagatggggcctatcaatatcatattgaatcctgctcaaaaggatagcatttatatatatgaagacgaatatataaaacatattcagggcttcaattataagttatgtgttttaactcataaagaatttgatacccgcttctttgaatctcgaatatctacacaccccctcattttaaaatatccatatatacatattgttatatttcctaatacatatgtcatagcaagtgatagttataaaattactcaaaaaataataaaagagggtagtatttatggatattagattcattacgccagattttgtaaagcctcgaacagatgaagcaagatctattatcattggtaaatagaatctatccttataatatctgaaagtgggatgaaaattattatcttaaagatacgattcaaagtcagtattatatttgataatatgtctcaatacactgtgaaacctatcatcttacaaagcatgcaagtaggtgctaagcaggtctttttatcccgattcgacgaaaaaagaagatctttcaatcaatacctatgagatattatgtaatgctagagcaacatattgtataaaaattaaccttataagcaattatatagagatattttttgataagtaacaacgttttttagacgttgtttcctacatcctacacccatgattatactccattgaatatcaggcaaatatatggtgtataaaagggtgtagtcagatgtataaaatcctcttcctacaccccgaaattcataaaaaacacgttttttattctgtaacctccttattatcagcccgtacatacactttgtgcgaaccttgccccactgtattcaaataccccttttctacaagcaaattgaggtcattcaatgctttattcttcaaaagtcctgtaattccgctataatcatgacgggtaatgaaaggatgtgtctccaaaaaagccagcaaacggcgataacgctccgcaccgctaagttctgcgctttttcggaaaccatatttggcacgttctacatagcccgcacagcgtttccggaaatcgggagacacacgcaggtgtactttgccaaagaaaatagtttgcgaatgaatctctttgggatccattaccggacgggcttgcaagcttgccgaaaaatatccgatatcacctaactgtacatgatgtccttcggacaggtaataggaaatacggtcctcaagcaaagccaccacgcccttcacatcaccgggagtgaagctggacatatcggctatatcctgaaccaagcgctccatttcaatagtacccttatttacgatacgtgggtacaaaggttgtaattcgccgtcacccttcgggttcgggcgtctccgaaaatcatattctgctgccataatgctatgttattaagttactaaatcatcatttgcccctttccttttcctcttttgcattaaggaaaatatcagtaagctataggcaaaactttgttttccaattgtgggctgtgcatcctgcaattgtaggatgcacagcccacagccgagaactgtccgtcccgcaattgcgggacgaagttttgctactgacaaagatacaaaaacaataagggaaagtcaagttttctaccaactatatttcaatttttatgattgctttatgatggacagaaaaggggtgttaccgcttaacaaaagccttgatttatttgttttaaacgcattttatacctaccttgcagtctcttaggaaaaggttcttaggaataaattattttttaaataaacacacaaatgaaaataacccttgtcagagaagaaaaagagagtgggagagaagccgtcagcacctgcgaggcagatgtattattggaacggataaagacagaaactaaagcagcacacgtcaccgcactacggaccatgctactatataccacccctgatgctcgtggtcactacgagcacattgataaattgccacgcatttatccggctgtagaatatggaagaagccgcgatggaggcagaaagctgaagcgctacaacggcatagtaatgctcgaagtaaatggcctggccggattgtcagaagtggaactagtgaaagagcaggcaagattattaccgcaaacttgggctgctattaccggaagcagcggacggagcgtaaagatatgggtgaaattcgtgcttcccgacggaaacctccctgtaaaagaggaaaatatcactctctttcatgcctgcgcttatcgtatggctgtgcagtgctatcaacccatactgccgtttcccataaccttgaaagagcctaaccccgcacaaagctgccgtatgacactggacactgatccttatttcaatcctgacgccatagctttctgccaggagcagccgttcagcatgcccggtgaacagactttccaccaacggaaattgacggaaaagaatccgttgctgagactgaaacccggatttgagacatcagaaaccttcaccatactgtttgaaacaaccctcggcaaggcattggatgaaatgcagaactggaagcggggagataccttgcatccgctgctggtgtgcctggccgaaaattgcttcaaagcagggataccggaagaagaaaccgtacgtcaggttatgatacactattacagacaggcagacgaacaggatgtcaggataaccattcacaatctgtatcgtgaatgcaaaggatttggtaagaagtcagccctgacaccggaacaaaaaatctcactgcaattggaggaattcatgggacgtagatatgaattccgttttaataccgtcagcaatgatctggaatttcgtcaaaaggactccattcacttctacttccagcctgttgaccaacgggcacggaacagcatatcaatggatgccctgcaagaaggcatcaaagtgtgggaccgggatgtaaaccgctatctggcgtccaaccgtgtgccactatacaatccggtagaagattatctgtgcagcgtagggcgttgggacggtaaagatcgtattcatgcgcttgccgacctcgtgccttgcaataatccacactggcgtcaactcttctaccgttggtttctgaacatggtggctcactggcgggggctcaacaaacagtatgccaacagcacatcgcctcttttagtcggtgctcaaggttttcgaaaatcaacctattgccggatcattcttccgcccgaacttcgtttcggctatacggacagcctggatttcagaaataagcgggatgccgaaatgtatctggggcgttttatgctgatcaacattgatgagtttgaccaggtcagcatgaatcagcaaagttttctaaaacatctgttacagaagcctgtagccaatctgcgcaaaccttatggcagtagtattcaggagatgcgacgttatgcttcattcataggtaccagtaaccaaaaagatttgttgaccgatccgagtggtagccgccgttttatctgtatcgaggtaacagcacccatcaatacaaacgttaccatcaactaccgtcaactgtatgcacaagcaatggaggctatcacgaaaggagaacgttactggtttgatgacacagacgaagcaattctgaaggaatctaaccgggaattcgaacaaatcagtccgctggagcaacttttccattgtcattttcgttcaccggaagaaggagagacgggagaacaattgtccgccatgcagattattgaatatctacaagagaagaacaaggctattaatctgtctcaaagcagtataactacatttggacgtattttgaaaagaaaccagattcagtccaaacgaactaagaaagggatgatatacgaagtgataaagttgtgatttcagtaaaattgtggtgtaggaaggcaggcttcctacacctttctatatactttcctacatcatatatcaacttgtaaattaacgacttaatcgtttcggtgtatgatgtaggttccttttagaaaatagtgttatgagaattttctttttattctgctccccgtaatatgaatgttgtggccccgatagtaacgatagccccgtcctcaatacggatacggtctttatctcccagtatttcattattcagaaaagttccggtcagactgggggcatcttgtagagtataaacaagtttgccttgcttatttcgcttcacattaataatgcagtgacggcgatccatactcatgtccgacgtttcaataggagtattgatattggttcccacacagcgacggccaattacattgtcaccttcctgcaaaggaagcacttgtttgaagccaaacacattctcaatcactgtaatactgccaaaagcatctttaaattcttcttcatcagggcgttcttccttttgcggagcacgcatctttgtctttcccagacgaatactaaactgcttgccacaatgctcacaaacgaagaccaatgactgaccttcgctgtattttgtttcatcgaacaaaagataattctcacatttaggacaacggatacgcttcataagattaaaaaattaagaattatcacttcttcagcacccaagcatttttgtacatctcattttggcgaattcttgccaaagcctgataagcttccacttctgttccgcaagattcaatgctgacacgcattttgccgtctccaacaatcgcttttgcagtggagaaaccttttgcaaccagctgggctgccattgcttctgcatcttgttctgtgcccacgctagcaatgataatatgatagggtcttttaggagtggcaacggactgtttagcagcaacaggttgcacattttgtttaggagtctcagaagttacaactgctttagaagtctcagtcttagcttgagcttctgtagatacagccggtgttttaccaactttgacttctctaaccgcaacaggcgctaccactttcttttgtgtccctttttgcttgttagctgatttgcgggtgggggtattctgctttacaataatcggtgtaatagccaaagattgcttttctattttctcaaacagctcatccggtaatagctttgcataattttcttccaccacttccgtattctctatcggagtggaaaagaagaaagaaagcacaattgcagctaccactgcggcagcattagtcagatatgcacggttaaacttgatggagaaagtacgtttttcctttttgatagcggcaggcactgaataagcggcaacgttctcggtcgacggtttttccaaagcagacaattcctgcatctcaaatgcatccagcccatataaataaggagttgtgatcttattatcataaggtgcgaagtcgaaggtgttatgaatagtgtaacgtacttcgccaacattcggcaaatcaaccttaccgtcttcgtgcaacgtggctattaattcgtccactttacgttctaccatcttggtagcatcagagaaattggttccatacacagacatataagactgtaccagcaaaccatcattcatcttcaattgcggattaaagccgataatacgggtagggggcaggaaaatattttcttctttcactcttgtagccgaagcgtaatgagcaacaaatcctcccaaacccggaacaatgacgcagtcattttccaataacaaagcttctatatgttgtgccaattcaatcatgctgcaaaagtaacgcaaatctcggatataagccagtttcagggcatttttcttttcaacaatttataaacagcgtttattgagtaagccaacttaattcttgcaattaaattggcttactttattatccatacgtttttattttaaaattattcttgccagctatttccatgtattgagaacttttcccattttatagttatataaaagtttcatattattctgtttttataaacttgtgagaaaaatgtccttctttagtatgaataaccatcaaataaactcctgagggtaaatctgaaatatcaatttcattcttctttccattacaaactttaatcaaacttccttctatcttgaaaatttctacttttttaatatcaagggctatcctaattttcattagtccggttgacagcttttcaatattaggttgttttatattgtaatcttttaatttatcgatgccgttaaaacgtgctattacaggtttatcacaatcacaaataattaaaggtggaggaggtactacttttgcatgtaagcctgaaccttgtctgacaaggaaaccatctttcataacaattttattgtatgctataaaatcataatactttccattctccacttttgctcctctatttaaaactatatctccatagcgattactttgatcataatatgttagattattcaagtttaaagatgtggagctatcaaccacttttagctttttagtcacacgcaaattgtaatttgtagtaactctattcaaaggattccttggttgtcctaataaataccccattttgcctccccaaacatttagtccaataataatttctccttccgtttgtaaatcaaagcaaactgaataatctccaaatcggtatgcattataatatcgcgtatcttccatgccaactatcgtattagcaacatatgatctaccggggtattctttgttggacactgttctcgtccaaaatatttcatatattccatcgtaccttgtggctggagttggactataagtcaaataagcacggtcatagaattttaatcgacttcccctctgaacttcatatacctgattagtaaagcaatcatcgggtaaaatagctgcaactataccatctgattctacaacagcaaaataatagtttagtatattttgatgattattctcatcaataatgtgtaatttcatcttatagttaccaggcttagtacgtttgataggacctattttacaagaattgcctccattacgtataatctttacctccctcttggcatcatcattgtaatctccaaaatcattgggttctttatttattagacaagtccaatctatcttcccatagccgctaatcgtcttagcattaaaataaatatcgtctgttaccgttggaatattaggaagtatttctacaatttctaagtctatattactatctaaattcggcacaaaaggatatatatcctcaaatcctaaaaagttacgaaaaacgccatggtcaaaagaaacggatatttttccaaataaatcaggagagttactatcaccaataaatttattatattcatcatacgtaggttcacaatatgattttccaccatgcagtatccctactatttgatgtgcagaattaaataaaggtgaaccagacgaaccttctgctgtaactccctcaatccactgcaccttccaatgctcctccctaatatgcccatcccaccgtgcagatgttatattttgcgttgtagaaattttctttacatctccatttgggtgatgaatgcaaatataattttcactacctaaagcatcctcttccccttttgctatgccagcaaaagctatatcataattcccgaactcagaaagtgtattatgcaattgtagaagcagccaatctgactctttgctaccagaattgcgtgaaacaatagttgcacctaagacagatttcgtggtattgtaaggaagttcaccaccatcgctattgcaatataaagattcatgtctaaacaaaatgagccaatctttggtatcggaatatttgccagccccaatttcgtaacagtgatttgctgtcaagaaaaaaggtctatcagtagaaacataattatttgttttatttatcaagacaccagaacacactccccaatatcgaccgttcgtcctttctagaatcatagcagttgattttacttctatatcaataaaaagattctgataacatatagtattgatattacaagaacctgaaccttcttgactaaaaggtcccttccgattaaagcagtcttcataaatatatacaacttcacttagattcattgtggctttttctttgcattcactaggttgaaagaattcaagaaaaacagaatttccatttatatactgcgtcaaaaaagtaccatcctttcgattattccgttgtgtaaatgagcccaatatcatatcttttgcatcattatatataaataaattacatcccataggaatgtaaaacttatcaaaaatgaactgataaccattagcatattctgaacgaatatttaatatccataacgtaccatcactaaccttaatagaatcagctttttcaaaatagctaattcctaaatctatttcttttccataaataaatttggatttacaatcaggacaataatcaggtaatccattaacctcttcacgtattttattgacgcttaaatcttctacaaatacaatattctctacagaaaaagtgctattctttaacatattggcgtgtctaggctttccgccatagctaacctgcgaagtacatatttcaatgttagatagcagtaggataaacaattgtatcccaaaaactatataataagtttttctgttcatgttcttatttcattatttgctgctttaattcttctatttctttttgttgctggattacatacaaagtcagctcttctattttctgaagcaaaagtgcattgttttcccccacgctaatgccgttagccttaacttcttcctcagaaggaacatttggcaatgtacccttttcttttatgtattcttcgacttctctcaatgtaggtaatttataattttgtttaaagacaaaatcagcccaatttgattctaccaagatttctttagccctgatggttccatttacatcaagtttgttttgagggttatcggtaccaatacctacattgccacttgttaccaataaatcttttgtgatagtagtcccatttacgtctaactcatgtttaggagttgaagttttaattccaaacttcccattattataaaaatagtatattcctttccaaccaggctcctcttcaactgttatacctatcacagcacaatcatcacctaattgattatcaccaacatttattctcatttgagtatgatcctttcccgtacaatacttagatatccacacacgatccgtataatctccgactcctctcaccattactgcggccccccaaccttcccatatcgttggttcatcatcgccagcattcaattgatcggtaaagttctgagaatacagatttacacacaataataaaaacaataacatgaatagtacttttttcataatattttttttagaggttaat

SEQ ID NO: 6291 - DNA, 864 bp, Unknown
  gut microbiota DNA sequence
gtatatatgctgattcgctgctgaaatagtgatccctctcttttattgaacaagttccgatagatgcgtgttttatttatacgactaataaaaaataattcgtatgaagaaaattgtattacttcgccatggcgagagcgcatggaataaggaaaatcgtttcactggttggaccgatgtagatttgacagaaaaaggtattgccgaagctgaaaaggcgggacagttattgatagataatgacttccagtttgataaagcctatacttcctacttgaaacgtgcagtgaaaacactgaatgtggtattggatcgtatggatcaggactggataccggtagagaaatcctggcgcctgaacgagaagcattatggacagcttcaaggtttgaataaggcggaaactgctgccaaatatggtgaagagcaggtgttgatctggcgtcgtagctatgatattgctccgcatgcactgactgaggatgaccctcgtaatccgcgctttgaagcacgttataatgaagtgcccgatgcggaactgccccgtaccgagtctctgaaagatacaatcgaacgcatcatgccttactggaaatgtgtgatcttcccgaatctgaaaacagccgatgagctgttggttgtggcacatggtaatagtttaagaggaatcatcaagcacttgaaacatatctccgatgaagatattgtaaagctgaacctgcccaccgccgtaccttatgtttttgaatttgatgatgacctgaatttgcagaaagactatttcttgggagatccggaggaaataaagaagttgatggaagcagtagcaaatcaaggaaagaataaatagaatgaaatcagtat

SEQ ID NO: 6292 - DNA, 100774 bp, Unknown
  gut microbiota DNA sequence
cccgggcttgggaaagtctgggctttgcgcataaaaaaaggttgtgccagcattttgacacaacctcacagtcaataatacatgaaaaaacgctatttagagagagtctctacagatttggtttgtgaggatgatcctgtggatgaggtggttcttgtggctgacgcatttcctgccatttggcgtattgctctgtcgtcaggattttcctgatcttcttttccttcttggcagcagctttttgcatcttctccacattgtccttttccattgcaggacgttcacccggagctcccataggcggacgaccgcctcccataccgggtcccattccaccttccatcagcggacgaccaccgccccttccgggacgacttcccatcaaaggacgctgaccatttcctctttcagtcatagtcgcaaaatgttcttgttgttctttcaggttcagtttatatagtttatcgtactgcttgtctgtcagttgcagttcttctttcatccggtccgtcattttccgggcagctttctccggtgaaggaacttcacggggcaattgtttcttctcctgctcctgtgcttgtgtacaaaccagcccacacaacagacatacagctaataaccataatcttccggtacttttcattttgcgtcagttttttattacgatgcaaatgtaagggagagaaagaagagctgaaaataaaatctacgaaagggaaggttttgtcgacagaatagccaaatgagggatactcatcctccgttttgtacctccacagtaagcattattaggcgttgaccttggttaacaagcctgtcgaccaaggttaatcgactcgttaactaaggttgataggcctgttaaccaaggtcaacacccgacgattcctaagggtgaatagatatatcccttgttttcaacagaataacacctgatacaagataaataaatgcctcatccggatatgggttgagtgagaaagtgagagtaacccacttaccctcacaccggattttttactaccaccacatttaataccctaactatcaacgattcgcactaaaagtgagggtagtgagagtaacttgatccaactttttattgaacaggcaggtgagttccgtttaaaacccacatttcactccggcagaaaagtaaaccgtcggattgaaatacggatcatctttatcactgaacatattgtctacaaaccctttaagcgtacgtttagtcagatcgccagacctgagccaattgcctcctatccccaaatacaggcacgacttcttacctatcctgtattccggacagagataggatcgcatcataactgaagcatatatcatcgactttccctctacatccatcacggaagatattccatccatttccattgccacgagcctcagcttaaaccgatctcccaaacgtactgccccggacacttcaacaccggaagagagattcacattaacctcataattaccggaaagttgccagttaagaaagaacatcggcatggcaataggtactccaaatgaattcgtcaatccagccccaacacctatatccagatttttcctacatttatacacaaaaatcactcccccattcaccaatacactctgccaggtaatcgcatccggtgccgaataaatacctgctcccaaactggctatcatgtaccactttttcgacaagggccgtacatgcgtcagattgagactgccacttaacacctcatccggatgtatatccaaggccatacgtcgattattaagtatcgcgtaagttcctcttaccgatgccgaccacatgataggctgtcccgatgcattctgcttcaacgaaaagggtagcgtgtatgctccggtgaatttcaataaatcacccgaacccaatttattccccgcttcatctctgaaagaagaggcaggcatatactccgttttaataactccttgtgcaaaaccatcgattgctgccaccaagagcaacagaaataaaagataagagaatcgtctcattgctaataaattagattattttattgcaaagaaaagagattagcttgtccggtataagtcttttccgacgaactgcacgaaagacctgttgaatttcattatcccaaagatggaacaaaaggaaaaaagaagattattcgaggaaaggtactctcactacaaattctgtagtactttccacgatatcaattgctttatcatacaaggcgtattgtttttccaggttccctaatcctacaccacctctatctactgaactccgcaattgcagattattggaaaccataatcccctcatcggtaaagcctatccgaataataagcggattctttaaagtagctatattatgcttaatcgcattttctaccagcagttgcaagctaacgggaataatcaatctggttccatacaaatcatattcgtctatctcgatgaacaatgtatcttcaaagcgaatcttctccagaaatacataactttccagaaaagccaattcttccttcaaagtaaccatcggacgattgtttgtcaacaacagataacggtagacacctgacagctttttagcaaacagattggtcttttccgcatcactataggccagtgaagatagcacattcagactattgaacaggaaatgcgggtttatctgggctttcaaggtttcatactgatactgaatcttctctttctctataattgccagtttcttctctgcttccatttggctttgctgataaaagaatatctcaatcagaagaacaatcatgctattccaaagtactaccggcagagacattttcagcagagcataatcttccggccaaggttcctccagaataatagacaggatataatttgccgctatgccgaagcaactcacccatacggatgccaacaataaatcgataaagattctcattgtattgttaatgttgtccagcctcttatggacaataacaatgatgagaaagtcaacaatccccacaaaaatgcaggcaggtaaattgagcagatactgtgtttccaaacttaagctccggggagcgtcagaaagaagctccgccacatactggaatgcaaacaaagaaattgcaatgagcactataaaaagcaggatataccatttattcttcatccccaaatgtattttaaagcacaccatccacccacttcagaaaatcaggaacccgcacacgactgattaaaacctcgtgcggacattcaggctggaagctcaacttcaaccgactattgaagtacttggatatcttacggatagagttgatattggcaatgcaattgcgggaaacacggaagaaagtcctttcatccagcagttgctctatctgttccaaagtatagtccacaatatagcgtttatctgaaaaggtgtgcagaaagactactttttcttcactgtagaagaaagcgatatctgaagtctccacataatgatacgcatcccctttctggataaggaaacggttctttttacaattactcatcaatgcttcttccagtttcctgtaatcggtaacgggaggttgcacaaccctgaactgttcaaatttccttaatgccgccagtaaatcattttcctctacaggcttcagcagatagtccacactattcaccttgaatgcctgtatggcatgctcatcataggcagtagtaaaaataacaggtgtcgtgacctgtatctgctcaaaaatgtcgaaactgtttccatccgtcaaccggatatccaacaacatcagatctaccggatgatgtttcagaaattgtacggtctgctccacagtggctgcccatgcctccaactgataatcggggcgtaacttctccatcatccgcttcatctcttcgtaagcgaaacgttcgtcttctactaacaggtatttcatcatccggcactcaatttataggaatctgccgtaaaattacagattatcatccatatccggttacgaaatgatgtatttccgatgaagtgcagaaattgaaggatgaagtgcaagtgcaattacctgccttcatccatcaccaccgagaatctataagtacctgactgcaatgcaagtgatagagcattccttttttgtgaatacaggctgactccttccgcctctttccatgcagtttctccttcctttaaagtagcaggatgaatgccggataatttcaggacagcagtagtattagccggtatggtgatttccattttcagcacaccggcttccaacatccagtcagagactattttcccatacagcgagttgtagtatgaacgtacttgctttggaccgccttttgtaatccaaggctcaatggaaaactccttataaccagcctccggacggcggatacctcctaaagcctcaataaaccaactaccgatatacaaataggaactatgcaaacccgaaccacgacattgccaatcttcaaagaacgtaccgttgccatgcttcaacatatctccccagccgggaaaatcttctttagtagccatctcaaaaatcaaatcattacgatgattatctaataaagtatgcaacaggaacgaaccggcagtaatgcctccccagaaatgccctttacgctttaccagcacttcctgctcaagacgtttccagacttttgcctgcaaatgctccgggggtaaatcgaccatcaatgcaatagcaagataagaaggatagccattcacgtagctattatcgttcgaattgaagaaagtagcatgcaccgccttacgtactttggatgcccggttccgataagcggaagctgctgctctatttcccaacacatcggcaatctgtgcagcagtttcaagactgtaaatccagtgacaattattaaagaataaagtttcccgagtatctccaagtgcttttccctgtttctccatagccgacctttctgaccatgcatccggccaaagccagtcacccaggaaactccatttacctccccaacgtaccagcatgtcatcctgcgacttcgtttctacaaaagaaagccagcgctgaatagtgggaaaactttccgaaagaatacgtacatctccatactgacgataaagctcccaaggcaaggtaatgcagaaaccactccaggatggtccacccccgccaatgcgggtaggagcggtatagggaacattcccttcgggatcttgcacatcacgccaatcttccatccatttgctatagaaagcccccaattgatagtttcccaaagctgtgcgcgtagtggccaatgcatctcccccgtatccacaacgttcacgatgaggacaatcgaccacatagttacccagactgagattttcaaacgtccacaaggtagtacgataaatgtcattcaacaaaggaagaccacattcaaatccaccgctccggcgataatccggacgaatcatccaaccacgtatctggtctaattccggtttataccgaaggccggtaatttgtacccaacgtccggtcatataattaaaacgattacaaaagactcctttccgtttggagccaactttataaatgctatgtataccatagctgcaagcatccttttccctttcagaaaattggaatacaattgaatcaccgggttggccttggagctgcatctcaaaccaaccggcataattgattcccatatcaactctatagactccgggactaacttcctgaacagaaagtggtttaatttcaccaagtaaccgattaggttctgtacggtcagatgatactataacgtcagtagaataaacctttgccatagcccaaccggaatcatcaaaatccggagtattccacccatctttttccaaagctgcatcataacattctccttcaaagtgatgtgcctcccagtaacctaacaaggtattgggacttgcatgggtcttccaggtattatccgaaacaattcgtaatttctttccggaagataatgcgatctcagcctgaaccaatgccatcggaatagccggtctattcttctgctgataggccggaaaaacagcccaggaagtacccagccacaaagctataacattagtacctgttttcaggtagcccttgatatcatatgtcatgtaacgggcacgtgatttatgatccgtaaccgaaggtgaaaggacagcatcccccactttccgcccattgacatacagttcatgataacctatggaagctacataaataacagcatcctgtggaatatccgacatattaaatgttttacggaaccaggggtctgccattacattattaaccttcttacctcccacactctgagattccatttctgcactgcctatccattgtgccgcccaatcagcagcaaacagccccatacgccaatttgcaggattactccatgctgaccaacgattatgctcatcggagaaacggactttccagaaacatctttgtccggcagacaaaggtactcctccataaacaatattcaccgactcagcagagttaacacgaccgctatcccaaagatctccacggtctgcatcaagtaaatcccgggagcttgctacaagaatctgataagcagtctgcttccgcccgcgtgccgaggtagtagctcccattttccaactcaaacgaggttgcagtatgtcaacacctaaaggattactaagatattcacattgcaaatcaaaaggttggagagtggcaatattcgtgaaagccgtactgccagtcagttcaccctccggaaaagcgatctgcacttctctaccattaagagccagacaaacctccctctgactataaagcggatctgcaacccagatatcgtaacctgttcccttctgctcaagatagacaatcacttgtttatcagtagctagtgtaagtccctcccctaaatcaattgttcccggatgataaaaaacaatagcatactgctgattcaacttaacagcctgcaccacagaactattttgaataatcttataattctgggtagccgtaaatgtccggaactcctctaaagatttgtcaggaacaaccatatatgcatatttcccttccttagcctttacaccatgactaatccagagattaaagatgtcagcagaaatctttttcccactcccactgatattaatatctttccaagctccggtttgtttcggattgctaacaattacgtctcctcctaaaggaaataaataaccaactttatcatgatatacccaagccggattctttacagatacattttctctataaacagacgtagttccttcctctttgccaactaccatttcgcctgtaaaaaggcactgattaacagttgtaaccacttcctcgggagcatctgatgcaatatctgtccctaagcacaaaagtacatcattcataaaaaagtaagacttcctggcctttactcccttatagcaatgctcataagcaatgactccattcttgccgttacttaccccacctccaaaccgattttttccgaacagatatccttcaagacgagtagagtcctgatgttgaacagccgtagtccccggtattttattccagttccatacagggaagataccttcatattctttcccggaagtaaggatattcgtagcaccaagcggcaggttataacctttgaggttctcattattaagcatttcggttccattagtccgtgtagaaatcaccttagcagagagataatagccggtaccatgctgaaccataatgtccgatttccagaaatacttattaccgggagcaggaaaaggagcaccggaaagatgtttcttccaagccgagtaatcagcagcacgatcagaatcattctgctccatgtattccagtgtgacaggagaaatattgctaagtccttcgggacgtgatatattacgaccgattgcaccaaaatcaaacgtttcccgatagcccaacaaccgatgaccacccatcagaagattgataaatatatcttttttctcttgtgtaaaataaggctcaaaggcagttcctttcaccaattgtaaataatatgcaatatcatctacatacgatagaccatacccgccggaatataattgcggacgatgctgatggaaactaccatccaccttaataccttcgtcaccttgttccggaacaatcttaatagtagaagctatggacttgattccgattcgtatcagctcaatattattttcaatacatcctttatgaatggtaacggcagatacccatgtacggtttttgcctttatgacctttattcccagtcaaatcttgtagataagaagaataatgcaataacttcttatcactaattttacctttcagcagaatcaacggaaccatgtagtcttggggagcaccaatatcaccgaaccaccagtttccggatttaggacgtactctataccaataatcgatacctgcaactatttgtttcaacagtcttcctgaattataatacttatttccaggtttccgatatgcaatagccattaatttcaagcgtttcaaatgagagccggccggataagacgaaccttcatgcacagttacataatccaggtccgggaaacttccatccgaacgtagcgcactcgcataacccgctattatgtcctcatctactttcgcttccaaataggaagcgaccagtcgtccggtcatttcgtccacttccttttgcgcatctacttgcacctctttagcctcagccaaagagcaacaaagataaagcaaacagaatattagtttcaagcatttcataaacatactcctatttatccaggtacttaccatcagctactatccctgaactatgcactgtacgaataaatttcgcatcagcaggagcggcacctttacattgattcagttctgccccgacaacatcatccaaaaagaataacggacgtacatcgggcttcatcgcatcaaaacgtacattattaaacctcacatttctggcatgacgtacatagaaaccggcggccggtaatgtattaccaaacattcgattctcaggatagcttttagtcatttccggaacaggtttactaaccatgtccgaggttccgccccccggatagctgatttgcacgttattgatcgaaacattttctacatagcttgtctccacaccagttattgaacaggctatcaggctttctgcggttgctacaatgttgctgatatttatattcttcaatacaccaccctctttccggtaagtgcggtgtctgtctcccaaacggatgaatatgggagtctggacatcgcgcatagaaatattggaaacggtgatgccatcaataatgcctccatcaaccatttctatggcaacacccgaaataacggtaacatcggccgaaatatgttcaagctgtttactccaatgacgaatattatcttccgctgcccggcgaacaacacaattggaaaccgcaatattccggtatcctccatgagaagctgtaccgaatttgattgcattacaattacttgctgtgacacaattcgtaaccgttatgttctcgcaaaattccggatggtcactcttgaaacaaatggcgtcatcttccacatcaatgtagcaatcagatatagtcgcattcttggcatcaatatcgagcccgtcattattataattacaatggctgaatacctttaaaccacggatagtgacatcttcacatttttcataatgctgcacccaataggcagaattacggagagtgacatcggtcacaacgatgcccttgcactctacaaaataaattatcttaggacgtttcggtcctccgtccgcatcattgccaaattgaaaagttttatttccaccttgtccgtcaatcgttccgaatccggtaatcgaaatattcttttgtccacgtgcaaacaaaagtccggaagactgattcatactaccatccttgaagggaaaggcattatcataatccgacaaacgtgtacttcccaacaataaagtgccaaaatccagatgaaggttcacatttgatttcagttcaatgggacgtatcaaataagatccggatggtatcaaaacggttccgcctcctttcttcgaacattcatctacggctttctgtataatgattgtattatccgttaccccatctcctttagctccacgcttagtcacatcaattgttccggctataagggaagaggaaaatagcaaagatattgcaaacaaaactatattacatctattcatcatggtatcattaattttagggtttatcatttaaggatttgtatcggcacaacgcctctacatagtaataatcagcataggtcaaaggcatatctacttctgtaccggaaggaatattacctaccgaatgtttcagaataaatcctccgttagttccttcctctgccgtatatgccggtgaggataatgtctggagcattttctcggctgccttataatatttcttagcccgttcttcggatacatactgagatagttccaataatcccgaacagttgatagctgctgcagaagcatcacgcaaagcatccggtataccgggagcattatagtcccagtaaggaatcaggtctttcggcatattaggatgattcagcgtaaattctgctatctttatggcttgctcaaggtatttccgctctttcgtaaaacggtacatcagtgtatagccatataatccccaggcttgtccacgagcccaagctgacttttcggaaaagccctgtccaccttggtagtgctttatttcaccggtttccgggttataattcagtccatgataaagactattgtctacccggaaatgattcttcaaagttgtatcggcatgtttcactgcaatatcatagaatgtgctgtctcctgtggcctgagtagcccagaaaagcaattccagattcatcatattatcaatgataacaacataatcatccggtttgcgattatgggatttaatgcagcctaccaccgggctgaaacgggaaatcaacgaacgggcgctgttcaccataatatctttatactcaggtttcggagcaatgcggtttgcattgccataactgcaatacatcataaaaccgacatcatgcgtattcacgttgtattgttccggttccagcagcttcaacatacgcactccttcagcatatagctccttgtctcctgtatcctcgtacagatagaataaagttccgggataaaagccgctgcaccaccattccgagttgctggttttcaggcgttgcatatgtttgtcatacgttttaggaaactggttacttccttgcaactcgctcctcatatagagatactgacgagcagcatgctctaacgctttatcaacttttaccttacccttggcgaataagtcaccgaagggaaaaaaactaattagaatagtaacaaacaataatgtactctttttcatggttatatcttaaatttatattctattgttccactgcatccgagaaagaaacgacctgtagcctttcggcaaactgcaacgaaggtagttcagtagtcactttaaccgtaaccgtttcaccaggcaaaatatccatataattgtcggatatgaaattgtcaatatccccttggagcgacaagaaaacgcctcttgcaaacacatcacaagacagagttacctcataccctccttcagtcggtacaaagtctttattaatccgagccgccgcataatgcatatctttttgcttcgccaaaaaataattattagtatacttttttcctgtcttatcctcataaagaacgtgtacgacgacgtcttcttttttctctccattcaataacccatccacagcttccttccatataactgtacttgtattagccggaacagttatctgtttcttgaattctttcaccactccgttaccatccaatctgagcacacagactgttaatttaccagaagtactctttagcctgtctgataccatatatatctgcaacgtgttctccttttctattggcgataccagtaaatcagcgaaagactttaccgtaaaataatgctgcgccttccaacgtccgtaatagtcgcgactagaccaggatgccaccggccagcagtcattatgctgccataccaacgatcccatacaatagggcatatccctccgatgtgcctccatagccattttcatagcatcagcctgcaaaagctggctcatataggtaaacgaacggaaatctttcggctgacgatattccgacaaaagaaaatcattgatacgcttattagccgctgttccccctcgctgatgcgacatcattacctccgaagtcagattccaatcctctgataaaggtgcataccgtttgatcgactcgaattccgggaatgactgaaaaccatactcactgaaaaaacggcttcgctcatgattaaattcggaaaggggtttcagcccttgccaaactgcccaatagtgcatatcgcccaccgtatgattgcgcgtccctttgtcatcagaataaggagatgatttacggtaacaagcacccggatggaattcttctaccacagccggcaacgtcacaaaatactgattcttgaactgtttccatataatatccgaataagcaggattctgtttgtcatatgtctttttccaattccagttgaaccaagcatccaaacattcattattcccacaccaaagggctatacaactatggttacgcaagcgtcgtacattatcaatggcttccctgcgaatgttttccagcaattcgccttcagcaggaaatacgctgcacgcaaacataaagtcctgccagattaaaatgccgtatttatcacacaaatcataaaagatatctttctcataaactccaccaccccacactcgtagcatattcatatttgcactgactgcatcccggatcgttttttcataaatggagtcggtaacacgagtcagaaagttatcacaaggaatataattcgcacctttggcaaacaagggttttccatttagttcaaaataaaagctttcaccatattcgtcaggagccgttaccactttcaatgaacggatacccagttttttctctgttacatctacttgcttaccattcagttccagtgttgctacaaagtcgtataaaaaaggttcgcccaaaccattagtccaccataaccgtggcttcttcatggtaaaagataccggaattttattcaaacctttattcaaacgaatcaatttccggcactcggtacgcttatccgtacgattaatcacagctacctttgcttctgtctccttatctgccaatacttccaccgtgacattcactatggcccgttgggctgtcaccgactgctggttataaaaaacatcatttatacgagcctcatcccatgcttccagactaacggtcctccagatacccgaagtaaccaaacgaggtccccagtcccaaccaaaatgataacccgctttacgaacaaacactccgatcttgcggttgagcaaacctccattctcagactggtcattcgaactgcgatactggaaaggaacagcttcccatttcggcatagctatcttaataggagaatgcaaataaacctgcaattcattaccatgctcttttaagagagaacggacatccacctgccattcacaaaacatattatcagcagaaagaatcttctttccgttcaatgttacatcagcataagtatccaatccctcaaaatgcagcacaatattcttctttgccagcaactcaggggttacatcaaacgtcgtccggtaaatccagtcttctttatccacccactgcacaccgcgctcattgagcctgtaaaaaggatcatctatcagtttgttatccatcaagtctgtatgaactgttccaggaacagtggcttcataccagttagtacccctcgcctgccggaaattccatccttcatgcaagtgctgacgaacaggctgcgcattgactgctgtaaacagaaagagcagattcaataaggctatccaagttcttgtctttacttttgtattcatttgtttatttgtttacggtctacattccatcctttcaccactatcaccggtttttcaattatcttttctgcattcgtttcgataactacaaatttactctcacccggcatcaaagaaaagaaattatctgtataaaaagaagggcgaataggtttcaaatcctgattgaggaattgcaactggttgaaaaaggcgatagaactggacacatttttcactgtaacatccacgaaatacttaccttcgctctttcttatcttataagtagtcttcaatttggcttttttcaattgagacaatgtttcaaaacctgaagaagtaggcccagtcagcgtttccttaccttcatacttatcattggaacgccagtaaaaattggatgagacttccttgcctttctcatctttcaatctcaacttaataaaatgtacctgtgaaatatcttctggaaagcgaatggtcaatacatcatttgccacaccatccaaaggaaggtcaacctttactgacttttcgaatacctttttactattgatatcataaacctgagccacaaccgtataaccttcaaattcctgataataatcattcaccaccgataccgtattcttcagataatcaaattgtgcatgcaaaggttccaaagcattagctgtatgataaagtgaagctgttggttccaacgaccaatcccacatacgggcacagacctgacgaaccgggcaattatgataccagaaaagtaaaccggaacagaaacggtcaccataatcaagtttattataattccatacttcccaaatactttttgagttcatggcacccacaaactgccccttctgtgcaaactcatcaatagaagaagattgcccataattattaaccaagtcagcatacatggtagacatcagatggaatccattcccatccagataatcccaaacctctttattaataggccacaaatctttttcgtccatcatttcccggagaatttctaccgtaggaagtgtcggagcaccatattcgggattaaaaccatccacacggctacctctcgcagaagccgtgttttcataatgttgcatcggattcacctgtttatatggacttccatcatgtacacctgcacattccgattgcatctgatagccacgtgtcccatcaagtagtttcagcagttcaggcgtaccactaacttcggaactctcattcgacgctacataataggccagagccggatgattgcggatacgtttcacagtagaagccacgttgtttaggtacacactcttatcctgtggatggcgtgtatctcccgtcatccagaattcttgccaaatcaataaccccagttcgtcacaaagctggtaaaagtaatcagattcagctataccgcccccccaaaggcggatcaagttgatacctgcctgccgggtgtatctcaactcagcataggtacgttcatccgaagttcgtaacattccctcaggaatccagtttgtaccacggataaaaatacgtttaccgttcacatagaatacacgtgatttatcgggagtatttgtatcagaagttatatcacgaataccaaaccgggttttaacagagtcacagacagcgccttttacgcttactgtcagtttcagttcatacaagttctgaggacctttattgaccggccaccacaagcgtgggttacggatagtaagttgagggaattcttccggagtgaaagtcacatttttttcctcaccacgtaatatgctgaaaggcttttctacaacaatattttctcccactatttctcctctgaccactccgctaatcgtatccatcgaatgaaacggatcaataatttcaacggatatggtttcacgagcgacatcataccccggcttctgtaattctgacttcacaaatggatgacgcaatgccaatatccctgtgctatatatagatatacttttccaaatacccgtattgcggtcacgaataccatccataaaggtaaaatcccatccaatactcataagcatagtagtattcaaaccgatgtttccattacccccattatgatattcacctacagctccccaagactttggcatagtagtccccggcacatctaccggatagactttgacagcaagaacattcttattgcctacttttacaaaatctgttatattaatgtagtcattaacaaacattccattgatcgtactcaataaattaccattcacccatacttcagcccgatagttgatgccatcaggctgcaaccatatattttttcctgagaaagaagccggaacctcaaattccgtacggaaccaataagtataaaactcacgacctacttttgatatatccggtattttattggactctattttattgttcagtccataatagggttcaggatacttcttattatatacaagagaattaagcacggttcccggaacaatagctgacaaccagtcactcgtattatatccaagcgacgaaacttcctcagcagatgctttcacgtcacttactttcatcatcttccagctatattctccctgatgcatttcattcgagtccaaccaaattctatcggttgttcttgcatagtttgtattactgctctgtacggaatatgcgacagataaaaatagaagcaaaaaaatggataatttattcatgaacgtccttattaatgtttttctgtaatatgttttattactgaactaccggaataatcaccagaagggaatactatatttatttgttctccattcatacttaattggagagactgctctttatatagaggatcggctacagctatttcatattgtttgtctttcttctcaatgtatattataactttcttattgactgctaccactaaatcctctgcaaaccgtatttcacccggctcataaaagacggcagcatactgtctcttattctcattggaaatcgcttgtatctgttcagagttaactataatcttaatttcattctcaaacttcttatctgtaaaataagaaagaggtttatcaggcattataatataacagtaatcctcatgctgcggagtagtaccatgcgaaacccataagctaaaaatctcttttgttactggtttatcacttgctgttacttcaagttctctccaagcaccggtttgcttggcttttctcaacgttacactctcattttgcgggaaaatataccctacattatcatggtaagcccaatcaatatttttgtcggacaagttattcgttaaccggtatgtatgtcctgataagccatatgtaacttcaccatttgccaaacattgatttactgaagtacgaacttcctgagtacgagccgccttaatgccacttcccatgcataccatagcatctcccataaaaaagtaagctttccgagcttccacaccttgataagcatgttcataagccattacaccattatgagcattgctaacgcctccaccaaattgattcgaaccaaacaaataccagcggagatcggcagtcgactgattagcaaccgccgttgttcccggtacccgtgtccaatcccaaacaacaaaggcatcatcatattcatgaccggtagtcattatgttagttgctcctaatggtagataatagcctttcaaattctgcccgttcagcatttccgtaccatttgttcgtacggatatgactttggcagacatataataatcagaaccatgatgggtcataatgtttgatttccaaaaatgtgtatttcctggtaccggaaaggcttcgccaccaatatgccgcttccatgcctcataattttccgcatgaacgggatcaacttctttcattaaatctaatgtatgcgtggacatattgctcaagcaattcgggcgacatatcccccgcccaatcgttccaaaatcatatgccattctatatccgaacatctgtgtccctttcagaaaaacatctgataccaacttaatcttatccgaagtgaagaacttcataaaagatgttttattagctaaagtaatatactctgccaagtcggacagtagtgacattccatatccacccgaataaagttgaggacggtgctgatgaatactattatctcttttcattccttcatcatctttctcttctacatatatggtagaagcaatggaagaaaatcctttggcaattaactcataatcatcttctatacagcctttatgtatcaagactgcagatacccatgttctattctttcctttatgggccatattatctgtcttatcaaccagataagaagaaagtctcgtcacatcttctcttttcaactctttcttcagcaaaagaagaggaatcatatattgggaaggagcaccgatgtcccggtaccaccaatttccagaatctggattagctatccggaaataatctaacccaagaattattttctttcgcaattcctgctcatgaaataatttatttccgggtttactataagccaatgccatgttctttaatctcttgagatgacgctctgcatcgaaatagaaagtcactgtcttataatcaatatctttccagctaccatcagtttgcataacagccaaatccttttctgcttgagaaacgtctaccgaatccgacaaatattcttccaacaatctattatataaaatctctatatctttctgtttctctacagcatagccgtattctccccaaaagcatagcaccagacatataagtagtaaccttttcataatcattctttatctataatcatcaccgctacgctcattgccggaacggagactttaacatattcattttgtggttgatatttctctctcatatttagttgaaaacttccatcagcttctacttcggcatcggcaaaacgtattccagatgaagaaatcggagacggtgctgtaagtctaagcaactgaaccgaagcaggggtgtcattcagccgaactgtgaaggaaatatcatcttcacttttatttaaaagtgtaactttcaatgttttgccattgacacaagcatatacgctgctgttaggaacagaaggtgaaatcacagaaggaacaatattaccaccttcacttccatatttaaaagcaagcattgcataatagataggacgaggagtaggaattcctttctcatccactacaataggtgcatacttactaacactaccaccatgaaaatttactcctaccccattattcaaagccacactccacatatagtctaacgcccataaagcagaagcaaaaacattgctcactcctatttttccaccttgagagactgtattacattctgccatacgataagtaattccgtgtttttgacataaaaaattcaatacttgcaaataacctgataaatgattatccggttccaatatagttttccaatttactgtagcattcttacctggtgaattgtaatgatgtccggtcatcaaacttattctggaagagtaactgttcaagaaagactcaaaccaacggatatccccagcaactgctggccctgctatagtaatgtcaggtaatctctcttttatcttcgtataatgtagaaaccattctttttcataatcgcttattgcataatttacaggacgcagatgtttgtaatataaatcaggttcattacctatctgaagagcataaagagcattctttaatcgttttgctacatatacagcttcatccgagtttttttcaggattattctctcccagattcagtccccagataaccttccatccagttaaatctacaaattttgaaaaagtatctacatctgtagtagttaaagaatccttcctcatataatcaatgcgtggcatacctgtccatgaaatcttatcactgctatttcctcctaatcgtaagacgccatttcctaaattcttcatcatttgaatcaatacaagattatcaggatgcagataacgggagttatcggtcaactgagacatttcatagctaaatcccaaaaagtcagaaggtatgatggtatgtaaccgataatcggaaagtacagtaacagtaacaggtacttctttttcaccttttatatccagccccaatacaacaggtgttcggataaaaagtagtacaactataatgaagtgcaacttcttcatatatctataattttattatttttcggtaaaaacatctacaacactacttcctacgtaatcgcccacaggcaaagtaaaaataatattgctaccttgttctgttatagtaaccccgctcttctccatcatctttttatttagagttaacgttacatttgcttgtgtatatgtaggatctgacacagcaatagtataagtgttaccttttttttcaataaagacaatagaaggcttatcagatgatatcactaaaccatcgtccatctttgtactggcgcttttataaaaaacaaatccatacttattgccttcacgtatagcctgaaccgaaccatcattttgtgcaatataaaaatctatctgctcagctaaatcccgaaatgcatttatagacttatccggtacaacaatatattgataactggcattctccggattaagtccgtgatttatccagacactaaaaacattcttatctataagccccgattctcctgtagcattgatatctttccaagaacctgcttgagacatattttgtatagtaacattatctgttcctctaaaaatataccctgtgttattatgatatacccatttcaattgcttcaattgcatattactgtttgatgacagttgcttttcttgcccatcattataaataacctcaccattcaataaattctgttctacagaagtcaaaacattatcattctgaacataggaaatatcactgcctatacagaacatcatattatcaaagaaaaaatatgctttattagcctgcaattcattgtatttacccttataagcaataattccatttacaccatcactaacgcctccaccaaactcgttattaccaatctgataaccttctaaagacgtcttatcctgattagcaatagcagttgtaccaggaatacgagtccaatcccaaaccggatatatattatcatactccttacctgttgtcattatattcgtagctcctaaaggaagattatacccctttatgttttcattattcaaggattctgttccataagtacgctttgatattatttttgcggacatatagaaattctcaccatgttgtgtcatcatatctgatttccagaaatgtttgttcacatttgctttaggaaaagcggttccactatttatatgatttatccatgctctataaatcccggcattggcaggatcgccaacgaccgccctttccaagacatccacaggaactgtagtatactcagacgtaggacgtgatatatttcgccctctagttccaaaatcgatagagtttcggaaactaagtaaaagatgtccctctaaaagtagtttctgaaatatttctttcttttcaagagtaaattcatttgcaaactgagtatcaacagacatttccataaattttgaaacgtcatcggtcagcgacattccatatcctcccgaataaatctgggcatgatgttgatggaaactgccatctattttaatcccctctttcccttgttctgaaacaattgacaatgtggaagcaatcgccttaaaagcatgttgtactgttgaataattatcctcagcacaccctttgtgcattgcgatttcagcaatccacgataaattcttaccacctcctatataactttcaatcttatctttcaaatatgctgctgccacaagcatattttcatgtgaaatatgtcccttcaacaacagaagtggtatcatataagcttgaggggcaccgatatcattataccaccaattatccgaacaggaaggtgcctttttcttaaaacataacaaacccttttctatttgttgtaacaatgtagcatcattgaaaaatttgctttcaggatgcttgtagtttagtgccatagcttttaatctgttaagatggccattcggtttccagccatcagcagatatttgatcattatagtcaatatccgtccatgaaccatctgcctgcattgactttgagaagctttcaatattcttatcatctggtatatcactcaagtaactagcaatcaatcgctctgtaattgtatcaagagctttttgttcctcaggtgtattggtatactctatattatcctcattgtaaatttcgatctcggatattctatacccgccagtatagcctaatctcccacgtaagaccaattccacgtagcgagcttcttccttaaaaccctcaaatgtactaactgctttttcttctacatcattcctggatataacacttactattttatctttttcttttccaaaattgaggctatacgcattacatccacgttcatcaatccaatgcactactatttttgatacttcttgtacgctccctaaatcaattagaatagaatgtttatatgagtccgcagattcccaatatgttgttaaatcaccatcagtcattaaattagctttttcagtattagagcctgagccagttatgctattaattctggtttcgacggtctttcctaaagccaaattgatagattcttccgtatcagggtcctgattatcttcttctttttcaatcacatcattatcatgacaggaaataacaaaagaggaaaacaataaaagaattgcacttcctttcaaaaatttagtcaagttcacggcattaaatgttagtttttttattttcaaaaataaaaatctctttaataagaagttagttcaataatgaactaacttcttacattgcataactatttagttataattagaaatatccaggattctgttcttcctcatcagaaccacgaggattcagtcggtcaatatgcttttgaggaattggacgcaatttgtgatactcttgaatattcttcattgcatcaggattccatttttttacatactcaattaatttctcacaacgcaccagatcctcccatcttgtatattcacctaaaagctcacgccctctttcatccaacataaaatctacaaaattcatcttcaggtcatctgccgtcacttttatattttcataagtagattctgtattttccatctcaccaccttcttctagccaatattgaggtacctttttctcgccagctttccaggaagcacgttcacgaataatattaatcaaatcagcagctaaattatagtcccccttacgacctgccgcttccgcagcaatcaaataagtctcgccaagacgcatacgtacccattcacgtacacctttttgttcatttgctgtttctcttaatggatcctcgtatttcagcaaaataggataatatctgttatttttacttggatcattcttattccattgaaaatatttatacttatatgttctatttttgggagcatttaagctataatagattgcagtatctcctatagccaaggaagaagtcgctttattacaataataggtccatttaaaactcttataaaaacgggaatcatttttgcggtcaaacaactcaaacatcgttttattggtagcacgatgaaaacgataaggacgaccattagctatatcacgcatcataccaggttgatcttcataccatgacccccaatataaatgagatttgttcccatctccattatatatcggatcaagagtaaactgaatagaaaagataacctcactattccccatattgttaacatcccacaaatctgaatagttatttaacagagtatatttagaactatctatcactcttctagcatagtaataagcactatccatatcagttgacaattgcccacgctgatcagttatcgcactaccacgtgtaagataaactttagataataaatgagcagcggcatatttagtagccttactttgatccgtacctgtagctgattccctgagatgttctgctgcatatcttaaatcgctaacaattagcttataaacatctgcaacagaagaacgtttaaagtctgtctgaggttcttgtattgcttcagtgaccaaaggtatcttaccaaattgctgaactaaatcgaaataaaagtatgcacgaaagaaattcatttcagcaccatagctctctttctcagcctccgatatacttgcttccggcagtgcgtctaagacaagatttgtcactccgatagctttataatgattttcccacaaactatacaatttcgattctgttggtgacaaagttgcactatataagttatacggataacttaatgctccctctgcacctgttatcaggtcagtacctaactctgtaagaacattagagaactccccaccaactccaaaacgcatataagcatatgtagcatcaacagcagccagtatgccttgttctgttttataaaaatcacttgtgatacggggaacttctttctcagagagaaaatcatcacaaccagtatttgttagggaggtaaacccgcaagctatcgtaagaattatgccgatactttttctatattttacagctttcattttattcttattttattagtttaaaaagaaacattcacaccaaatatccaactgcttacactcggtgaagcataagttgctgctccttccggatcgactcctgtatagtttgtaaatacaagaggattctgggcagtaacatataatcggcaattagataaagttgctttattaactagattcttaggcaatgtataccctaatgttatcgtttttacacgtaaaaaatccgatttttcataatacaatgaggactcatactctatattatcatacagtctgttagggcgaggataagcattagtcggattgtttggagtccaataatcaaatttcacactattattacgataggactgatgattcacgcgaactgcatttttcaacattccgcctaaggttccataaagaacaatattcagatcaaagcctttataaacaaatgtattgctaagattaaaaatatgtttgggacgtttttgtccaaggatcatacgatcattgtccgcggtaattttatgatctccatcgatatccaacaatttaatcattcctggtgcaaatttgtgaccattcttattatatttttcaatttcagcaagatcctccggagaatcctgccagatgcctattttcttataatcataatatactccaagcgcttcacctataaaccagctattacctatatcatctacttttccattatacaattctacaatttcttccttattagttgaatacataaaatctgtagaccatgtgaaatctttattttgtatatttaccgtagacaaactaacctcaatacctttatttcttgttttaccaacattagtaagtacactcgtatagccagagacagcaggtaactgacggtcaagcagcaaatcatgtgtattttgcagataagcatcaactgttccactcaaacgtccacggaaaaaactgaaatcaacccctacattccattgcccggtagtttcccaagtcaatgttttatccggtaaactagaggaagtgtaaccaataaccatattttctccataattatagtacttctttgataacaatccttttgtttgataaggattaatagaagtgttggcagttacaccatatccaaaacgcaatttcaaattatcaagtttatcaaaattcttaagaaagttttcctcatttactctccatgctaacgaaaaagcagggaaagaaacccatttgtgtccatcagctagacgcgaagagccatcataacgcattgagaatgtagcataatacctgcttttataattataattcaagcgtcccatgaaagaagcaaggctccatacttggttattactatcataccctgttatatccaatgctgatgcaatatcattaaaaagcagatcatccgaaggtaaatcctgaacagtagcacttaaactttcggttctattacgctgaatagattgcaataaagtaactccgatagagtgttttccaaactgcttatcgtaaaataacagattttcaaaggtataagcataagtttgttgagtagcattttttgcctgattaggattgccctgtcttgcatttgaagataagaaggaataatcctgacgagaatgaaaatcaattccaatatttgcacgatacttaagcccatctaatggaagcttgatttccccataatagctacctaagaaacggttaattttcaaaggattaaccactgcgttaggttctaagtattgaagaggattccaccattgagaatcacctcctgaagtcatcaatgtaggaactccatcatcatcatacaatcgtccaagtggattcacacgccaacaatcctggaagttagaacctctattctgtaatgaatgactgaagtgcgactgtccacctatcttcaaccaattagttacttctgcatcaacactcaactttactgtatagcgtgagtaatcttgattcttataaataccttcattcttgaagtatgtagtattaaaagcaaactgcattttatcacctcctcctctaataccgagttggtgatcagtcactatacctgtacgttctacttcgttccaccacaaagcaccggaacgtactttgctggaatcataattaccgttttcatcataagccattgcaatagattgccaagtataatcatcaccagtaaacgagggtaatgttttatccagttccatattaggcagtgctgaatcgtattgtccagctgctctataagcttcacgcacatactccgcatattctgctccatccattaattccaacttgttttgaatggtctgaataccataatagccattatagtcaacctgcactttccctttcttacctttcttcgttgagattatgataactccattagcacctctggatccataaatagcagtagctgaggcatccttaagcacctctattgattctatatcaccaggtgcaaacaaattaggagctgttgaaataggaataccatccacaacatacaacggatcattgcctgctttgatagaacgtgtaccacgaataagaatagacggagtagctcccggagtccaacttgtgttctgtatcaatacacccggaactttaccctgaatagcctccgctgcagataatgccggactctgcaagagtttttcagaatcaacagaagtaacagagcctgtcaaatcacgcttttttacagttccatagcctacaactacaacctcatccaattctgaggcagcctcagttaaaacaacattcatcaccgtttgcgtaccaatctttttctcaagaacattgtaaccaatatagctaaactttaaagtcgaatttgatgaaacatttatttcaaactttccatctacatctgttattgtaccattagaagtaccaacttccactacactgactcctattaacggttcattcttctcatcagtgactaatcctttaatatttttctttccctgaccataaacagtaaacagagataaacacaacaatagtaggattacagaaaacctttttcctcctatttttcgttcacttttgtttgttagcataaaaatgtttttcatattaatatattttaaattggttctatttttaaaaggcatttattaaaaagataaataccattaaagtatcagtatacataattcaccaaaactcaaattatcaaaaagtattctaatgatatttttttagcaatacctccaaaaattaaagagtgtttttccatattcatcgttatttttagaaattaataatatagtatcttttctcaatacccataaaaaaactaatacactattgaaaacgtttaatgttgtttctacatgcaaaattagcgcataagcgatacgcatatatacaagatctcgccaatatcatgcttatatccgcaatgcgcaaagagaatacatttatggcgaaatcgaatacaactgccttttaacgggagttatcccctcaatcataaaacttaagttttaactaaatctcatcttattaaaatagaaattcaaccaaatagaatttgggaaaactcgatcagagcactatctttgttgaccagttaaagttattaatgccaagaagactactactcatgaaatattatattcaaatatctttgttgctactattttgttctatacaaaatatcagttcacataaccttaggcaaattagtaatcgtgacggtctatcaaacagttccgtaacttgcttatttcaagatgagaaacgattcctatggattggtacttatgatggactcaacatgtatgatagtcaaaaaatatatgtctataagccagatatcaataatcaaaatagcctttcaagcaatgtcatcagaaaaatcatagaaacagataactacctatggattagcactaaatggggattaaacaaactatcgcaaaaaagtaatgcaatagaggaatattataatgaatttggtgaaaattcatatattgccaaagacaatcaagactatttatatgtattcaatagaccaaatacattatctctatattcgaacttagacaataaatttataaacttccctatctataaagagaaagaattagacaatgtatcaagttttattgttgattctcaagatacgatatggattaatcataaaggtataatggaaaggtataccatatccgggaaaaaaacaaataatcctcaaattgtcagacatccggactttacacatccccaccttataaaatatgccttttacagtgacgagaaaataattatggtggattctgaaggaaacatattttacaaagaaaaaggaaaactacattttatcagaaagctaaagcaattgattcaggaaagtggtaaaattggagccattatttttgatgacaacgatgttcttatcggatttgagacaaatggtcttatacgacttatggctgaacaaaattaccaagcagagaagttcaacattaattgtggtatattctctttatggaaagataaacaacaagatattatttggattggtacagatgggcagggggtatatgcctggacaaaagacgaatatacatttactaatatattgctcaatgaacttccgatcagcaagaaaaggccgatccgcgctgtttacactgataaatataatactctatggttaggaaccaaagacaatggtataataaagatcaaccattatgatacttcaaaagagtattcaaatgataatgtcatacaccttacaacacaagaaggacttacgaataatgaagtttttgcatttgcaccaagtaatgtatatccaattttatggatcggttcaaatggacctggattaaattactactctttttcagacaataaaattcactcattagctaacaatactaatcaagatatctcccatgtacattccatgtgtgaaacaaacgactcactattatgggtaggtgcaggaaatactttattaaaaataaacattcaacaacagaaacaaggccttgaagctaaaaagattcaagcattcaattttgatgttcctcataaacagaaaaacaatcaaatatattctatatatccagaaaatgactccattatttgtattggaatgcgtggtaatggggtcatcagattaaattctcgcactgaaaattattctttcatttcttttgatagaaatggtatagcccccatgagtgatatattatgcatatatcaagaccaacatgaagatatatggttaggtacaagttatggattaaccaaactgaaaatctcatctaatggtaattatgactataagaattttaatgagaatgaaggtttacccaataatacaatacacggaattattgaagacaaagaaggacatctatggttaagcagcaataccggcattatattatttgattcccaaaagaatacgttcaggaactttaatcatagaacgggcttagatataacagaatttagtgataatgcatattttcaagacaaaataaacaacagatacttttttggaggagtaaatggcgtagtctggataaaaaaagagaaaaaaaagaaaaaaaactttgtgcctgatattcactttacaaaagtaagaatattcaataaggaatataacattcatgagtttgaaaaaaaagatagtaattctcaaaatatcgtgttgaaccataatcagaatttctttgcagtttcttttgtagccacagactttattaatggcgagaactgcagatattcttataaacttgaaaatttcaataatgtatggatggatacacgctctaatgaagcgcaatttacaaatatccctcccggagattatacattgaaagtaaaatacaatgatggaggaaatagcaatgacaatttaatcaaaagtatccgtatcatcattcttcccccttggtatcagagtattacagcccagataatatatgtattattgattattggggtaggattgggattttggcattatatccggcggaaatacgaacgaagaaaagccgccatgtccaaaaagttaaatgaaaaatataaggaagaaatgtatgaaggtaaactacgtttctttaccaacatcacacatgaattctgtacaccacttaccctgatttatggtccatgcgaaagaattctgcagcatgagaacagtgatgttttcattaaaaaatatgcccagattataaaatcaaatacagagcgtctcaatagcctgatacaagaagtaatagacttccgtcgcatggaaaccggcaatcaaatatgccatatacaagaactgaatatcagcaaattagcaaaagacattatagattcatttggtgagttggcagaacaaaatcaaatccatctggaaacaaatatcagtccagatattatatggaagagtgattatagcggatttactaagattctaaataatcttatttcgaatgcatttaaatatagccctgaaaatggaacaatacgtatatccataaaaatagaggtagataaactaaatattcaagtctataatacaggaaaaggaatttgtaaagagaatattccacttatatttaaccggtacagtatacttgataacattcaggagaatagcattaaaggactttcttccagaaatggtttaggacttgccatttgtcaaagtatggtagaactactgcaaggtactattgaagtaaaaagcgaaatagaccaatatgctcagttcatagtgaacctaccacagcttgaagtaacagaagaagccgaacatgtattgaatgaaactcctaaatccgaacctctaagcaacaatacgaatattgaaacagctgaaagaggtgattacgaaaaggaattcaaccaaccagaaacaaccattctgatgatagatgacaacaaagagttactgtggatgctaaaagatatactatccgatgaatattccattttaacggcagaaaatggtgaagaagggcttgttttattaaaacaaaagacaccggatcttatcattacagacattatgatgcccaaaatagatggaatcaccttaatcaaacaactcaaaagcaacaaacatacaatgcatattccattaattatcctctctgcaaaaaatacaaccgatgaaaaaattgagggtatagaatctggagcagacgcttacatccccaaaccattcaatactcaatatcttaggagtatcatcaaacaactattaaaaaagcaggaagaattaaagcaatactacaactcttcagcaagtgcctttgaatttagtggtggacagttgttacaacaggaagacaaaaaattcatggaaactgctgtcgaactaatcaatgaaaatatggacaacactgaatttggtccggaagaacttgcagaagccatgcaaaccagcagcagaaatttatatcgcaagtttaagaatctggatcaactcccccctaaagatttcatcaaagaacaaagaataaattatgctgccaaattactattaactacaacattgactatacaggaaatcatgtatcggacagctttcacaaatcggtcacatttctataaagagtttggcaaacgatacaatcaaactcccaaggaatacagagagagcaataaatataaagacgattctctcaactaaaaagagcctgtatatacaccaaaaacttaaggcaggaatgaaaataatattcattcttgcctcaaatttatattcagtgagcacctcatatattcagactctctattttcccaactgttaaggtgactggtcctaataaaccagattcaacaagaggtgaagtcttatcataatgtttccaagttgtaaatgcaattctacctcctgcaggctttggtttaccctgtagataccattcaggaagtttcttgataccaccgttgcgcaatgtagaatatttatttggaatatcctgataattataaacattctcttcaggcagatactcatcaccaatcaatcggttgacccataaatttgttacacgaatttctatcagattatctccttcgtgcaatagctgctgtatatcaatggcataaggaggtgcccaacaaatactagcacgttttccattcaccaacacttcagcaagtacttctactcgacctagatccaagcgcaaacaaatatcgtcctgcaaatagatattatttatagataacgaatagagataagtcatcgttcccgaaaaatgacgaaccccaaaatcctcttctaaatgtaatgaatgcaatctggctaaagttatttcctcagatgctcccatattttgaggaaaccgaacagtccaagggccttttaacggaatacatgtaggaagagtatcaacatgcttacggatacttgtacgttctgcaataaactcataaacaccagcctgccatgcaacaaaccgatgactgggtaaccatgaaagtacctgctcacttggatgaaacggagcaggtatccctttttgataaaggtttgttatttctgttttgtcaatactggaaggatggatacacagattgcagagtcctccttcataagcatccgctttacacaacaaatccgaatgagatatttcaaggtgcacgattgtgtctgaagttgttcctgctccggcatatactccatttatccaaagatgcggtgtgttatcctgataaactaaagcaaaatgggtccatcccgataatggtctgggatttcggtatacagccttattatgtatagtccgttcatagacaacgactccattccgacctactgacaacccaagggaactatgtccttttccatgccgtcgctctccttccaaaggataaatagcaaaaaaacgggcacgcatatcaccgagttcctgttcttccgtcatggctatatccacctcaggctttatccaacaagtaatactaaaatttgcagacaaagaatcctgtttcactacatttccaatagtcggaaacaaagaaacaccattgtatttcacatctgtgtacttccgttgtttctcaactttacgaaaaacaacaaacatggatcctgcaggagttagattaagaggtatttctacgccctcgttatcagtgcgatagaccgggcactgtagaatttcagttgtataaggatcccataactccggaatataaccttttatccggaaatgagccattcctttctcgtgcgctcgcttacgatttgcaacgaagtatatctcggctccttcttgttgataatggatagcatgaacagatgaatttcctgcttcagaatgataaacaaagtcgggagacacacctaaccggttaaaaatggtttgcaaatcttttccttcatgcacgttcgggtgctgccagactctttgtaccagtgcagcaaactcattctctttctctccatcacataaacctaaggtatgcagtggcctttgcccaaccaataccattccctcacctaccaatcgggccagtatccgcaacgtatgtaatgacattgtttccgatttaagcaacactaagagcttatagccatcaaaacgtgtagcgggaaaaagaatctttccatccttgatatgtgctttgtccagcatttcagtatttaccatatcataatcatatccttccggaggggccagtagggtttgttccggttcaatagtgctaccaaaactatcatcaccattatgataaagaatatcaccatagaaagttgaactctggaaaatgtactggcaacggttcaaatactcaatccatgcttttcccggtttccaccatgtattggtacggtcaaagtgtaacccccacgcccccatcgtcattcccggagcagcagtagggtgtggttggtgggcaaatctatgaaaataaattctactaagccctcgggtaaacatataatcacctaatgactttagagcatatggatactgcaaccatttatccgcatccggttcagaagtaaaagcctcggcaccaactacctttccaccaagcgtatgtgctattgaagctacttgtttgacggtacgattatacttataatttgcccaaagtacagtctgaccacaccagaattcccccatattaatgtcaagctgttgtgccacctgtaattcttccatcatattgcctccataaggctcagtataagttattatacccttctctttacatcgcttttgaaaatgaccatagtaacgttcagcaaacatatcagctctaactcgacgaaagtcaaacaggaaacgctttgtactttcctcgctctcaactattttattggctaatacgggtaaaaatggatacagttcatacccatgactttgttcaaaataggcaggcatgtcggaagtccaatcctggtcacccgtttcataactatctattagcaaaccgatcttagaatgtttggctattttctccattgtaggcatcagccttttaaacatacaattcaaatgataatccagtgcttctgtactgaatttgtcacaatctaatccggttgatttagagggggctgacttattcttctgatctttggctgtttgtccaaaacgcataatcagccactcaccagtaggaacatcccaagttaaaacgccatccttatcaagcctatttgataattcaagaattgacaacctaggtattactttcatatttgccggaatagccaaacaatatgtatctatgtaataatcaaacatatgtttgggagtgggtaactgaatcctgacttgttttccacccgttattttagtttcgctccacgttattatttgcatagctttatctggagtgatccacggaccaccactggatgaccaaccggggcagttgtgcattgcaaactccaaacccaacctttctgattctttgagcgtatgcagaataagatctacccattcatcactaagcgattctaccggaccaatagggatgccacttcctgcttcaaacaattgataccccgcaataccatttgccttcatggcttcaagatcacgggttataccatctttagttatattaccattcatccaatgccaccatgtataaactccggaagagaaaggcggattacgaaaagctgattcgagaagagctgaagaagatttagacaccttgtttttacaaacttccatagcaaaagtcggactaaccaagctaacgatacctgctgatgacaaaattttaagaaaggtgcgtcgttccataaataaaaagatttttaggtgaattctattaatcattgcatttctttgcagcaaagagaacaaaaccttttaattccctttgccacattccatattgaaaacaattctcaaattgtctctacatgcaaatataggaactcaacaacagatacatatatgtgttcttgccagaatgatatctaaacccacaaaatacaaaatgaatacactaatggctagattgagtacaaaaccagtggttcgacacttgcgtcaacagacattatttcttcagtaaccgccgcgtcaaatagtgcaccggataccacaccgaaaggaatccgacagtaatcaccgtaataaatatcagtactacatccgttacatgcacactaacaggataagcatccacaataaagctgccattaccaccacctaaggaaataatgccgaaacgctgctggatatagcaaagcaacagaccaagaacaataccggaaagtgcaccgaacagggaaataagccgaccttcaaacaaaaatatacgggctatcaagcggtcatcagctccaagattacgcagagtctccacgtcttcgcgtttatctaggatcaacatggaaagagaaccaatcacattgaaacaggctatcgcaagaataaatgtgagaaaaagataagatatgaatttctctatctccataatacggaacacatcagcctgctgctcataacggtctagtacaacaaattcatcacctaggatacgggcaatctttctctgcacagccgtaacatctgcccccggcttcaacttcaattcaacagccgacacctccgtgtcataattaaaaagattacgagcaaagctaagagaagtaagaatgtagcgtgcatcatacttctgctgattgacaacaaacactacaccgggagaaaataggtaatcacgattgaaagaagcggaaggattagccatattcacgcgtacattccgtttgggagcatacacctgaagaggatcaacaaactgaagtcctgttcccaactcagatatcaattccacacccaatacgccataatctacgatagagtcatgcaggataaactcacctgcaccgtacagcaaactatcaatagacgtaagctcctcgaagttatcttccacccctttaataatagccatagcctgacggtccttatattgcaccatggcattctcctccagcgtctctgtccagacagcaatttctggcaaagagcgcacttcctgaaatgctgccccctgcggttcaaagacttttccctcacgaatcgtaattttcaattccggatcaaaggctgtaaagaaccctgctaccatatcctgaaaaccattgaatacggacagtgtacagaccagcgccaacgtagccaatgccactccgcacaccgaaatgccggaaatgatattgatagcattgtgtttcttcttggagaagagataacgccgggctatgtagaagggaaggttcacttcaacaattcatctattttttcaagataatccagtgaatcatccacaaagaacttcagttccggaatgatgcgaagctgatgacgcacacgggttcccaactcataacggatagacttcatattatcattgacattctttattatctcttccgccttttccgaagggaagatactcagataagcacgtgcgacactcaagtccgggctgatacgcacagcactgacagagatcagtactcccggcatggatttagtttgcaacaggaaaatgtcactcaattccttctgaagcaaacgggctattttattctgacgagttgtttccataaatcaattatctatatttaaaggcaaagttacgcaaatatctcgttagactcatgatttatactttttttagcaccaaaacgtagcttttcattaattaaaaactacatttgcaacaacatcacaaaatagcttactttatgaaagtacacgtttggataatactactatttttctcatccattgcctatgcagaagaggatatccgctggaaagatgcagatgaaaaaatgcaggaacagcagtatgaagaagctgcaaaattgtataaagaattaagtcataaatcagataccgtttatgaggagatcaattcccgtggagtaaaggatatgcggaaaatctactcaatcgatgagctggaacttgccaacagccagcaacagaaccgtttgctttcattagctctcatcatccttccgttttttattgccattgccataggctgcgttgtatatttaagaaaacaacgtagaaagctaatacaatcgcaactgaagcttcagcaggcacaagaggaagtagagaaatccacgcgaaataaaagcctgttcatttcgaacatgagtcatgaaatccgcacccccttaaatgccttgtccggtttctccgaagtactgaccacccccggtattgatgaagatacccggaaacaatgttatgaaatcattcagttaaattcccgcctactgatcaatctgctcaacgatgtagtggatatttcctgcctagacgtaaagaacatgaagttcgacctaaaggtatgcgacgctgtccctctttgcgaaggaatcattcaaaccgtagaagggattaagcaaacacaagctgcattatctttcgaaacaacactgccttctttggaaatagaaacagacatattccgcctaccccaggtactgatcaacattttagtcaacgccaccaaattcaccaaagaaggcagtattatcctgcggttagagcaaaatgaagagggtatggcgcaattctcagttacagacaccggttgtggcattccattggaaaagcaggctacaatattcaaccgcttcgaacgggtagacgagaaatcccagggaacaggtatcggtttatctatctgccagtttattattgaccaacttggtggaaatatctggatagacccggaatatacgaacggttcacgtttcatcttcactcacccattaaaacaagcaggcaaagcatgaaaaaaataattctctttattctgcttctggcagacatacccttcctgacagaaacacatgcatctacgaagcagcaagcgcgcgacagcatattccagacagccgctaccatacccaatgattccatccgctgcatatttctgagaaatgcattccagcaatacattggtcaggaatcggctaccgaatatctggattctgcaattgtgcttgcccgccggaagcaaatacacggagaagagttatgggcactttttgactattgccgccaatatgaatatcttgcagatattttcaatcagcaaaaaaggcttttaatactgaaagaggccagctaccagtataaggattatgcattttactataccatgtggctttccgtacttcaggcacgatgtgcgctgggagataccgaatatgccattatgcaagcccaagagatgagagatgagtccacccgcctcaattataaaaaaggcaacttcatcgcggctcttgcattggcacaggcctatgattttgccggacggtatgacgaggccatcgaaatatacaaacaggctttggagaataatcctacggccaatgaaaatggactattaataatacacggaaatctggctaaactttataaaaaacaggaaaaatatccgcaagccctcagtgaatatcagaagcaactggatgttctcacaaaagtgtccaaaggacttcccctatcagacacattcaaaacaatatttctggaaatagaaacatcgttttgcaaaatctatatgattactaaagaccaggaaaaactaatccagcacctgaaaaaggcagaagaatattatagtgataatgtgtatctcggtgcctatataaactaccatagcctatggggattttattataagctcactgaagagtgggacaaatgcttccgggagcttgacctggcattggccgcctgtaggggaacggatcctttcaacgaaaacgacttactcaaatcaaaagcagacgccttgctggaaaccggacgttataaagatgctgccaacctgtataaaatggtagccataaaaggggattctctcaatcaggacatgctacaacggcacaaagaagcccatcaagccaactataaaatccgaagagctttacttgaaaaagaagaactgaccaaacgatatcgttatatacaggtaggtgcaggtacaattatattactaatattagtttttgtcattatacgtgcctatcatattcgctgtcagttacggcatgcagagaaggaaacccgaaaagccttcgaaagaatggaagccgctgacaagatgaaagaatgcttcctccataacatcacctatgagatacgtatacccttgaacactgtagtcggtttttctgaattactatcttcagaaaatgacttaacggatgaagaaatagaagagtattcaattgctgtaaaaagcaattcaacgaaactactaaagctcataaacaatatcctcgacttatcacgtcttgaagcaggaatgatgcgcttcaccgttcaagaatgcgatgccgttcaactatgtcgggaaaccaaaatgattgtggatatggagactcccggcattgtgaaatcaaccttcaatacagaattggaaatgttgcagataaaggctgacagtaaatggttcctgaaattacttacttcactcttatcagtccctcaagaatataagggagagaaacgcgaagtggaatatactttaagccaggaagacaaatacctgaaaataatcatcctgcgaagtcccctttatcagtgttgggaggacgaacaggaacaacatatcctgcataatatcaaccgcctctatgtggaaacgttcaaggggagttatcaagtagaagaacagggagaggaaaagattgtctctatcacatatccgatatcctgaattacttcttatggataattgttaatccgtcccgcaggggaaggattactttttctacgcgtgtatcatgtgctacatgttcattgaaagccttgatgccaatggtttgcaagtcattattgcgggggtgttcttccagcacatggttatcccacagggtattatcggcgataatataacctccgtcagaaagattggaaagcaccatctcgtaataatcaacgtatttccgcttatctccatcgataaaagccaaatcgaacgttatgcccaactgcggcactaattgcaacgcatcaccaatgtagagttttattttattcgcatactcagaaccttccaaccacggacgggtaaagtcttcctgctcatcattgatctcaaacgtgtacaacatgccgtcttccggtaagccttcggcaagacaaagagcagaataaccgctatatgtccctatctccagaatacgatgaggacgtatcattttaacaaacatctttagcatccgcccctgtaaatggcccgatgccatacgcggataaagcaatttaaggtgtgtgtcccgataaagagccttcagataatctccttcatcgtcaatatgctgcaagatatattcgtctatggtcatagaaatgaagaatgaagaatgaaaaatcaggctatactgcacaaaaattcttcattcttcatttttaatttattatttattaaaggtatctgtttttattgggtaatacactttcttccgcatacttcagagcatctcccactacattaatttcgaggaaagaagtatgtgttccggctttaccgctactcagataacccaccatatcagattctgataaacggccttctttcagcagacgacgcagagctgcgaaatagtattcctgaccgttagcaagttccggcatgtaaatagcttccacaccgtaagaaagtgccagatggcgcattgtcttttccttataacagatggccagcaccggatatttaccacggaatgcagcaaggttgcgggcagtacgtccactgtaactatcagtgatgatcgcacgtatcttcaacttcgaagtagcctttacagcttgtttcgccaggaaggcagtcacatcgttgctgttctcatccagtggaatacgaatatcgttatcagccaatttatctttttctgcctgtgcagccacctttgtcatagtcttcacggcatccaacggatatttaccatacgccgtttcaccgctcagcatcaaagcatccgtacggtaataaatagcattcgcaatatctgttacctctgcacgggtaggacgcggattggtaatcattgtatgaagcatctgcgtagccacaattaccggtttctttgccaggatacatttacgaatcagcaaacgctgaatacccggaatacgctcttgggggacttcgataccaaggtcaccacgagccaccatcacaccgtcagccacttccaggatttcatcaatgttatcaacgccttcctgattctctatcttggccacgatacggatatcactgttatgagcatccagaatttcctttatatccagaacatcctgtttattacgcacaaaagagtgagcaataaagtcgatgtctttctcaatggcataaagaatattggtacggtccttttccgtcagagaaggaagattgatgcgtactcccggcacatttacgctcttacgacttcccaaagtagcatcattctgtatctcacataccaaataatcttccgttttatccacaacaatcatttccagatcaccatcatcaataaggatgtgtatgccaatggcaacatcgtgcacaaagttagggtaggaaacggaaatacattcacgggtagtttccagatctggatcacctacgactttcactctgtcaccgactttgtaagcgataggatcggcacagatggtagtacgcacctccggacctttagtatccatcaggatagctatacggttggacaccgcacgcacattatttatcagcatctccgaaccttcgcggccgagatgtgccgtgttcatacgcaccacattcataccggcttcaaacaagccttttataaaatcaacatcgcaacgcttatcagaaatggttgcaacgatttttgtctgtttcaataacataatcttatacctatttttgtttaattacaaatcatgaattacgaattactcgttgccggtcaaggcttcgagcgccaggcggtaagagttcaatccgaaaccgcagataacgcctttgcaggcgcaagctatcatagatacatgacggaaagcctcacgagcatgcacattagaaatgtgtacctcgataaccggagaagtcactgaacggatagcatcctgcaaagcaatggaagtatgggtgtaagcacctgcattcaggataattccgtctacatcaaaaccggtttgctgaatcttgtctatcagctctccctcgatgttcgactggaaatagtctatttgtatatcagtatacttcttacgaagttcgacaaggtaatcttcaaaagtaacactgccgtaaatggaaggttcacgtttgcccagcagattgatattcgggccattaataatttgtatcctcataacacaattttttatacctttgttccggaactatagctccgcagcaactccgtaagaagtccgtacctgctccgtagtaagtccgtagcagctccgtatcaggtccgtagtaagtccaagcctatagacacggagcagatacggggcagatacggatcggatacgttccggaaaacattcaaattcagggaacaaaggtagaaaaaagaaatgaaattagacgaaaaaacaataaataaggagaaagaagcactgattatcaggaagtatcagcagtatctaaagttagaaaaagcactttctgccaatacgcttgatgcctatctgaccgatcttgataaattactgcgttttttgaaagcagagaatattgatatgctgtcagtcactctggacgacttgcaacgtttcgccgccggcttgcatgacatcggcattcatccccgctcccaggcacgcatcatgtccggaataaaatcattcttccacttcctgattatggcagactatcgggaagatgatcccagtgaattgctcgaaggtcctaaaataggttttaaactaccggaagtactaaccgtagaagaaatagacaccatcatagctactgtagacatgagtaaaaaggaaggccagcgcaaccgggccattctggaaactctatacagctgcggactgcgcgtctcggaactttgtaatctgaagctgtccgagctctatttcgatgaaggttttattaaggtggaaggaaaaggcagcaaacaacgattagtccctatttccccacgtgccatcaaagaaataaaatactggttgctcgaccgtaatgttggtaaaataaagaaaggatttgaagattatgtattccttgcccgctggggaaacagtatctcccgcatcatggtttttcacctgataaaggagttggcggagaaagccggtatcaccaaaaatatcagcccgcacaccttccgtcattccttcgctacccacttgctggaaggaggcgcgaacctgcgtgccatacaatgtatgctgggacacgaatccatcgcaacaaccgaaatttatacccatatcgaccggaatatgttgcggagtgagatcattgaacaccatccaaggaacatcaagtacagaaaagagacaggatttcattaaattataataaaattggctattcctttcagattgtgccgggagatttaatatctttgcgaggctattatcatgtggtaataggcactaagagaaaccaatagactaatttcaattacaaacaattaatttatacctaaaatgactaagagattgtatctgcctttgttaatggcactggttgttgcactttcatcttgtagcagcaaaatgggtgaattatcttctgattatttcaccgtgacccctcaggttcttgaagctgttggtggcaaagttcccgccactatcaacggaaaattccctgaaaagtattttaacaagaaagctgtagtagaagtaactccggttctgaaatggaacggtggagaagctaaaggacagtcagccgtattccaaggagaaaaagtagaaggtaacgaccagaccatctcatacaagatgggtggtaactacactatgaagacttctttcgattatgttcccgaaatggcaaaatcagagttatatctggaatttaaagccacaatcggtaacaaaacagtaactattcctgctgtgaaagtagctgatggtgtgatttctacctctgaaatggttgagcagacgctgagcagcgctactcctgccaacggtgacgacgctttccaacgtatcatcaaggagaaacacgatgctaacatcatgttcttgattcagcaagctaatgtccgtgccggtgaattgaagaccgctaaggaattcaacgaagaagtgaagaacgtagacggtgctgttaacaagaagatcagcaacatcgaagtttctgcttatgcatctcctgatggcggtgtaagcctgaacactaagttggccgaaaaccgtcaggacaacactgcaaaggttatcaaccagaacttgaagaaagcaaaaattgacgctgcaatcgatacaaaatatactgctcaggactgggaaggtttccaggaattggtatctaaatctaatatccaagataaagaactgatccttcgcgttctgtctatgtattctgatcctgaacaaagagagcaggaaatcaagaacatttcttctgtttacaagaacttagctgacgaaatcttgccgcaattgcgtcgttctcgtctgactttgaattatgaaatcatcggtaagtctgatgatgaaatcgctaatctggctaacacagatgctaagcagctgagtctggaagaattgctgtacgcagctactctgactaacgatccggctaaacaagaagtaatcttcactaaagctactcagatttatccgaacgactatcgtgcttacaataacttaggtaaactggcttaccagtcaggtaaccttgacaaggctgaaagctacttcaagaaagcagcttctatcaaggatgctcctgaagttaacatgaaccttggtttgatcgctttgacaaaaggtgataaagccgctgctgaaacttacctgagcaaagcttccggtgcaaaagaactgaacgaagctctgggtaacctgtacatcgctcaaggtcaatatgacagagctgtaagcgcattcggcaacacgaaatctaacagtgccgctttggctcagatcctggctaaggactacaacaaagctaaaaacactttggcaagtgtagaaaagccagacgcttatactgagtacctgatggctgtattaggtgcaagaactaacaattcttctatggttaccagcagcttgaagagcgctgtagctaaagattcttcattagctaagaaagcagcttctgatctggaatttgctaagtacttcacgaatgcagatttcatgagcatcattcagtaagaagctcttcactaattacgattagtgattttaagtagtaaataaataaatatctgtagaatgcccggcgttgagaaatgtcgggcatttcttttttattatctgcaaaaaccgtactttcgcaaaaaagtatttagagatgaagaacgtctgtctattatatcttctattaatcggcctctctgcctgtggtggaaagaagaccgatagtatcaacctcagtggagaaatcaaaggattggggaatgataccatctatttatatggtgcggacagaatgcatgaccgcatggatacactgattgccgaaaaagataaattctccgcgacactttctgctgatacgttagtcaccacaatcttattattcagcgatggaacagagtatccgcttttcctgaataaagggaataagatacaaataaaaggctccatggccgaactatcctctttacaaatcagcggcaatgcccccaataaagaattaacagacttcaaccaggaactaaaaggattgggtaccccgtccaaaaaagctttggaagagaaagcggagaatttcattactgaacatcctgcttcattagccagtatctatctgctggataaatactttgtgcaaaaccctcaacccgatttgacacaaatccagaaactggccgaccgtatgaccggagaactgaaggaccgtccctttatggatgcattgctgaagcggattgaagaagaagaaaaagtagctgtagggaaatcggcgccctacttccgactacgcaatgcggaagaaaaagatataagtcgctccaactttaaagatcagtacctgctcatacagttctgggcttcgtgggatacggtcagccgtgcaaacaatgccatgttccgccgtatttataagaaagagcagaagaataagaacttcgcattgctgggcgtttctctcgatcttgataaaaagaaatggcaggaaaccatcaaagcggatacgctgaaatgggaacaagcctgtgatttctccggctggagcggagagattatcaaacaatttgccatacagacgcttcccaccaatatacttctcagtcctacgggaagaatagaaggtaaaaatctggatgaaaaagcaattgagaacaagctaaaagagattgctgaaaaagaaaaggagaaatcactcaccactaatcactaataaacacgtgctaatcaaagttttcggagcggctgtgcaaggtatcgacgcaactctcatcaccatcgaagtaaatagttcaagaggttgtatgttctatcttgtcggactaccggattcggccgtcaaagaaagccaccaacgtatcatttccgcgctacaagtgaatggataccggatacctaccagcaatatcatcatcaatatggcaccggctgatatccgcaaagaaggttccgcctatgacctcccacttgccattggtatgcttgccgccggagaagtaatccaaccggataagctgaaccgctacctgatgatgggcgaactgagccttgacggtagcctgcaacccatcaagggggctctgcccattgccatcaaagcacgtgaattaggattcgagggaatcatagtacccagacagaacgctcttgaagcggctgtagtcaatcagattcaagtatatggagttgaaaacatcaaagaggtaatagaattcttcaatgggaagcaggaactcactcctaccatcgtcaacacccgcgaagagttttatgcacaacaaagtagctttgatctggacttcgcagatgtaaaaggacaggagaacgtaaaacgtgcactggaagtggcagcggcagggggacataatattattctgattggtgccccgggaagcggaaaatccatgcttgccaaaagattaccatccattcttcccccgctgtccctgggagagagccttgaaactacaaaaatacattctgtggcaggaaggctgcaaaacaatacggggcttatttcaaaacgcccgttccgcgatccccatcacaccatttccacagtggccatgacgggtggaggcagttatccacaaccaggagaaatcagccttgcccataatggaattttatttctggacgagttgccagaattcaatcgcagcgtactggaagtcctccgccaaccgctggaagaccgaaagatcaccatttcccgtgtgaaaagcaatgtggaataccctgccagttttatgctggtagcctctatgaacccatgtccttgcggatattacaatcatccgacaaaagcttgtgtatgcagtccgggacaagtacaaaaatacctgaatcgtatctctggtcctctacttgaccgcatcgacctacaaattgaagtagttcctgtaccttttgagaaaatgtccgatgcacatccgggagaagcaagttccatcatacgggagcgtgtaatctccgcccgacaaattcaggaaaacagatatgcagatattccgggcgtttactgtaatgcacaaatgagcagcaaactactttccctatatgctcgtccggatgacaaaggtcttgccttactgaaaaatgcgatgaacaggcttaatctttccgcccgtgcctatgaccgtatactaaaagtggcacgtaccattgccgaccttgaaaacagtgacctgatacagccctcacatttggcagaagccatcggatacaggaatctggatagagaagactgggcgggataatccagaaaaaaacaatagttcactattttccccctaatttgcatcattttctccctaactataacttcattggcttagatttgcagtaatcaaaatctaaaatactatggaggcaaagacattatcccgttttttcccaaagttgtcacttataataaaggacaacatggaacaaccgcctttattctttacattacatctatccaaagatagtaatataaagcaaatatccttttgtctcccattcatttcaattaactgtatatcaaaatattacaataatcttgtaatacacttgaaatatatctgtaataagtacagcctacttttgcagccagaataatatttataaatatacagaagaagagaacataatttataactaaaactttattttatgctgaatgtacaattaaaaagaaaaagaacatttgcgcaaagcgtgctctttgtagtgttcttgctaagtagtaccttagcatttgcccagaacaaggttaccggtactgttacagacaaatccggtgagccattggcaggcgtcaatgtattagaaaaaggcaccaccaatggttgtatcaccgatcttgacggtaaatactctatagaagtgaaaagagggcaaaccctcatatttactttcattggctttactaaaaaagaggttcaagtgaaccaaagcgctattaatgtagtaatggaggaagattcccaaacattagatgaagtagtagtagtgggatatggtagcatgacgcgtaaggatgttaccagctctatcacaacagtgaaagcagatgatttgaacgtaggtgtctacactaatccggcgcaactgctacaaggaaaagttccgggattgaccattgccaataccagtgaccctaatggctcggcatctatctctctgcgtggtacatcttctttacgcgagggtgcagccatggaaccatactacgtaatcgatggcgtcccgggcgtcagcctgtcgcttattgctccggaagacattgagagcatcgatgttcttcgtgatgccagtgccacagccatctatggttcaaaagccgctaatggtgtaatcattgtcaccaccaagaaaggtagcaagaatggtaaaaccaatgtaaactacagtggttatgtagctatagataatactttgaaaactctggacatgatgaatgccagcgaacttctggcctatgccaacgcaaataatgtcgacctttccccctactacgatgtaaacaacccggccgacaccaattggcaggatgaagtattgcgttccggtttcagccacaatcataatatctctatcaacggtggcaatgaaaaaaccacctatagtgcatctctcaactacatcgaccgagaaggtgttgtgagaggaacttcaatggatcgcatcacagcccgttctttcttgcaaaccaaaactctgaaagatcatctggatttgtcggttagtgtaaatgcaagcataaccaacaaacaaacggcctcaaccgaaaatcagggacggagtgtactggatgccatgtactattacaatccgctggttcctgtaaagaatgcagacggttcctggtacgctaatacaagtatctcacaaagttataacccgctgtcaatggtctatgaagatcagtacaaaacaaaagagaaaatgttgcaaggtattgccaaagcaacccttcacatcattgacggactagattggaatctgaatctttcttatcaaaacgaacagtatatttacagtaactacaatactacacagtcacaacttcccaacatctcttcccgccacggtcaggcttcacgcagcaccaaggaaaacatcaagaagcagatggaaacttacgtcaattatgaccatgtatttgccgacaaacacaaactgggtttgatggccggttactcttgggagcagaacgatgataatgatggcttcggcttaactgtatacaacttttacgacgattacctgaaatattacaatatgggattggccaacaatatggatattgacggcattaatagcgacaacaaactttccactctgcgcatgatttcattctatggccgcgtaaactacagttttaacagcaagtacctgttccaagctaccatacgacgcgatggttcttccgctttcggcaagaacaaccgctggggtacattcccttccgtatcattggcatggcgcattacagaagaaaatttcatgaagaatcagaaagtgtttgatgacctgaaattccgcataggctatggtgtaagcggtaactcactgggatttgacgcctataccgcacagcaaacttacggtgcatcgggttggttcacttacgtggatcccgtcacaggatcatcctccagctaccgtacactggccgctaccaaaaatgctaatccagacttgaaatgggagcgtacaggcatgttcaacgtcggtattgacttcggattcttcaacaaccgactgaccggtaccatcgaatactacgacaagcgcacaaaagatctgatctttgattatacagtttctaccaaccgttatccttacggcacaatgactgcgaacgtaggtgagattagcaacaaaggtatcgaactgactatcaacgccacccctgtagtaacaagaaactttacctggagcactactttgaacatttcacacaacaaaaataacgtggaatcgctgtctaatgatacttactcagtaaattacaaagactatggtaacccggatttgggaggttatgccaccactaacgtgcaacgcctgatgcctggtagtcctgtaggacagttctacctttgggaatgggcaggatacaacgaggcaggcggttccgtcttcaacgactatgacgaagacggtaatctggtaggcaccaccgattctcctaacgacggcgaccgtcgcaaggctggttccgcacaacccaaagtaaccttcgggtggaacaatactctcaactacaagaattggtcactgaccgccttcttccagggcattgcaggaaacaagattttcaatgccacacgtgctttctacaataacgtaactctgctcaatacaggtaagaatatcttaagcgaagtggctaccatgcaaaaggctaccgatacacgtgcacaagctccttccgaccgttatatcgagaatggatcttatctacgtctagcctctttatcattgggctacgatttcggtaaactgggcgactgggtaaacagtctgaaaatttatgctacctgcaacaatgtgtttacattgaccggctacaagggtgtcgatcctgaaatcaatcttggcggtttacagccgggtatcgactggcgtaataccacttacccccgtacccgcacctttatgtttggtgtaaatattaacttctaatcttttaaaagaagacataaatatgaaaacaagatacattatttccagtgccctgatggcacttgcaaccgtcggttgcactgacctggacgtggacatcaaatcggtctatacggaatatcccactgattcggaaattgctatagaagctagaatcagtaatgcttatttcgccttccgcgatgccattggccgtcgctacgatgaaggtatctcatgcaactctgatgaatatacagcagtcagctttggtggtgactacttaaatgaccgcgacatggcaaacttctcacttcacagtgtagatcaggatgcctgcaaaaaccaattaaacgtttatagcgaaattcaaggtggtataactaaatgtaaccaaattctcatggatttgggagacgaaaatgtatcggtttccgcccctgtacgtgcagcgcgtgctttctatacttttttgctgatggacaattggggtgacacccccatcattgactatcgattactgggagcagatggaatagtagaccgttctccacgtgccgatgtagcccgttggattgagaccgaactgctggaagtgcgcgatgactgccctacggaagtatcttccgaaacctacggcacacccacccgttggatggtagacgctcttcttgccaagctatacatcaattggaatgtctatacgcaagatgtcaccagtgccagttggtcatctaccgctaccaatgaaaagctgaatgattgtgttgcagcgtgtgatgatgtaattaaatccggtttgtttgatttgagcgacgattacaaaaagaagttcatgtatgacaacggcccacatatcaaagatttcatctatgcaatgccattcgatgctattacccagacaggcatgacgtacgcccgtttccgcacttggcgtcaaggacagaaagataacggcttttactctgttccattggcttcttccgtaggtggcaacatggcactaactccagaatatgcagaattattctgtctgccgggcgaccgccgcaacgatgtgattgccggtgatgcgaatgcagagacatttgatgtttatcagtacgacgccacaactggtgaaaagacgaatgtacgcaacacttatcagggcactcctgtcgttttcaccaaaaagattacactggctacacaagatggagacctcaatacaggtaaaaatctaaccggatgggttcaagggtataaatccatcaaattcttccccaacgtagaagaagtgaatgcccatagccgcaaccagagtaacgacatacctatcttccgctatgcagatattttattgatgaagtgcgaagccatcgttcgtggtgcatccgccaccaacggagacacccctcaaagcttgtttaatcagattcgttcgtatgtaaatgctcccacgatatcttccaccccatcattgcaggatatcctcgatgaacgtggacgtgaattcctggatgaacactggcgtcgcaacgacctgattcgtttcggtgacttcgaacgcgaatggggcttcaagtatttgaacccgaatgccaatgctttgaccaaccgcttgttaccgttaagtcgtgacattttgaatgtcaacaccaattggaaacaaaataacggatattaagtaattgttttcttttagagtttctaaaacctaaagccccgcattgcaactgatacacccaaattagtcagttgcagtgcctggctttttcattcaaacaaaaacttctaccaatgaaaaccaaactaatcacactatccttcctattgttattctcaacaaatacttttgcacaagataccggacttaccaattacgtcgatccgcgtatcggttccgagggactgggccgtgtcttcatcggtccttcctgcccctacggaatggtgaaaccctcaccggactgtaccccacgtcccaacagcggctggttgcccatgcccgaacaggtggacggcttctcccaagtacacgttagcggaacaggtggcggccccaaatacggaaatattcttgtaatgcctttctgcaacggaatggaccgtatcaatcacatcgaccatcgcaaggacgaaacaataaaattaggatattactccacccaattccagtcttccggcatacaaacagaaattaccaccgcccccaaagcatcgttctatcggttcacctaccccaaagactccctgaaatcactggccatcgatgccggattcttcttaggtgaaagccccgtacccgatgcccgcgaagctcagcaattcgtaggttccgaaatacaaatcgtctccgaccatgaagtcatcggctacacccgtattcgcggcggatggaacaatggccgtgcctatacagtctacttttacgcagaaaccgacaagcctttcgtaaatacagctacctggaaaagcgataagatcacagatgagaagttccaatacgactcacatcaaaagaccggagccctgttgcgcttcaactcttctgaagacgttatacaactgaaagtaggtatctccttcctcagctcactgaaagcacgtcagaatgcccatactgacattcctcactggtcattcgaaactgtacacaaacagttactggcccaatgggaagatttactccaaagaattgaaatctctccccgcacccccgaagcacagaaacgtatgttctacaccggcctctatcataccatgattatgcctgtagaccgcagtggagagaatcctctctgggcagatgacgaaccttattacgatgacttctacgccatctgggacacttaccgcacttctactccactcatcaccctgatagacccgaaacgtgaaacagacatcgtccgttcacttatcaacatctacaaacgagacggctacatgcccgacgcccgtagcggtaacagcaatggtcgtacccaaggcggttcgaatgctgaaatcgtaatagccgatgctttcgtaaaaggtctggaaggaatagactatgaactcggtctgcaagccatgctgaaagatgcaaccgtctgccccggcgaccgccatgaagcggaagggcgtggcggactaatcccctatctggaactcggctatatcccctacggcatccctcgcgccggaaaccgcaccgtagaatattcttattgtgactatgccatcgccctggttgccaaaggtctgggaaaagaggatctttaccaacactacctgaaacaatccggaaattggaagaatctctggcgtggcgattatgaacatgccggtgccaaaggctttatcctgccccgtgatgaaaagggcaattggctggatgaaatcactttcggaaaatccaagatacaaaaaccgacttttacctatacccccgtcacctttgaaggcccctggtacactccctggtgggacatgttcttctatgaagcttcttcgtgggagtattctctgagtattccgcacgatgttcccggactgattgagaaatgcggcggtgcagagaagtttgaaacacgtctggatattttcttcgacaagggcttcttcaatgtaaacaatgaaccgtctttcctctccccctgtctttatcattggttgggaaagccctaccggagcagcgaccgtatccgtgaaatcatctccaagaactacaacgatggtcctgtcggactaccgggaaatgacgactcgggtgccatgtcgtcctggcttgctttccacatgatgggattatatcccaatgccggacaagattattatcttatcaacactcctttattggaagaaacaatcttccggttggataacggaaggactttccggatttccacccaggggctttcggacaagaacagatacatacaatccgtcacactgaacggagcggcttacccttactcagctatacggcataaagacatcattgccggtggtgaactaatcctgaagatgggaaagaaaccaagtgaatgggggcagcaattattgttgaacgaagaaaacaagaaatgatgaagaaacatataattctatccgtcttattgtgcctgggcttcaccggaagcctgttggcacagagcattgtacccgatacactgctatttgtattcaaactgcacggacagacacggaagtacgaaatgtctttccgcgaaaagcaggattcaatctgtctgtattggggaatagaacgcaacctgaaatggcaatcgggaagttataccatgggacctaagtccatagagcaggccgtacagctcagtttcctgcaaccggaagacggtaagcacgtacagctctctccggaggaaacggtttacttcctttcccgctccgcctataaacagctgaaggaacagaatacacttgtatacaatcagacaacatactccgttctggatagcaatgagagagctttgggttatccactcattcatgtgaaagatgctgtggaaggatgcgaaatgtggatactggataatccaaaactttcgttagtatggagaatgcgcaacaacccgttagggattaactgggaaataagtactcctgaattaccttccttataaaagactttatttatcacataattccctcatatagaagaggttgtgccagcattttgacacaacctcatatattatttagatttcgctttctattctatcacaagatagagtagcagaattactgattactcccaccaattaacgttgccgtctttcactgccgtctggaaattcggatacttgatttcaatgttctgccgctcatcagtccactcacaggtagtcgggcagcacagtttccctggagctttccccacttctgccggcaatatcacatcattcacgcgaacgggtatatcttttatatcgttatatctgttctttagtcggaatattaccggagcttttgcctgcttgtcataagtattcaccattgtggattgagaaacgccaaacagttcgtgtacttcattgtcttcaatatacaaaggcattgtaccaccggctgcctgtaaggtcaccacagttgcaccattcacggttacggcatcaaatacaacatcattgaaatcgaaatctccaccagatattgtaaggtcttccgccatgattctttgggcttttatatatttagccggaacaattcgtacgatccaatcgctataatctccatccggtggagtgttttgattcatatagcactcaaaatcaagtccaacataataatctccttcatagaatattattatatgttcatcatatctggtgcctccttcgcccttatagctgaatgaacttgtaccgctgtcatacataaacatgatacttccggctgatttattgaaattgtaaacttcatccggagtcccattcttctccttatgtacagccaattgattcatattgtccttatttccatagtagacatgctgaacaaagaaatccgaccaattcacactctctataacagtggcctttgaaggatctttgaaaagctctacaattttgtttattttctcagaagtaagatcatcacttgagggaacttccacgaaatctttccattgattgctattaggattggaactacgtgttgttgcccctccaaatccccaattctgattagaagcaattgctccatactttcctacaaaagctgcttcatactgagcaagctttacatctcctgctttgtccggatcgtatagactatcggaactacaagaatacaaggcgcctacaatgacacttaaaagtcccaacttaagaattctattcatacgcttcctgttttttatgttaaacgattcttttattgcctgttactttaaagtaaaagcatattctctgatacaaagatatgtattttttgcgcaacttgtatttatattaggataaaaaatacaacttttagtcaaaacaggagttgattgctctataaacgccgagattgggtggtaatcctttatatattcttactttacggctattcttttcctattatctccgccaggaaagtttcaacctctttccatgaataataaggaaccattttgctcttcaacggcagtgtcacttcacactcgttcaacaggaatttcaccagtatatcattcttcttatcgcgatagaaaatcagttgaagattagctcccataggagaaacccggtaatcttgccaggcaagatgaaacttctccatatccacctcctgattactacatccttctatctgcatcaaagcaagcagacgaatgagatgagtatcatgtccgaaacggagatcggccgcaggggttcccttctctatggcggcatccgcactttccaggatattacgcagcaaaggtacggcacaacgaggcatcaggccgccattgagcggagcagcagcattgcaaacatacatgcgggcattcactgtcttccaaactcctactaattcctcatattcaaagatatcatagaaagacaaatccaactcaacattctgcatatcagcggcaatccaataaaggctgcgcatcatggcgtcttgatccgttatcgcttcaggcttcacaaacagggaggccatcagacgttcgggacggacgttctttttttcaaactctctgaagccacgcctccacggagccttctcagaagcaaatttctcaccttcgggggatgtataggcgatataatccatataccgatggtaagctctacggtttacttgcaggccaggattcagttctttcaggcgttcggtgaaataactcatactcatggcacaacgcagggaagtggatgagcgggcgtcaatgaaagcgtccccccgaaatacttgcggaaagttatgatacatccgttcggctatctcacggtgctggcgctcgccaagtggggtgatacttccactacatccgcgggcatcttcccaaaccttatgcagacgttcgcggacatccacgccaaggggagtcagttcggaacattgataaagggaatcaaagacgcagataacttccgtataacgctcatccgccgtcatccagcgggaaccgtgacgaccgtagtgactgatgtagaaaggctcataaccagcaggagcaggagtataggtggatgaaggaacaggataagcataataaatacttcctgtctgctccggagttaatgcagactgggaacgagctgtgaaagtacacagcaaatacaagataaaaattatgctttgtctcatcttcgtgacgaatttaagttattaatatgaatcagtagcttgtagcttatcacttttatttctttattttcagattacgaacatccctctgcccaatgccttctgttgcctgatcgggacggatatctccccaagtaacggtgcaatcatctatcagaatatcagatgccgtatcgatataaaagccatacgtcttatcatggataaacccttcgcccacacacggacgtttatcatagatccccccctcataagccgtacgcttttgcaatagcaggtctacgtcttcaaagtagatatgattcactttgtcttgtgtatccccacctacaaagatgccgttctcgctggtgcatttgatatttgaaaagtaaatacggctcacctctccgcaacgtccttcggtagctcccttcgggaaacgccagccagcatccttatgattgcctacggcacgcggataagaagtcacgtaaataggttccgcctttccccaccagacatcggagaagaacatgcaatccacaatcatattagagaaaatcacattggtaaccgttccttcatcccggttctgaataccgatgccacggttactgttcttgatgatacagttattgaacagtacattattaatcttatccatattttccgaacctatcttgatggcacaggaacgggaaaccatagtacagttggttacaactatgtcttcgcacgaaccgtattcttcaaactcacgacgattcttcagacagatgcagtcatcacccgattcgatatggcaattggctatacgtacattcttggaatggtctacatcgatgccgtcaccgttgcgtatcttcaagttattcaggatagagatgccatcgatggagacatcgttgcaaccgatgagatgaaccgtccaataggcactgttgcggattgtcacatcacggatcactgttttctctatattgataagcgtcagtacatgcggacggggatcaaagtcggtcaccggtttcagttcataagagtcttccagttccttacccataaaggagacaccgtttccatctatggctcctgttccggtgatggatacctctttcagatcttgaccatgaatccacatcatgccttcaccacgattatcacggaaagcgctcagtgtataggcagcctcatcaggattggcaagcagacaggaattaggttccagatgcagttccacaaatgaagccagatggaaagggctgcacatgaaagtacgccctgccggaaccagtaccgttccgccacccgatttggaacactgatcgatagcagcttgtatggccgcggcgtcatcggtgacaccatcacctttggctccgtagtccataatgttataaatagtccctccggtcttcggagtgccgcatgcccctaacagcaagatgctgcacaggacaaacaaaaatgcttttgctctcatataagttatctttcttaaaattagtaagctacgggctacgagctgcaagttacgagtgctgcgctatatagtcctataagctatcaactattattttatactaacataccggaaggcacttgtagcatgtagctcatcactcaatcaccgtcggcggacagtcttccgctgccgttccccactccttattcggtttatcccccatcacaaactccatcacaccaccgttcactatatcttgatgggtaatgtagtttcgcgtataaggttttccgttcagcgttgccgactgaatatagatattcctctgcgatgcgttacgggctttcactgtgaacttctttccactctcaagattcagcgtgaagctggggaatgaggggctggcaagtatataatacggagtaccgggacacaccggatagaatcccatagcggcaaacatgtaccaggccgacatctgtccggcatcgtcattgccggaaagtccacccggttcattcagatattccgtttccataacgtggcggacagcacgctgagtcttccagggttcacctgcataattgaacatataagcaacctgatgacaaggctcgtttccatgccagtaacgttgttcactgaacatggaatccaacttggctacatacttatctttccctcccatacttgccatcagtccgtatggatcttgcggcacgtaccaggtatagtgacagggggcaccttcagtaataaaacgggcaaaattaaaagcattggcatcattcagaaaagtaccatcggcatggcgcccctgggcatatcccgtacggggatctatcacattgcgataattggcagcacgccgtatcaatgcctggtaatcatccgtcttacccaaagcttttgccatctgtgcaagggcaaagtcatcataagcatattccaaggtacgtgatacctgttcctttgtatgaaaagcatcaggtacaccgtcttcaagaggaatatatccgtactccagataagaggtcagagctcgacgccccataccatttttatattcatcaaggttagaaggagtttcaaaggcattcttacgcattccttcataagccttgtccacatcgaaattacgaatccccttacagtatgcatcgctgatggcggagatacaatgatcacctatcatagcggcagtatagctattccaacaaggaaagatgggcaaccaaccaccttgttcatatttatgcaccaaagattgcatcatatctcccccctttgtcggaaaaagcagattgatcatcggatgcagggcacggtaggtatcccacatactataatcctcataatacgtttctccttcaggaagttggcatatcggagtgccattcgcaaaagagggataacggccatctatatcattgaatgtatgcggcagaaaagaagcacgatagaaagcaccgtaaaacatttccttgtctgcaagtcgttcggtctctacatcaatagcagagagatgtttctcccacatctgtcttagctctgtgcaagtctgtccaaagtcccaatgaggaatttcagctttcaggttcttcaaagcaccatcccggtcggtaaaagaggaggcagctttcaccaatacctcttcaccttcggtcacatcaaactccacataggcacctatctgcgccgcatctcctatctgaatgacgccgggagacaaagaatctcccttgaacacaccgtaatctgtcagcttcttttggaactgaatgataaaatatccgctataccctgccgattttccccaaccctgataaatgcggtgaacaggattatatccgtaaatctgattgttaagggtgtcgatgcagatatatccctgaccttcatcactgttagggtttaccaccagataaccttttcccgctttgctgtatgtgaaacggaaaattgcggaacgcgaacgccccgtcatttcggcatagatattctcatccggcagggaaaccgtataataagccggtgttgccgtttctttctcatgggagaaacgggtggaacgtgcttccggctggcaacgcaatttaccgaagagcggcatcaacgtcatagaaccgtagtcctgcgtacatccgcccacaatccagtgggagttacgaaagccttgcagcagagtatctgcgtaataatagggtgctatgcatttctcctccgtgtcccgcgtctgcgcagtccagaagttcattccgttgggttcgagtaccgccgggagggtttgcccgtattcttccgtatccctgccaaacaaccccgctgtatgggtcgcactgggggcggtacctacacgagtatcgatataggataatcgcgactcgtcaacagtcccacaacgactggtacacgaagtagtacccggcagcaacacagttgccagtaacagagaatagcatgtatagattgttcgtctcatcattattatatttttatatagattttctttttatacaatggatagccgcacgctcccatcagcagtgtaaaggcaagggcgtaaacggcagatgccagataaggatcggttatcagaaaatgtaccccttcgtaaatcaccggcttacttccggtggcgccaatgacaatagctgctacctcgctgagtacgtagagaaacaaagggttaacaccgaatatttcaaagaaacgacaccagttcttcttttccttcatgtcaatgaaataaatcagcacagactgaagcatggctgccaatccacatgttaccaacacaaatgtaggcgaccagatacgcttattcaacggtagggcttctgtcagcacaaaaccacatgccatcagaataaaacctgcaacaaacaatttcagtgttttctgttccaaagcttccttagccagaatgattttcccacaacagaagccgatcaaagtatgagcgatagcagaaagggtactggtaagtccttccggatctatcgggcttttatgataaaggtggtctgcacctaatacattccggtctatgatagccagaaggtttgtatcatccggtgcatatccgttgcctatacaaagcaaaacggcatatccggcgataaggcaaccaatgatccagccaatatatttatgattgacatacaaggctacaaaagaaactacacaatagcacaaggctatacgcggcaacactcccgtaagccgaagatgggcaaaaggaaagaaatctccatcacaaataaagtgaaaccagtgaatagcccagccgatgcataaaatgacaagagtacgtttcagtatcttacggaccaccgaaccagatgcttgaaaatggaacttgcccaaagcaatataagtggaaactcccatgatgaacaaaaagaacggaaagaccagatcacaaagagtcagcccattccatgcagaatgttgcaaagaatcataagataacttcccaccggaattattgacgaggatcataccgacgacagtaattccgcgcagcacatcaagagacaaaagtcgcttcttctgtggggaagtggaaatttgggggtgagagttttccatatactttctaaatatcaatatgcacagttggttgtatctcagttatactatctcattgccttctcaaacacttctttcgccacatccacacagcttccttcaggaaccgaactatacggattctttgccagtgtccagggttcttccatcgcataataatccagcttaacttcgggtttaccatccagttgatcctgaagagtttgccaataggctgcccaacgtttataatagaaatcgcgcagaataccgttccattctttatgtgcatagtcacgcagaccaccgtcatcagcgcaaacacgattgccccaagtggttatctgcacgcgggcattccactcgtacaggtctttttcttcgggagtagtccccaaattgcgtgcctgctctatccaacggcctacacggaattcactacgtgtacccagcaatttatcctgcaacagcaatatatccaggaatttccgggagtcacgggcaaaactgcgtttatcaaagcttttgaagtcagcaatggtccggttataaacaatacgtcctttatcggaaagagactgtcgtacgatgtctaccaagtcatattcaaagttattattaccacgatatttatcggctacttccaccatcagccgtgctgcttcttccgtaacggtaggatcataatagttcttcatcttcgaccagctcgatgcctggaagttattcagcgaaggacgtccgcagaaaatagactcatgaggaccttgttggttatttccgaaaggacagttataaatggtattggcaagcaaagtccatgccttttctatcttctcgtctcttacaccataacgggcaaagagataatctttcagccattcttctttcgtgaatttctccggtcgccagggaagttcgcacatcagttcaaacatcatggggttattctctgcaccttccatggtcagacctattcctttcaggtgaacagctaacggattattcttagtcaggtagaaattatcgagtaactggtccatacgaccgtgaagtcccacattgccaccgaaattgagcaacatacagaacagccaattgtgctgttcataccccttgtcacgcttccagatggaagggattccccacataggacgacattcactgaacaggtccagtatcagcagatctccattctgcatattctttatcatctcgggacgaggattctctgtccagccctgcactacccaggtggctttcggattcacttttttcatagccgccataatagctttcccggccgcatcaaaatctactgaagcggcattctcagcttcatgaaaagggtccatagaataataatcgaccttgccgaaaagcttctcctgttcctgataatataaatcagcaatctcggcaaagcggacatcggtaggttgcaggaaagcaggacgggtaaaaccgttccataaatcagacttggtcaggttcagtcccaacttctcatcagcatcgtggggaaccatacctgaatatcccggaaatacaggtttaatgccatattcgcgcatacgcttcaaaattttcttctgcaaagcttcctgctgtacataccaggaatccggattaggtccgccccatccttccagattattcattgcccaccaggcaagaaaagcagggccggcaatgaatcggttaatttcatctttagaatatcccagtttttgaagcatattgaaccagatacattcctggcctacggctgccaaagggagattgataccatgtagagccatccagtctatttctttctcccagcgttcccaatcccaaaaggccatagtataggaataggtacaatagttgaaatcgtaacggagtgagagagatgtttcgtgacgctcttttcgggagacaggaggaagtacctgcggcaatttcgcctgcataccattccatgacagttggataccggcataatatttcagataccagttgatacctgtcgctatattcacatagttattaccccggactacgactttagttcctttctggtccagttcgaaaaaatcatccgcacctttcttgaattcgataacaaatttcttcgatgctcccttatcaattctttcgagcaaaccgtttatagggttggctgataactgaacggataagcctactattaacaaaatgagtaaacagagtttggttttcatggtattcattcttctgggtgatgtgcaaaagtaagcgtttatttttttatgtaaggagaaaatagaaaagtttgggacgaatatagtaaagaatgacacaccttcttaccccttcttccccagcttcgagctcggcaaatatccgaagaactctttgaaacacttcgtaaaatatttaggatcgttgaatcctacagcataggctatttcggaaacattcacatctcccgatccttcctgtatcatccgttgcgccacgttcagacggtagttcttcataaactgtccgatgggctgtcccgtcaggtcctgcattttcttgttgaccaatgtcttgctgtagcccatgtcgcgtacaaagcgctccaggttatattccgcatcggcatagtgttccttcatcaggttgaccgcattcgtaatgaatgtcttgtctcgcgattcttcctttacatgcagctcttccacattactgctggatgagaacatcttcttatatttccttcgcagactcagtatattacggatacgaagccggagcacttcttcatcaaaaggtttgcaaagatactcgtccacacctatttcaaagcttcttttctcttgtacgtccgagcgaagcgccgtaagcatcaggaaaggaatgtgcgaagtcgccagattctccttgatacggcgggacaactccataccatccatcacaggcatcatcaaatcactgactattaagtcgacggtatgtttctgaacgatttcaagggcctcctgcccgtcacctgcctcaaacaaacgataatcccccacaagcagtgtgcggatatacgaacgcatatctttattatcttccacaatcaggatagtctctttcttctgggtatcctccggttgcaaagtatccggtagatatacactatcaggctgtacccactccccattcgtctctacccgttctccgggaatcagcggcatcaacatacggaatgaagccccctgcctgtgattattgcgggcaaagatttctccgccatgcaaatatacaatccgcttgcacaggaaaagaccgatgcctgtgccgctctgcccgtaaaccggatatttggtactcttcttagattggtaaaagcggtcgaaaatcttttccagatcttctgccacaaggccatgtcccgtatcgcatacattcatatagaatagtttctccccgttctttcctttaacagatgccacaaatatgtcaatacgaccgctatccggtgtaaacttaatagcattcgaaaccagattcaccaacaccttgcgcatatatcctgtatcgatcatcagaaagggattctccaaacggaaataagtacatatgtcgatatgcctttccttggcaaagactctgaaaggtatcagcaactcagacaaaaactcgataaaattcgaggaacgcttatccagcaccaccttgtctatgtccagtttccggaagtccatcagttcattgaccaaggaaagcaaataccgtgaatttcgctcggctatctgcaactgtgcctttacagcctcatcctgcgtctcctttaaagcatgttcaatggggccatgaatcagtgtaaccggagtacggaattcatgagtgatgttcgtaaagaaagcaatcttctcttccgtaatctcttttacgtgttgagccatggtttccaactgtttgttctggacagccagttcctgcgtgcgcagttccacttctttttccaatcgcgctttctgttcacgataactccgcatcttccgcttatagaataaataaatagcaaggcaaataactacgacaagaagcagatagaatccaatggatttataaaaataaggagtgatccccacttctatgtcagttatttcatccgaccaacgccccaactcatccgtcgcacgcacttgcagggtgtagttccccggcgggacagctgcatatcttgccatacaatcacccggttgagtttcattccactcttcctcgtatccctccagacgataggcaaagcgaatacggctgctgtttccataattctgtgtggtaaatcctacggagaaacgattctccctttcatgcaggaaaataccggaggcaagggtgatatccttttgcagataatcaccactggaaggatagataatatttcctccaatcgccagtgaagagagtttcacatgcgaatccgcagacggcgaagtttcattatcagaatgaataatgaccagtccgtctatagtagccatatagataaagtcgtgctttgacgaataatggatgccattccagtagaactgagtagcaggcaggccatcagcctgcgtgtagttactgaatgtcatcgactggatattcagacgggacactccatcattcgtagtcaaccacaagtttcccttcccgtcttcagccataccgataattgtattattaggcaacccgtgacgtgtggtatagtttttaaagacaaaatgattattcttgtcactcgtcaactgatacagtccgcttccattgccacccagccagatagtaccattcttgtcttccaaaatgctattaatcttttccagttgtgttgactgtggattatccagtttataccgaagatatttataatcaaagcgcttgttcgacttagcaaaagaagcaaggtctacaatgaagacaccttgcgtggttcccacccacaaacgtttatttctatcaatcaacagggcgtgaaccgcttcaaactcattatccgactgatcgaataatacacggatgaaagtatctttccgtttatcgtagaaatgcactccacgtgtagagccgaaccatattccgtgattgatcacatcttcacaggcactattaataaagtcaccttccaattcgggaatattctcacgggtatagcgcttaaaggtacggttattgggaatattcaggttcagttcgttaatgcccacaccccaggtatatgcccacaaacgattatcggagtcaatcagcagtccggtaatagtgttattactgatggaagtaatatcgttaggagaaaaaagatgatgggcacaagtcttttcctcctgattccatttcatcagtccacgttctactaatccaatccaaagattgccgtctttatcttcacctacagcattaacaggtgtaggagtatctgtttctgtgacagaagtgccgcatgtccataattctgtttgcaaacgcttcggggaaagcaggttaatgcctccggtttcagtacccagccagatggtctctccatcggtgaacaggcagttgatggcattacagttaatggttactccaccccggtcactggtctgacggatgaatgaaaaagtatccgtatctttgttatacacattcagtccattcagggtagatacgatcaagtgtccccgttccgtctgtttgatatccgttatataggcttggctcaacattccgggacgatgagtggaataacgatacctcttcagacttcgttcggcatgattatatctgaatagaccacggttagagccaatccacaaagcatccccatccgcctgcatacaggaaatccgccaatcttcactgaaagaaaccaaactatcggacaagatatctgcctttaagagatgatccggttgcttctcaacacgatatacctggttgtcaatacctgcacaaactgtccagcctatatcaagaatggcatgtacgggagattcgcattcgctcttcagacgataccaggtctttatatctccctgatcgtccaaatcaatacaccacagttctttattgccggaaatccataaatctccctgtctgtctttataaatggtactaacgttttcattcaataacttttgcagcggactatccggtggaacagggagttttaccaaagcataagtatccaggtcgaggatatctatcccaccttcggatgcaatccacaatcgccggaagttatcttcacaaatcttatggacaaagtcattctttaagcgtatcggttccgtttgtgtaccataattcaggaactgataaccatcatatctgcctataccataatgtgtggcaacccagacgtaccctccggaatctttaaagatatcacttacaaagctataaggcagccctgcattttcagtgataaacttaaagttgtactggctgaaaaagcgatccgcacttttcggaaaaagcgccaaaacatgtatcagacagatgagaaaaaggaaaatacgttgtttcatttcttttcgattcggatacgcgcgtctactgcaatcacatatttttccgttgccagtagtgggttgatatccatttccttgatctccgttgcaaaacgcaacaaagtagaaaggcgtacgataatctcggcgaatttatcttcattcacccccttttgtccgcgtgttcccttgataattttgtaagcacgaagggaatgaatcatggagtaagcctcttcatacgaaagcggtgccagaccggaagaaacgtccttaagcacttccacaaaaataccacccaaaccacacagcactacatgcccgaatttctcttcatacttggcgcctacgaaaagttccgtacccgtcagcatcggttgtatcaggatacctgtcacttcgggaatctgcatcatacgttcaaattcaaacgccagatgctcttctcccttaatgttaagcaccacaccgcctacgtcggatttatgaacaggtcccactacctttgccactacagggaaacccgtgcgacgaacaaaagccagcacctcgtctttattggccgacacaaattcctcaactatgggaatgccggcagcatgcagcaatgcctgtacataatggggctgaatatatccatcttcggggatagagtctataatacgacgaatacgcggcacatccacaccaaagagttcgatctcattggcggcaggtcgggaagcattcataatgcgagacaatgcggtacccaatgtcacttcgtcagcaaaattcacatggcctttagcaaggaaagcggcaacttccgctccggcagtattgatggagggaagaatgggaaagatcggtttactgcatgtctgcatcttctcatgcaacacgtcatacatctcgaacatggtaaccagtcccggtgtcccgaagatagccagaacagcatcaatattatcgaatttctcttcacaatattccaggcaaagacgcaaatggtcgggagttcccgtagccaggatatcaatcggatttcctacagctgcaccggggaagagtttacttttcaattcgtccacaaccgggccttccagcttgggcacattcagtccgcctttactcagcgcatcagtcagcataacgcccggacctccggcatgggtaatgatggcaaaattcttcccttttagttccggcagagtgaaaatacaacctaccgtcgtcagttcctcgcgcgaatagcaacgtacaatacctgccttacggaacaaagcttccactgccgagtccgaactggcaatggcacctgtatgtgaagatgccgcacgactaccactttcactgctacctgccttgatggcagcaatcttacagcctttctttatcagagaggatgcatggaacaacagacggtccgggtcaccgatactttcaatatagagcagttttattttagaatctttatctgcctggaaattctcgtccatatattgcagcacatcttccacacctatctgcttggcattccccacagaccagacagaattgaactgcaaaccttttgttacggcactttccaaaatgaaaacggcagtcgcaccggagctggatatcaaatcgactccttgaggatgcaattgcggaatgggttgactgaacacactatgatgccaggtattcatcagtccgatgcagttcggccctatcagggaagcaccgtacttatttaccgtttccaaaatacagtcttccagcagagcgccctcatgtgtctcttcaccgaatccggcggagagaatgataaacgcccgtacctgcttctcagctgcaagcacttccacggcatcaggacacatctgtgcgggaatagcgagtatcgcaagttccgtatcgggaatgtccttcacatcagcataagctgttacaccttgtacttctgtctctttcggattcacggcacgaagttcaccggtataaccaccattaataaggttacgcaggatagcgcctcccggcttgtgcacattattggatgctcccaccactacaatactggcaggacgaagcaattggtttgttatcatagtctgttcactttaagttcaggatacaatgtgacaaatatacgtcttttatgcaatcctgcaatcggaaaagaaaagaaaaatggaagtgtaatcgggaaaggggttttcaagtaagcagtctttttgaatggcagaacaagagatattgcaacaattcaaaataattgtcagtattccgtataaagatttcatatatttgaagcctcattctaaaaatggggacataacgaaacagaattatggacatcagaaacagaatacaacaactattaaccgccatcaaccaaggggtttatgagaaggatacggaattaggcttatcattattggctgcactggcaggcgaaagtgttcttttgctgggtcctccgggggttgccaaatccatggtggcacgccgactgaaggctgccttcaagggagcaaaggctttcgaatatctgatgtcacgtttttctactcccgacgagatattcggccctatcagtatcaaccggctcaaggaattcgataaatacgaacgtgccattgaaggatatctccctacggcaagtgtagtattcctggatgagatatggaaagcagggcctgccatacagaattcattactcaccgccatcaatgagaaaatttaccggaacggagacagagaaatcaaactaccgcttaaacttctgattgccgccagtaacgaattgcccgcgcacggcgaaggactcgaagcattgtgggaccgatttctgttacgcatcatctgcacctgtgtgaaagatgaagcgaccttctacaacatgctgctcgatgataatgataaggaaataagcatacccgcagatctgcaaatcagtgaagaagaatatgcagactggcgcaaaaagataaaccaagtttcactatccaccgaaatactacattatattacgaatatccgccatcaattgaaacgtcttccgctagatgatgaagacacaattcgaaacgtatacataagtgaccgacgctggaagaacatcgtgcaactattgaaagcctcagccttcatcaacggacgcacagccgtgaattcggcagatttgccgcctctataccattgcctatggaacgagatagacgagtgcgagcccattcatcaattagttctccgtgaactgttcacttcctgccttgaaaaaatggaagaaatcaccgaagcgattaagagtgatatacgaatcagccgggtgcgccaggcgctggaagattttaaaaacaattgctcgcccaagaatgaccttgaaattacggattacttctactatcatgtagcagaacatggcacaggtcatacctatatcttcgccgtagactatctggcactgaaagagcagaagagagagaatgctccgagacaagccgtcatctatcccgatccgttgaatccgggacgctcaattatccgttgttatccgggtggagcaccctcaggcgcagttcagcaacgggtgaacctgtacagagagggaacagaatacctgttaatagatggtgtgcgatatccgatgacgcaaaataataaaggagaaaaaatgactaaagcatctcaccagtccgaacaaacttcccaaaacctgttcgacaaactgccccagatcacctcccgcaattaccgggatgaactgaaccgactctttcagcatcttctcacccttaccaactccttatgcacggacaatctgttcgtcagccccgctgacaaagagttaatcacccgttactcgaacgaagtgctgaaaaaactgcggaacgtagaaatcgaagaggaaaagttacaattcaacttgcggcaatatggcagggctgagcaaaaggaagtatgatatccagttctatgtaaaggtagtcgagaagttcgtacaaacgggagaatgtgccaagacgctatacggtgaaacggaagatcccctgcttctctatctgctggccatcatgaacgatccgtccatcagggttctggtgctgggcgatgaggtccgtgcacgcatattctacgatatcaccacgcaatttgtctggcagtttctggaacaagagaaatttcagatgcaaagagcgcaatccgaacttggagaaatggaaagtgccctgaactggattaaagagaaacgggatggatggcaggccctactgaggaaaatcaaagatgactataaagagaatgccttcgatgaaccattctacgaacatatgttcggggacaaagacaagcaacatgattccaccgtttgggagaagatgctgaaagactgggaagattcttttcaacagaagctgcaggaacagaaagagaaaaatctggatgccaagaaagactttctggaaaagaaactgaaaaccagcctgaacaagataccggaatacctggaagagcaccaagtggacaaggaggaattctatcaggcatggagcatgatgaacggattgtggaataccatcgattttgagaatatccggaagattgtaaaactgcaaaaggaataccccgaactgctgaaggtagccaaccgcatgggaagaatagccgacgatgaaggcagcaaacaggtatatgtaacagaaggcagtgtctacaaactggctcattcccaaaagagcgatattctgggtgtcaccatcggtaacgacctgaacgccctgcttccttcggaattgctatattatgcagacagcgaactgcaagatgtcttcatgctgaaatacttcacgcagaagctacagaccttccgttataaatcggaaatcatgcagccttccagacgtctggaagcaaaaccggcagttctgaaagggcctatgatcgtatgcctcgacacttcgggcagcatgacggggaaaccggagcgaatggccaattccttgctgataaaactgattgaaatagctgaacttcaaaacagggaatgtttcctcatcacattctccgtatccaccaaaaccattgacatacgccgcgaccggctgaaactgatggaattcttcagccaccccttcaccggtgatacggatgccacccaaatgctgaaagacactttcagaatgctcgacgagaaccgctatatgaatgctgatgtcttacttatcagcgattaccgcatccccaaatgcaaacctgagctattaaaacaaatgagcgtacaccgggaaaagggtactctcttctatggtctacagattggcattgctccgaatgaatggacagagcatttcgatcacatctataggatagagtatcatgtagatcgcaaatattaaagccaatctatcagttccgcaatagccatattcccataaaacggtcataaaccatatatccaccggtcgatttatagacaagttctttctctaccaacgacttcaaagcggcattgacactgctcggagttttcagcccatgccccaaaatgaactctccactgttgggtgccgtcactttcccttcatgcgcaatggctttcatcagtgccaactgattgtccgtcaacataataatcaggttctgatagacaggtgtattctcttcaagaagccccatcagcacttgctctgcctgagtgatatctacaaccgactcatttcgctcatacaaccgattcaacattgcctgcatataccaggtatgtccctcaaaacgggtatatatccaatgaaatacagatttgtccaactcttgcccccgcaactcaaaaaagttccttgcaaaccgataataagattcttcatcaatctcacgcagcaccatcaattgcgtactctgatagaaaggacgcttggcggaaacaaacatttcctgcatcaaatgctgactgctacctgcaaagatgaaacggacattcgggataaactggatataagagcgaagcaaagcctctgtaccttcttcaggataagaagtgatctgctgaaactcatcaatagccagatagcaattcctgccagaagcagccatatagtcaaagatttccttcaatgtctgttcagacttgtcggcaacaaagtctaaggttactgtaggaactcccgtcaactcatctgcactaatcaccggtcggcaagagcgaaaaaaagaagtcagcttatgcaaagcactttcgctgagcgtatcaagctgccctagtacggtttttgccagcaggcgaacgaaagaagctaaatcgcgcgttgcaaaaatatccatatagaaactgacaacttccggtttctcctcttgcagggtatagaagacattttttatcaatcccgtcttacccatacgccgaggcgctatcaatgtcagattccgttcattctccaaagccgacaacatctgttgtgtttcagcttcacggtcacaaaaataacgagggttcgcataaccatacactaaaaaaggattccggggttgcatcttctgaggtttcataagcgacattacatattttacgttacactttttatgtaacacaaaatacggaataaatatcggataaagcaaatagatgcgaatatttaacctgcatcattaaagccagtccatcagttccaccagacttttcatctgtttcaatctgggatgagcgaatgtatccaccacctcatgctgccacatcacctcaaaaggaatgtgtaccccatatcctccaatagccagtaccggttgaatatcggatttcaaggaattaccaatcatcatgaattcttccggagcgacttgaaggatttgtagcagacgggtatattctttctccgtcttatcagacattatttcaatatgatcaaaataagaggtcagcccggagcggtgcaatttacgttcctgatccaacaagtcacctttcgtagccactaccagacgataacggccttgctccttcagagctttcaaagtctcttccacaccggacagcaactcaatcggcatctgaagtagagatttacctaaaagaataatctgttgtatcttatctgctggcaccttccgttcactcacccgcaaagcagtctcaaccattgaaatagtaaacgctttggcaccatagcccaaacattccagattttccatttctgttttaaacagttctaccgaaatctcctttgcgttaccatattcacttaatagctccgtatactttcgttccacctcctgaaaaaaaggttcattgctccaaagagtatcgtctgcatcgaaagcaatgactttaatagtatgtttcatttcctgagtctccatccggttcattacatattttacattacaccatttatgcaatgcaaagttccaaagaaattacagataaagcaaaggagtacggacttttaacgtctttatactctgaaataagaacagatcaaaagactatccagcataacctgagccgtacttgctccgtaccaactccgtagcttctccatatagaggtacctctgaccgaagaaggtacggagcaggtacggcccagatacggttcgggtacgattcggatatgactcacatcgagtttacacaagacttatatatattttaaaatatagttacattatcataaagaagttttattatcctgttttttataaaaagctacctatttttgtatgtattaaagcattaacaacaaaaacaaacgaatacatgaaactaatcaagcaatcacttatcattaccttttcactatcgcgactccactcatgtgagcgtatataaaactcaaactatggaacacagaattaaagaactggactatctgaaaagcatctttatcctcctaatgatcgttttccatctggtatacattggcgataagtatccttatataaagcaaatcgtatatacattccacatgtccgctttcttaatcatatccggttatctagataatgttcagaaagacatcagaagttttgtaaggaaactattctggatttttgttccatacatgtgcatggaggcaggctacgtaattatgtcacatatcttaccggtcagggaaagtataccagaagttactccaattatattattacacaagatatttataaaaccattaggtccctactggtatcttcacaccttgattatttgcagtctcctacattatctggccttccgttatactcacatgaaaacaatatcacagttgatattgcttggccttggtttatttgctaccgcatactggggtggactcatagtatttgccaatgccatttatttccttgcaggaatcattatcaaacaaagtaaattaccattcactcaaatctttcagccctcttttttagcccttattcctattatggtactatgctacttccctgacaatctggacagaggtacattagcaggcattgcaattacttatctggtcatcattatatcattatatgcgcacaactatctgcctaaagatatcaaagaatactcttattttataggcaggaacactcttgtcatattcctgttctcccccatttttacaattttatgcaagcttttcctacccttcctattctttgattccaccggaatgcttttcatggtgatatctgtcattattaccataaatggatgcatagcgatagcatggagcatggataaactgcacttttcccgtttcttttttggacaagacaacatattaaattaacagtcgcataaacccgatagaatctaaaaaacaaacttaatataaatatcatgcaagaacgacagaaaaacagaagattgtattttgaggaactttccataacaagcaggaaatattacatcccatatatatcaaaatacaaaaagattaaaaagggaatgaatattttagaaatagggtgcggagatggaggtaatttattacctttcaccgaactgggatgcaacacgacaggagtcgacttatcagcaggaagaataaaagatgccatcctgttttttgaagaaagacaaataaaagggaatttcattgcctcggatattttcaaattgaaaggacttgaacataaattcaacttaatcatttgtcacgatgttatagaacatataaaggacaaagcgacattcttatcaaatcttcccaaatacattaatcctaaagggattatctttatgtcgtttcccgcgtggcaaatgccttttggaggacatcagcagatatgcaaaagcaaaataatttcccacttccctttcattcatttactgccagcacctatatataaaggcattttgaagtttggcggtgagagcaccggttgtattgaagaacttctctctataaaggaaactaaaacctcaatagagttatttgaaaaattagtgcatgagaaacacattacaattatagataggcaactgttcttcataaatcctcattatgaaataaaattccgattaaaaccccggaaactgtatgccataattgccggcattccatatctgagaaacttctttactacctcatgcttctatactctaaaatgaaattctccgtattactcattcaaagtaaactgccaggcgcaacagcagctattatcggtaatatccggatagcagctaagacattcgcaagtaatgcgttcatctattgttttagcaaaaccgctatattcaattatacctaccgatttacaaggatgatactccatctgttttcgtttgcgggctgtttgcacatgacattcaagcgtgcgatacaccaaagttttattgtctttccccagaataatctcatcattatttatattcgcataaaaacgtagctgcaaggcttttgccaagccctccagtcctgcatgttccggcaatccgaggaattgttttattcttctcgcctctgttatcgtgaaagacttccatgcttccctatcgtgatacatggcttcatccattccaaatttccgttctattgattgaaaccacaccccatccatagccaaccaatttttggaataggcttcgatgagttttatcagttcttctttagtgagggaacttaaaaagttgttttgtttcattgcaaaaaagattcgtataaataactatgcaaaatggttgaataacaatactgaattatcagaccaagtatgcaaatgtatgaaattaatctaaaaattaaagagaaatgcagagcaaatacatgataaatttcgacaaatataattacaagaaaaatatacaaacttatattcaatcacccttcttagacaaactcagaattcaggaaaattttgagctcagaaataagccataaatctaggctttatacaaattaattttatacatttgcatgatactttattaattatgaagtaaacgtcaatctatacaaactttataaacaccctaattatgatgaaactatcgcatttctttttcctgatattaataccggttctgtattcttgctcatccgatgaacattatcttgatttcgccattgaaacacaagatataaaaatagcaaaagcattttggggaagaataaaaatattaagcggtaatatggattatagtataaataacttgaactctgatatagctgaagcatatatctatgaagacggggaatatggcaacatagtcataaaaccgattcagaaaggtaaagcaactattgaaataacagataacatttgccacaccagtattattataaaagcagaagttgtagacaatgaaatcggaaccatcatacgtgaaagcaatcaccctttattgaaagaaggcggctttttatggttcaaagaggatgaaaagcgctcatttcgcataaccgttcaagatgtggacattgcaaaagggctatattcaatatacaaatccgagaagaaatactacctctcactcgcctataagaaggatgatggcaatgaggctacggaggtttatgatataggagaaagcgactatgtagcgttgtatatgttggacgctgttttaaacttaggtttattcgaaacaacaagatcggctcctcctcctaaggctcactggctgagaatgaaagggattaacaacgaatataacatcaattgcatagcttctaacgatgaaggatatgacatagaaggggaaactcgatgaagcacccaatttatcgctttttatcactgtcaatataaaaattaaaatatgagactgaactacactttatttggggtactgttactgctttggagtggatgtgatttttcggaaccggaaccagaaatcgaaccgccgactgtagtagagaaagatcctgttgatataaaagtatttatagaaacagtaacgaacgataaaacctatgattacatagacttattgggcagaggatttgactgtaaaaagagtaccataaagggatatataaatgtaaaaggcaaagttattgatgtagaacgtctgttagcaggtgacggatatgattatgtaaagcaggaaccaattaaactatacccttattctacagtagaaatatttttgctttacaatgggggaggttgggttataagtgaaaatcgagacttgaataaatatatagataatatctatttaaatagccaagtggaaacaaagataggggatgatgttcttaggctatttaccgaagatataggaaatatagaggaaaacttgcaaggcaactattttcacaaagcggaatgttttcaccctaccagcagatatacccttccccatgtttggccacattatttgtgttttttcttgtctaaagagttcctgaatgatttagagaagagtaacggggatgagatagtgaaaaaatatggtacccatgttcttaccgatgtactcttggggggatatacctctctttcttatgttgctcaatatagctatatgctatctgatgtggattttaggaagcgggttcaagcttacaccaactattttaatgcatctcgttatcctctggatgtaaacccaatttttgaggaatgcagtaaagtaaatattcattttaaagcaaatggaggaaacccgtcacattttgttgccgaaggcgataaaatcatgggctttgacaagtggattaaagaaactaataatcaggtgggaattttaatcggaatcggacaatctaccactcatatatttttaataagtgattttgtgaaagatgaaaagaagaaaaccgaaatagaaaaagcgattctacggtattgcaatcaataaccgatacacaatttctgaatctttttgaatacatcattggacatttcattgtcttctctttttctttgagtggaaaaccgttatctttgcacaccaaaatgcgctcataacaaaagagatacatatatcacaatggaaaagaaattcaaacgcactaccgttacgtcggcattgccctacgctaacggcccggttcatatcggacatctggcaggagtttatgtacccgctgatatctacgtccgctatctgagactgaaaaaagaagatgtaatctttatcggaggttcggacgaacacggagtacccatcacaatacgcgccaagaaagaaggcgtaacaccgcaagatatagtagaccgttatcatacgcttatcaaagagtcttttaaagagttcggcatctcatttgatgtatacagccgcacaagttcaaaaactcatcacgacaccgcttcggaattcttccgtaagctgtacgataaaggcgattttatcgaaaaaacaagtatgcagtattacgacgaggaagccaagactttccttgccgaccgctatatcacaggcgaatgtccccactgccatgcagaaggtgcctacggtgaccaatgcgaaaagtgcggtacgagcctcagccccacagacctgattaatccgaaaagcgccatcagcggaagtaagcccgtaatgcgcgaaacgaagcattggtatctgccgcttgaccaacatgaaagctggttgcgccaatggattctggaagatcataaagaatggcgtcccaatgtatacggtcagtgcaaaagctggcttgacatgggcctgcaaccccgtgcggtaagccgtgaccttgattggggtattcctgtacccgtagaaggagcagaaggaaaggtgctgtatgtatggtttgatgcccctatcggctacatcagcaacacaaaagagttgctgcctgacacttgggaaacctggtggaaagatcccgaaacccgtctgattcacttcatcggtaaagataatatcgtattccactgcatcgtattccctgccatgctgaaagcagaaggaagctttattctacctgataacgtaccgagcaatgaattcctgaacctggaaggcgacaagatttcgacttcacgcaattgggccgtatggttgcacgaatacctggtagacttccccggcaagcaggatgtgcttcgctatgtgctgacagccaatgcgcctgaaactaaagacaatgatttcacctggaaagatttccaggcacgcaataacaatgaattggtagccgtttacggtaattttgtgaaccgtgccctgcaactcaccaagaagtatttcgatggtgtagtacccgctgccggtgaattgacagagtacgaccgcgaaacactgaaagaattctctgatgtaaaagcagaagtagaaaagttactggatgtattcaagttccgtgatgcacagaaggaagccatgaacctggcccgtatcggaaacaaatatctggcagataccgaaccctggaagattgccaaaacggatatggatcgtgtagccactatcctgaacatctccctgcaactggttgccaatcttgccattgcattcgaaccattcctaccgttcagcagcgaaaaactacgcaatatgctgaacatggacagcttcgactgggctactttgggcagcactaatttattgccggccggacaccagttggctactcctgaattgcttttcgaaaagatagaagacagcgttattgaagcacaggtacagaagttgctcgatacgaaaaaggctaatgaggaagccaactacaaatccaatcctatccgcccgaatatcgaattcgacgacttcatgaagctggatattcgcgtgggcaccgtattggaatgtcagaaagttcccaaagccgataaattactgcaattcaagattgccgacggactggaaaaccgtactatcgtcagtggtatcgcacaacactacaatccggaagaattggtaggcaaacaagtatgtttcattgccaatcttgctccgcgcaagctgaaaggcatcgtcagcgaaggtatgatcctctctgccgagaactttgacggttcactctccgtagttacaaccatgaaggaggtgaagccgggtagcgaagtgaagtaaaaataatcttaatgccgaatgacaactcaagaactcatatctgcacgtagcaacgaagccaatcttggccaagaagaatttgcgtggttgttattcggcattcatgataagactcacgctgttttaggcagctcatataaaccgacacgtccctcgcttgacgccctaaaaagagaaatagccgaagggaccaactgtggcattacttttacggaaatacatgaaatcatgtatcaagggaaaagagttatcatgtttcaaattccggcagcccctaaaggaatcccgacttcttataaaggacactattatgggcgcgatggcgaatcattatcaaaagcttattgaaggaagaaagccgaacctatttatagcaaaaccggttgctcagcaattagatcagaaaacagcctatttcaacaataaaggatttgaggacagttattattgtgatttaattttaaaagcactcactgaacacggtacgcttacaaaaaaggaaataacagaattactttggaataagttgccagatgtattgagcgaaagccaaaaacactcaaaagtcagaaacctacttaccaaactgaggaagcaggataagattagaaatgtatccaaaggcatacactcggattggtttcttaatgcggataatttaaacgcaattaaatgatatcttaatcataaatcgaacaaggaatgacagaagcatcactcaaagagaaaacagcaaaaggattattctggggcggaataggcaacggcgtcatgcaactgctaaacctcgtcttcggcatattccttgctcggttgttatccacaacagactatggcatggtggccgtattgaccatcttctccgccatggccggaattttctcggagagtggcttcatcctggcacttgtcaataagaaagaggtaaagcatgaggaatataattccgtattctggttcaacatcagtatcggcgcatcactttacctcatactttttctttgcgctcctttcatcgccgatttctaccatacacccgagcttacccggctggcccgtttccaatttctgagtttcttcatcggaagtttcggtactgcccctacggcctattttttccgtaatctcatggtgaaagagcgtagtcagatacagatagccgccatcctcatttcgggtattacaggtgtcagttgtgcctaccatggctggggatactggggaattgccgtacagaccgttgtgtatgtcagcaccaacactatcctgctttggatattctctccctggcggcctactttttcgttccgctttcacccattactggaattattacctttcagcagtaaattactctttacctcgctcttcactcatatcaataacaacatcttctccgcattgctgggacgtttctacaccatccagcaagccggttactactcacagggaagcaagtggacgacgatgggatattccaccattttcggaatgataaacagtgtagggcaacctgtgttcagggaagcctcggaggacaggcaacgattgcaaaacatattccgcaagctgatgcgcttcaccgcctttgtcagtttccccgctatgttggggctcgccattgtttctcaggaactgatcgtaataagcattacagagaaatggctaccctgtgtccccgtcatgcagatactgtgcgtatggggagccttcatgcctatttcaactctttactccaacctgatgaatagcatcggccggccgaacgtatatatgtggaacaccatcgcactgggcatcttccagctattatgcgtgtggggtagttacccgtacggtctgaatatcatgctgatagtctatacagtagccaatatattctggctactcatctggcattattttgctcataaacatatcggaatttccctgcttaatacactgaaggatatagctccctatctcattatatctgtggccgtaatgacttttacttactgggtggcaggttatgtgaagaacatctatctttccttactggtgaaaatcgctttagctgcctcactctacatattcctgatgtggagcctgaagtcgactgtattcagggaaagtcttcaatatctatttaaaaagaaaaccatacaataatgacactgcaaaatgtaactgtaatcatccctgcgcacaaccgtcccgagcgcttgcgcagattgctcgactactatagccgcacagatatcaagattcttgttcccgactcatccgaccatccgtttgccgatgcggagaagtacccggacatcacttatctgcaccgtcctaaactacatttcctgttgaagctgaaagaagtgcttccgatgattagtacaccctatgtgctttattgcgctgatgatgatttcgctgttccctccggcattgcgcagatgaccgcctttctagacgaacacccagattacagcactgcacagggacattacctgaccttcactccccataaagggaaaatatcattctaccctcgctatatccgctacttcgataaacaagtaacaggcgacactccccgggaaagacttttgcaagagaagaacatgtatgcctcattgctctactccgtcatccggacacaagcttttcagaggatgtatgcagcttgtttcaacccggatggaagcctgcgtttccgcaatcttttcctggctgaagagttctttaaccatgctgcgcttatcttcggcaaatatgctacactaccctatttctacagtgcccgcgagcgtatcagaggttccgccacggaaaccaccgtacctgtttcagttatcaaaacctctcataaatatcgggaggaatatcaaggtttccttctggcgttatcagaattactggcagcccgggaaggtgatacgcttgaagatgctttctcctttatttgcagcatcagcgatatgcctaaagacactgccgaaatctctggcaaaaggaagattatggaattcactcataagcatcccctgttacgttgggtaaacaggctggctgactggagatatactcagaaaggattgaaagcggtacaaggtatgcaaagctacccctgtacattctccacaccggaaaaagaagaaattatcaaagctattgaacaatcttaaagacacgcaaaaatgacaaataaaactgtttctattgtaacaggtacttatacgacacctacctctttccgggaaatcaaggtctacaaagtaagggaaaaacctcaggatagaaactgctgaagcactccttcaagcatcccattatcagaaagcagtttctccacaaactcacgaaaggcaccaaagcccccatgctgtgcggtgacgtaatcgacctcacgtttcacataatccggtgtattactgggggaagcgctgaatccaaccttacggagcagagccaagtcgttcacatcatcaccgatgaaggcaacatcctgcaacgtaatgcccaactcacgacataaatcttccgcctgtgccactttatctttcactcccaggtagcagtaatctatcttcagtttatcagcacgcttctgaacaatctgcgtattctcacccgtcataatggctacaggtatattcagcttgcgaaggaaaataactccccagccgtctttcacagagaagcgtttcatcacatcgccctgttcggtatagtacattccaccatcagtccacacaccatcaatatcggtaatcactaactttggtaacatagttttttctttttattcagatgatacaatcatttatttccacttcccgctctttcccctcagcccatcgcgatagccacacagcaatgcccacaacttactgaacttctgccgctcatacagtatgataaaaaccacacgcttataaaaatgatagcgcaaatgcgacttcaaattcaacgcctctggatacagacgatgcaggagaataccattgcgcacattatagtaggaacgggccggaccgtattcattaggaaatacttcttttcccagcaaacgccttttcttcttctgataacccaaatcgtgtgtcaacagaatattcttgaaacataaaacgggaacatctttccttttagccctccaacaaaactcacaatccactccccagacaaagagggattccataaagtcgcccaaagtatcgaacaggctaaccggatatatacttcccgaagtcattgccgaatacacttcatccacagagtccgttggcggatacatggtggtttgctgggatttaatgaaataattggtagagaaaatggcagccttgtcctcaccatagctacggattgcccgaaggtagctttcgaagttccgcccaccgaaacagctatcctgatccaaggtcagcagatgcgtaaatccatttgcacgggcatatgccaccgccttattcagcgcagaaccaatgcccagattttcaccgcaaccacccagaatgattttccctctcccgtctcccaaagaatccaaatccagatccctgcgatctgttgccggagtattatcccacaacatcaattcatccagttgagcaagataggtagcgatattctttactaccgcatcatccggataatataaaatgactatgcctaagagtttcataaattatcggatgacatccggatagataatctcattccggggaatttctttcagtactttatgccctaccactttcgcacgctccacccacttaaagccgtcaccgggactcaacagatggatatcctgttcggtaataatatctccgggatgcaacgtcttattcgttgcaatggaacgctccagtttcacctttgccgaggctacggaagagtcgatatacagttcttctttccccagccaacgttcggcaatacggatatcacgtatcatgcggttcacaccgtcggggccaagagaaccttgctgatcggttcccttcatacggcggtcgatggtgacatgcttctctatgatttccgcacccatacccacggcaacgataggagcggcaataccgatggtatggtcggagaagccgatgcaatactgcccgtagtgctgtttcagataggtgatagtcttcagattcagattatcaggctgggtaggatactgggatacacaatgcaagatagatatgttgttatgataacgggtaatcacctccaaagcatcatccagttcttttctgcctgccatgccggtagacagaataatgggtatcttggtttcagccatcacttccagcaacggcaggttggtaagatcgcggcttgccactttcagacggtcgggcgtgaagagtttcagcaaagagaggcagcctttggagcaaagtgtttccacgaaatcaagccctaaagacttggcgtgcctatacacttcgaagtgttcctcgtccgtcagctccagaaaagcacgatgttcgccgtaggtacgtccgaaagaatggggggaatcatacggacggttcatctgtgagtccgtcagttcttcattcaaatcccgtttagtcaatttcaccgcatccatcggacgaagttctatattgaacacttcttcacgaacagggcgggacaccaggtctacgatcagtttggctatatcgacggaaccgttatggttctgtccgatttctcctattatataagtactattcatttacgaattataaattacgaattacacttggctgcacggcggtagaaggtatacatgggctatttttcatttcttgcaatattctccaacattctggcacgatagtcgggatgcgattgcaccagttgcaacagggcatgcacactacggtcggtcttctcatggaaggtggcataaagttcctgtagcaaggtgaagtcttccatcgtatcgagagtgaaacgaagatcgaaacgcccttccaactcagccggcaacggaagcagacgcaccttgaatttttcgggatgcgtatagagatagatagtgacatgctcgatgtaaagtttctcttgcgtagaaacggcggcacgacgcagagcgtcaatcgttgtcaactcggaatataagcccaaatgggatttgatggtaggacgtccatcggcaaagccataggcgatataatctgccggacagaaattgtgttcggcaaagaaggtattgaaagtttcgggacgaaggaacggattatccgaacaaacacggataaagcggttgataccgaaaacttcggcagcacggataaagcggtcgagtacattgtcctcgtcgccacgaaaactgaggatacccgcctgacgggcggtttcggcaagcacgtcgtcctgcgggcgattggtggtggcaagtacaatacatttgtccggacaagcctgtttgatattggctatcagaatgtcgatgatgcgctgttcgccatagaaggggagcagaatcttgttgtgcagccgggtagaaccggtgcgtgcctgaatgattattccatctttcataatttcatccgtttaaaagcgtcgatataagagccgggagtgacattgacaatttccttacccagccggcgtgcgtaggcttcgagtataaaataggacttgaaggctacgtgcatgtgatagagaataatgtgaagccgggcactgttcaagttttcctgtttcacggtttcggcctgcgatttattctggtcgtagaagtgcttttggtgcatcagtactacgttgtcgtccgttacggtgatctccggcaaccaagagtggtcagcacctgccaaatagattttcttgaaaggcaggcgcaatcccatagcgatagaaggtatcagcacgttatgcggacggggaacgccccagcctttgcggaatatccagttgcagaaaccctggaagccttcgataggcgttgtattataaacatagagcttgatgtgggggttacccgccagtaagggttgccattctttattcttcagggcacgggcagggacaaagaagttcatatcccaggtagtcttctcggccattgtcttgaaaagctgtatacgcttctcgggaacgatccagaacagcgggtctgcaatcagataaagttcggggcggagacgctcgaacataggagaacttacacagaagttcactgccaacaaggtttttcccttgatgaaatccgtcgaatcttctaccgtgcggttcagcgaagggccgttagccaatatcagcaattcatccggattactgaaagaagacggcaagcgcgtgcgccacttggactgcaacaggattttcactatactgaggaagcactgccaaagctgttccaaccatttcaaacctttttctcccatattgttataaaagttacgagctatagttatgaagtacaaataccaagtactttcagactacctgcgaacaattattcgccctaccatgtggcatcatttaaacggcagattcacaacgcttattcggttcatttgcaacacttgcaatacatttacgtaacacctgcaatacatttccacaacacttgcacggtacaaatcaaacacttgtgtcccgtaatcatcctcttgaacacttataaacagaatctttcccctccaatcacaacgcagccactcgtagctcgtagcctgtaacttgtagctaatttattctcctgcaaagatagatactttagcggttactggctaaaaaaaccgcgaatttgtggatagaaagcggtaaaagctgtacttttgccaaaacattccgcaacatgagagtacttataatcaatacgtccgagaaaacaggcggagccgccattgccgccagacgcctgatggaatcgctccatacagcgggaacagacgtgaagatgctcgtcctgcacaaggaaagccaatcggaacaggtgatccctgtaggcaaagactggcaaaagaaatgcacttttctctgggaaagactggttatctggacgaataatctcttcagccggaagaatctctttaccgtctccatagccaatacaggcttcaacgtcaccaaactgcctgccttccgggaagccgacatcatacacctccactggataaaccagggaatgctttcactgaacaatatacaggaaatcttcgaatcgggcaagcccgttgtctggaccctgcacgatatgtgggaatgtaccgccatctgccaccatgcccatacctgcaccctcttcaaaaacgaatgcagaaactgccgcttcctgcgcttcccaagcaacaacgatctggcgcaccgggtattcaagaagaaacaaaaactattcagtcatgccagccccctgaatatcgtcgcagtcagcacatggctttcctcacaaatacagcaaagtaccctacttaaagagaaacctgtatctgtgatccctaatacactctcgcccaccgacttccgaatgatggacaaagaactgtcccgaaaggaactgtccctgcccgataaacatatcattctgttcggagccgcccgcatcgacgatccgatcaagggagtggaatatctgctccaggccatccggttattgattgaaaagaagcaattcccgcaggaaaaacttcacctggcactgttcggcaagatcaaatatccggagaaacttctcaactccatccccgtcagctacacctatctgggacgaataggcgatacaaacaaactctcgcaactatattccgccgcagacgtcaccgtatccgcctctttctatgagacattcggccagactctgatcgaggcccaagcctgtggttgcattccggtttctttcgccaacagcggacaggccgacattatccgccacaaagagaacggcttcctggccaactacctctctgccgacagcctggcagaaggtatccgatggggaatatccgaagcccggacagccatctccaaagaaaatatgcgaagcgaagtattcaggaaatactccggtgaagtcgttgcaaagcaatatctcaatctctaccaaaacttaatcagaagaaaggtaacacaatgagaatactacttatcaatacaacagaaaagataggcggccccgccgtagccgcaagccgcctcatggaagccctcaagaataacggcatcaaagccaagctattggtgcgcgacaaacagaccgaacagatcaccgtagtggagttgcctcacaacctgcgcatggtatggaagttcgtatgggagcgaatcgttatctggaaagccaaccatttcaacagaaaccacctcttcgccgtagacattgccaacgccggcacggacatcaccaacttgccggagtttcagcaagcggacatcatacatctccactggatcaaccaggggatgctctctttaaagaacatcgagaaaattctggcttcgggcaagcccgtagtctggaccatgcacgatatgtggccctgtaccggcatctgccactactccggcggatgtacgcattacgaagaggagtgccatcattgccccttcatccacaacggaagccggaagaaagacctctcccaccgcatcttcctcaaaaagcaaaagttatacgagggccgtcatatcaactttgtagcctgtagccactggctggaagaacgcgcccggaagagtgcccttttcagcggacatgccattaccagtattcccaaccctatcaacaccaatctcttcaagccgcacagcaaaaaagccgcacgggagaaatgcaggcttccgcaggacagcaaactggttctgttcggttcggtgaagataatggatacccggaagggagtggaatacatgattaaagcctgcaaactcttggcagagaagcatccggaactgaaagaccaactgggtgtagtggcctttggcaaccagtcgcaacagttacagaatatgttgccttttaaggtttatccgctcgacttcgtcagcaatgaacatcagttggtagatatctacaacgccgtcgacctcttcgtcacctcatcgctggaagagaacctgccaaacaccattatggaagccatgtcctgcggtatcccttgcgtaggattcaacgtaggcggcataccggagatgatagaccatctgcacaacggctacgtggcacaatacaaatcagccgaggattttgccaacggcatctactggatactgaccgagcccgaatataccaccctctccgagcaagcctgccggaaagccgtttccaattattcggaaagtgccattgccaagagatacatcgacgtttataacaaaataaccggaagacatgcataaccgtcccacacccaagttcagcatcatcaccgtgacctacaatgccgaggccgtattggaagacacgatacagagcgttatctcacaaacctaccaccacgtagagtacatcatcatagacggtgcatccaaagaccgcaccctcgccattgccgaaaggtatcgcgaccgtatcaccctgcttgtcagcgaaccggacaaaggactgtatgatgccatgaacaaaggcatccacctggcaacgggcgactacctctgtttcttgaatgccggagacagtttccatgaagacgacaccctgcaacaaatggtgcatactttaggaatcggcgaactgccggacgtactatatggcgaaaccgctttagtagataaagaaaggcatttcctacgtatgcgccgcctctccgcccccgaagtgctgacatggaagagtttcaggcaaggtatgctcgtttgccatcaggcattcttcgccaaacggagcctggcggcaccatacgatatgcaataccgcttctccgccgacttcgactggtgcatccgcatcatgaaaaaagcgcggacgctgcataacacgcatctcacgcttatcgattatctggaagaaggtatgacgacgcagaaccaaaaggcttccctgcgggaacgcttccgcatcatggcgaagcactatggactgataagtaccatggcgcaccatgcatggtttgtattccgtctgctgctgaagaaatagtacctggctttcaacaccttatggcaagtaatccgcaaccccgcattcaagtcttagtttcatgccgtgaaactcacagtttcaaggcatgaaactgttggtttcacctattgaaacaggaagtttcacggcatgaaactaacagttccaaatggagaaactgatagcatcaaacagacaatagtttcttcagctccttcactccttccgaagcacccttctgaatgatatgtatctgcctcattgagtgcgtatccaccggtttcggatcaatcagatatacttctgccgttcgaggcacatagttcagcagtcccgctgccggatatacattcatcgaagtacctataatcacaaagatatccgctttctctacatagtcgacagccgtttctatctccggcaccgcctcgccaaaccaaacaataaacggacgcaactgcgaaccgtcgcccgccttgtcacccatcttcacctcatattcttccggtttcaactcctttacgtagcgaggattgtaagggtcacgactggaacacaccttcgtcagttcaccatgcagatgaatgatgcgcgtgctcccggcacgctcgtgcagattatccacattctgcgtaaccaccgtcacgttgaagtccttctccagctcggcaagtccgatgtgccctgcattgggctccacatcaagcaactgcttacggcgctcgttataaaagtttatcaccagctccggatcgcgcacatatccttcggcactggctacctgcatcaccggatatttgtcccacaatccgcctgcgtcccgaaacgtactgataccactctcggcactcataccggcaccggataaaatcactaaattcttcttcataccaaaatctcctttctattatagcagtttcttttctacaaaaatacagaagattgccgaagttgccacagatataagaaaatttaaaacctaaaagcataaatcattcaaataaaacacttacttttgcgacttgtaattttgcaactgattgaaagagataatactttcagtctcaaccccaaagatatatggataaattcagttacgctatcggcctcggaataggtcaaaatttattaagtatgggtgcaaaaggcatcgaagtagatgactttgcacaagctatcaaagacatactggaaggaaacaaaaccgccatctcacacgcagaggcacgcgatatagtaaacaaatacttcgcagaactggaagagaaaatgaatgcagccagcatagagcaaggcgtacagttcctggaagaaaacaagaaacgcccgaatgtggttactttgccaagcggcctgcaatacgaagtcatcaacgaaggcaaggtaggcacttatgcaaaagccaccgaccaagtgaaatgccactacgaaggcacactgattgacggaaccctgttcgacagttctatcaaacgcggacaacccgccgtattcggtgtaaaccaggttatccccggctgggtggaagcgcttcagttaatgcccgaaggtgccaagtggaaactttatattccctccgatcttgcctatggcgcacaaggtgcgggcgaaatgataccgcctcacagcacattgatttttgaagtggaattactcgaaatattatcccaaaaataaaaataaacagtaaaagcaaaatgaaaaaagtaacatttatcatggctcttgcagtaggcgcaggtttagcttcctgtactgcacaaagcccgaaagcaaatctgaaaacagatgttgactcattgtcttatgccatcggtatggctcgtacagaaggtctgactcagtacctgatgcaacaaggcgttgacactactcagatggctgaattcatcaaaggtttcaacgaaggcgctgctaaaaccagcaagaaagacgttgcttacatgaccggtatgcaaattggtcagatggtaggcaaacaatgggtagaaggcttcaaccaacaaatcttcggtggcgactctactcagactatcagccgtgaaaacctgttggcaggtttcatcgcaggtatcacagacaagagcaacgttatgactaaagaagctgctacagcttacatgcgcgacggtatggaagccatcaaggaaaaagctttagctgtcaaatacgctgacaacaaagctgccggtgaaaaatacctcgctgaaaacaaaggtaaagaaggtgttgtaactactccgagcggtctgcaatacaaaatcatcaccaagggtacaggcgcaatccctgctgacaccagcaaagtgaaagtaaactacaagggtactttgattgacggtactgaattcgacagttcttacaagcgcaacgaacctgctactttccgtgccaaccaagttatcaaaggctggacagaagccctcacaatgatgcctgtaggttctaagtgggaactttatattccgcaggaactgggttacggtggtagagaaaccggcggtcagatcaaaccgttctctaccttgatctttgaagtagagctcgtcggcatcgaaaaataagtatcagccgaagattttttcttcaacggtacagacttagcgggcgaaacggatgtaaacaaaaacatctgcttcgcccgcttcttttttactctttccctattttttcctccttttatatagagaaattaaaataaagtcctatatttgcttactatttgataaaaacaagaacttacacaaattgatattatggaaaaaatagacaatcttgaccggcagattctggaaatcatctctcagaatgcccgcattcctttcaaagatgtagctgctgagtgtggcgtatcacgtgctgccattcatcaacgtgtgcaacgtttgatagatttaggcgtcattgtcggctccggttatcatgtgaaccccaaatctctgggctacagaacctgcacgtatgtaggtatcaagttagagaagggttccatgtacaaatcagtggttgccgaaatggagaaaataccggaaatcgtggaatgccacttcactacgggtccttacacgatgctgacgaaagtatatgcacgcgataacgagcatctgatggacttgctgaataacaaaatgcaagaaattccgggtgtaaccgctaccgaaacgttgatttcactggagcaaagtatcaagaaggaaattcctatttgcccggagaaataacagataatttatggaattcttaaacgaatatcatctttcgggactgttcatcggcatttgtacatttcttatcatcggattgtttcatcctgtggtagtgaaagccgagtattattggggtaccaagtgctggtggatttttcttgtattgggcatcgggggcgttgtggcctcactttgcgtagagaatatcttgattgcgtccctcttgggcgtatttgctttctcttcgttctggaccatcaaggaggtctttgaacaagaagaccgcgtaaagaaaggttggttccccaagaaccccaaacgtacgtataagttctaaaaacaaagcaacaaacagtatattttgcccgaaaggtttgcatatttcaactgaatatactatttttgtgcccgctatccgatgaggataacaccggacttgtagctcagttggttagagcaacagactcataatctggaggtccctggttcaagcccaggctggtccac

SEQ ID NO: 6293 - DNA, 732 bp, Unknown
  gut microbiota DNA sequence
aaggaagatcaagcaaaacctttccggaaacgcccgccggccattcaccctgtttattgggtaataatgccgtcatcaggaaagacaggttattccgggtagtacttttggaaatttctaccactttcgccggatatacaacatcagaacctatatcaaagcgcacacttacttctttgatttctccggcctgaagtgcaatatcctgtgtgacataagcttctatctttaattgagtaatatcaataaaggagatgacaggttgagtcgctttcacatcctgatatttctcgatatacacttccccgacatatccgtcaaaaggtgcaatcaactgcgtatcatgtaactcatttgtcgctgtctcaaaagcagtcttagcagaagtataatccgcacgtgctttttcataagcgctggcagataaattatttttctcatacaacactcttatccgttcaaattccgcttttgcctgattatagatagcctctgcacgttctttacggatacggaaatcacgagagtctatttcagcaatgatatccccacgctgataatagttaccggcatatacctcaaaacggtcaataggaccgcctacccgaaaagatagttccgtctccttgaatggtttcgaaataaacgaaaactcacgttccgaggaaggaaccgacatttctacttctgccacttttatccgtattgattcatcagtcctcttttctcctg

SEQ ID NO: 6294 - DNA, 81505 bp, Unknown
  gut microbiota DNA sequence
ttacataatatcaatacatcatttttaaagttatacattgttgttttccatatcgcaaacaaacaacaattttcccaaatgagatttaaagattgtatcaaatactatcaattatatctcaaagtgttatagactgtaaacggtaaaattggataatatcctattatacaatgcattaccaatacactacgattttacaacaccaaattacaagctaattctgacttatttagtcagtattcgcaagtccatatttttatgacgagccatcagttgtgctatataaagtgaacgggggaaaacattcttctcattctgtccttcccaaacaccatccggacgatcgataaaaactcccggatatttttcacccttcataccaaagttataattatatcctgatgtccaaggactctgtacagcagcacgtttcacacgacagttccaaagcacctgagttactccggcccagccatgtccacttcccattttaccacgatcctgcacattgatttctccatcagtaatcacattatcataaagggttccaactgcccagcgatggtgaggacctatatctgcataagtttgcgaagccgtacaattataaaatacattgggaccacatacacgtgcacccgtcacatagtcatgacgcccctctgtactctgacagttcataaacaaattttgctgtccccaattgttaaaagaatatcgcagtccaccggttatcagagattttgtttccaggcaacggcaatccgtcacagttacattcttcgcattgcgttcacaacttaccgctgaatacccgaaatagcgacaagtcagattacgcgcccaacagttttccactttatcgaactgaacgccaatccaaccatgctcgttatcctcataatgttcaaattctgattccaaacacatattagtcaccccgacttcactgatacgaccgtcaaatgtatacttaaatacttcaccaccaccatatttctcttccatttgcattactaccggattatcaatataaatacggttaccttctacttttacaatttcacgttcgaaagaaaggttatattcccgtgcagtccattggcgggttccctggcgttcaacgatttgatccattttaatatcatgtatccagttctccgttcccgggcgataaacaatgatacgatcacccactttaaaatttgcagcagaagaaacctgaaaagagtgtgttcccaccggtacaaaagcatccgtaatcttcacccttgttccggatacctcctccattctaccattaccagatacttctatcaatgaaaaacgctgcctaccgatagccaataaacgggtttcattcacattatctccttctccggtcaaaataactccacttgcatttatatgaatcgttccatgaacatgatatactccccgttttagcagaaccgttccacggtgtccgtctttatccggttgcatacgagatacttcatctattgcatcctgaattctctgacgactatcccctttttccacaggatatacagtttttgttaccggataatcaggaattgatttatcaccatgatgataaccaacccggctaaaatccggtattatatttccctgtttatcagaataataagctaactcccctttcggagtaattttcacatagctggattgccagcccggaggtaatttggtctgggcagatacactcacacaaagtgttatcgccaatatacctcccacaagtttctttacacgattcattctattctcaattattagtttgtatataaattcagttcaaccttctcacccgccacagtcggtatctgcagatattctccataaagtatgtccgattttccatttttccggataacttgcacaggatgtcctttccatgggttctctattttacagacacgtcctttctcactaaccagagttactccctgaattagtccttctttcaaagtagaagtaaccaaaaacgcaccataagctctcagattttcaaaagatgcatccttcttatgattccaattggggaaaacacgaataacgccttcataactttgtagcagcatctcattaatagtaagaggaacagcagctaaagtttcgatacctcccccaccttgcacaatccaggaattgggatatacatccatctcaatccgtttcttcaaataagatagaatcttatccgagggataccccacacgtacagctccgggataacaggtttcaattccattattagatgtatttccccaatcattcgggtcacgttgcttttccgaccaatgtgccacatcttccagcaagatagtattgaaagccgcatctgtcatgggccccacaacaccagcagggagaatcaaaccatgaatagagaccctgttcagccccgatggacgtacttctttatcctgaggtcccttctccatattcttcaaactttgacgtccgtcttctgcaattcccaatgggtattcactcagtttctccaaaatatcctgccaacgggattgccgtatcttatcaatggaaaggaaatcactcatatccatcacaccctgaaacagcatacgaaccaaacccaacgaaagagttgaattaaaatcacctaaccgattacgccagacacctccattacgtttattgggcatcacctcgttgaaatgatccatacgaatgacataacgtccattctctaaagagagataatcttcccaaaaatccgcacaggccagaagatacggatatactttacgggcatacgcctcatcatacgtactgtaatatcgcatcaacatatttccaacactaaacaccgcattgattttctgtcccagaaacttataaccaccatcaattgtattttcacgggtcgaatacttttcctgcatttcttcaggagttaacggccacatagctgtacataaacctttaggaccgatgcccaccggataatagatacctttgcaattcagcaattcctgcgcatgcttccgtccagcctccatataatctaataaaggctgatcaaaattatccgtcagactaatatgattggaagaaaatgacgcccagtaaggtgcctgataattataattcagatgataatcacctccccatgccgcttcgtcacgcgtaacaaatggtccccagatacctggcgcaaacttgccctcacgggaagaacaagcaaacaaatattgcgactgatagtaatacttttcaaaataactatcacctatattaatatgagactgtttccaaaaatgattccaccaggaatgatgttctttccgtaattgctcaacacccgcttccgttactttctctgcttctgttattgctttgtttttccaatccggtgtatcatgattcgtataaacagatataaccaattgtactttctttccgggaatcaaggagaattcatcagaatttgagtttaaagccaatgccacatgagtaggccaacgcagcaattccgtattttcaaatgaacgacttacccacattactttatctttgcctcccgcagtagtcgaagtattaccttccgcagcccataaacgcaaatgggcagtaacggctttgtccgattgcaattctatgataatcttattatccgttgcagcaacccatgcagacaaattcaactgacaatgaggagttgtgaatttagttctgatttcagcagttccgggcaattgttccgcatagtaagtagctccttgcagttcttttatctcaatatccagtccgcccggaagcgcaattcctcccggataaacaggataagccctccaaaaatcatttttaccaatataaaaacagagtttatcaggagtgcctcccattgtgataccgatatctccattaccggctaaaggagcatccggagttttggtagtgggaacatgctgtggggatgaggtaaagacagctttatagtcatcaatggcaaactgagctttcaccccaatagtgctcagcaatgctacgcccaaaataaaagccttgtgtgtattcatagtctataatcatttatctaaaaacaaaaatagacgtatcttaccaacaaggcttgcaatattatttcaatcgtttggagaaatggttcaaaatgcgttttttaacgaattaacccactatagaagttgttttccctttctcttttcctgcgggaagagaaagacgcacctttttatgattcaactcaagttctgcaacatttctctgttgagtcggatcggcatagtttattatgtaccgaccggattcactcttccgtatcatatagattccgggagtttgaatattcaatatcaaatccgtacttacagttaattgtaccggctgataagcggccacccaacaagtagtatttccttcactatagacagcctgaacagtagcatcattacggagtatttgtatatccgataaattaaaagcagccacattttccttgtccattccgggtagtatcaaatattgatatatgccttgtttaggtgcaacaccatgcgtcaaatagatggcagtcacctctccatgtgtttcttccgggtgatacatttgcatcacatcataccatgatcccgtacgttctgctgtttcagctacaacttcatgagtattgccccatacaatatatcccgtattattatgaaaatagcgttgttcctttcccttagcagattgctttgtattcacaacattccatcgtgcattttcccaggaaagcagttccccatttttatggcattgctctatagaagtggtaacaacaagattactatctgcttgtataccagctcccaaacaaagaataaagtcatccgtacaaacccatgccttatgagccttcactccggcacgatccaactccataacagtcataccttgtttttcatccgaaacagctcctacaaaagttcctttattacgaggctgataacttttaatcaagggcataggtgcattatcttcaaaagctgttactcccggtaacttccgccagtcccaaagaggaaaaatatccagatactccttaccatctttataaatataagtagctccatctgccatataataccctttcatattatcgccattcatcatttcagtaccgataatacggtcagaagccatttttatagacgccatccaggaaggacggcgatgaattgtataatccgactgccagaaatgcttatgtcctgtaagcacattcaccgcaggtgcagggtaattatcacgaaacagagctgttgccacagccatgcactcatctgattcacctccacctaactccgaggctgcaaatgcaagactcagtgctttatgtacgggagcatgatgaaacagttgacgtcccaaagcattcacatccatcattcctttccagattacccaacgatatcccttatcaatcagtgtactcagaatactcaactgtttatcatcaaatgctaacgacgtccctgaaaataacccagagaagaaactcattccggatacgaacgaaagcccataattaccaaactgctgctgagcaccatgctggtgaaagcaccaatcgtcttttataccttctgctccacccgtgactatttcagatgcaatggtatcacgcgccatctttaccaactcataatcattctgcaataatgcacgcatcatcacatttccggcaagccataccttattctgtccggtcatcccaaacttagcattctccattacagttatagcgttctgtttctccacaggggtcaattgcttctcaaacaagataaaaaccgtacccaatgttttaggaatacctatttgattataccaccagttcaaacataccggtttagcagtaaaccaataattcaaagctttatgaataaccgcttccacctccgaagaacgatagtaggaagtctgatcggagttatagagctttaccagctccagaatacgttccgcatgaattttaggctcccagccggaacgctttttgtcatcgtaattaatatccggccatgttccggcttccgtgaaagaagacagataagtttctactttctttaaatcaaaaggatatcgctgatgcaactctaccacaacctgatccgaaatctctgtttccggttgaatagacgaaaggatggacaataaaccaaacggatctttaccggaaggaaccaacattcgggcataattttgcttgacacgcaccaactcatccacaccacttgcctgtacagtaacagatacaagtaatacactaattataatcagattacgcaaaattctcattcctgtttattttttcagttgttctgtttccattataacagccgcccacaatatgccggcaacagcctctttggcattcaatattttgggaacaataacatattctacaaaattctttttaatcacaactccatcacatgctcctatcacatccagtaagcctctgtcattcacctgtataaaaggaaagagactttgatatcccctatatgcaaccggagtatattcctttgcttttaagagccctaactctacaccacgctgaatagagtatacaaacatagcagttccggatggatctacaaaatttaaaggattatctcctttatccacaaccataaaccaaccgccggtcttcttatcctgcacttctttcagccctttacacattttcagataaatatcaaggacctgctgataattcggatgtgttttgggtagtaaagccagtagttcaggtaccaccaaagtgtaccaccccatgccttcactccatacctccggtgacagtccggtagttttatccgcccacacagccttttcaggttctgtagtccatgcatgaaggataagtccatccgggcgttgcaaatgacgggcagcagtaataatattcctacatgccacatcatagcaataatcagcttcccccacatattgtgcacaacgtataaggaacatctgcatcataaaaacaccatctacccacatattaggactccggtttccgtgccagaactgtccatcggaactgggatagtgatccacagctttcaatatttgcaaggcagctttcttgtatttctcatcccccgtacgtccgtataatgtacaaaaggccgaacctgtcataaaattatcgagattcgttaatccgcctcctttgtaattacccgcttcatcaacgaaatgatccatatatttctttatatattccagatacctgctatcacctgttaattgtcccaaacggtccatagcctcaaacatgtatccctgcacatatgtataatctttccagtaagccatccgataatccggatatctcgtcatcactgtttccgacaaaggtatagctaaatattccggagttactccgggtgtatatcccagtttagcttccggcactccctgagaagtagttcgccgatagcgggtagtagtttcttgagtaaccagcatagtaacctctccttccactaccgtaccggctgtatgttgagttactacccgattttgagccatagaagaatgacttgtaccgactgcacatacaatacaaactcctactattattttccgtgttattatcatagtcattattgattaaatccaaatcaacgggttacgtacaggcagattacgcaccacttcgtcggttacagggaaatgttctaacttctcccacgttgactgccaatttttattatgagtctgtagcgcaccgaatatcaggaaaggatgtgctaccggccattcatcccaatacattacatctttcgtataaatccagctttctttatcaacgacataagggtagataaaattaatacccttctccatattcttacctccctctgccgtataagtccataaattatcattcttatccgaaagcgtctggcatattgttgccatggcatccagattaaataaagaataaccataaggtttcgtacgtgctgtctccaacggaaaactaccgtcttctgccatctgcttaggtaaaagtacttctttataacgccgcttacaaaaatccatcatatccttatcaccggcataacgggcaaatacagcagcctgcatcacccagcaagttccatgattattcttagcattcatctcgtctatgccatactgatgtgtgaacatccatttcaaataatcagcaaaccactgtttagtagactttatatcatccttagacaatactccaagcttttctaactgccataacgattgggctacttccataagatgtaccgtatcaatgatgccaataccacgtcctgtagtaattcccttaatagcttgcgcatactgtaagttaggattcattttcgtagactcattcacaaaccaggcacgcacatgcgccagtatcgcatctacatattctttatcctgagtcaataaataagcagaggtcagattacctacgattgaactaaaacgtatcatagcatgacgatgagctacaaaattatccggattggtctcaccatcccaacgcacataaggtccgtcagggttcaaagtatccggccaccaataatcaccctccgaataaaaatcatgtatatcccctgcactgcgttccgctataaaggcggtaaccgttaccggttcctcctttatattcatagcggcacgttccagtataccctgctttaaaacacacttcacaaaatctttaccgtctttatccgatgtacacgaaatagccagaaaagaacagatccctaaaaataacatacctacctttttcataatcttactgcaccgttataaatgatgtttggactttatctgcttttacagctacacaggaagtaccgccttgcgtacgaacccgcatttgtgcccgcccgttacgtgcctgtactttgcgggaaccggttgccgtgccctgattctgtatcagttctccgtcaccggcaatatcgaaagaaacaaaaactctggaatcaagacacctgataccattactatctaccaactgggcttcaacttcaacaattccatcttctttaggagtagaagttacccggaatgcatgttccttcccccacttcgcggtctgatattcaaagctcaattcatcaacaagagcttcttttccagcagccacagcacgcaatgtattctgccccttagcaagcttcacattccaacgcaaacccgctgcgggaaaatcctgactattacgcttgcgtatcccctggctttgtccgttcacaaacagttccaccgatggacagttagagtaaaccaagacctctttttcttcatcggcatctccccatctcacaggccaaccatgtccatagatatgaaccataggcttttctgtccaataagattggaatacgtaataactttcctttttcgtaaagtcacgttccaccactcctttctgattcatatatggcaccggattatccggacgcaccggtgtggaaaagtccttaaacggccaataagcagcaccggtcagccaaggcatattctcctgttccttcaaatgccaatctatcagcttaacgatataactttccgaccagtctcctttcttcaacaccagagccgaaccgttcagagctgcatcgccatcactttcaccttcttttcgtataggagcagtagcctccgcatgacgtccggcatggctatcaccaccccactctacatgcagaaaatgtttcaccttctccatttcttctttggacatttgctgataatctgtataaaccccacgataccaaccggcccagatagaaggagaatatacatctacaatatcgctacagaatgcacaacggcgaattgctgtcttgcgttcggcatcaagatgatgtgccagtgtattcaactcactcatcagactccgtatctcgcgttgttcaaattcaggaaagtcattcggccagtcattctcattacccaatccccagattatcactgaagggtggttatagtgctgggttatcatattcgtcaacatacgtttcgcttgtccgcgataagtttcattccccacaccgccacggcaccagggaatttcttcccaaaccagaatacccagttcatcacaaagattcaaaataatctcagattgctgataatgtcccagacggatgaaattcacccccatctctttcatcattttcatttcctgtatcatctgctcctcggtcatggcagcagctactcctgcatgatcctcgtgccgatgtgttccacgcaacaagagacgctttccattcagcataaaaggccccttatctataaattcaaaagaacggaaaccgaaacgttcactcgctgtcattttctgtccattggcagttacagtaacctcgcaagtatataataccggatgatctacatcccaaagttgtggtttatcaatctgaatatccagcatatccaaatctcccaacggagttattttatccagtgtacgggtagataccacttcacctttagcattcttcacagtaacttccaccagtgcttcacgcacatctgcaggattatagaatgtaccggatacctttaacttgccttttttcaatttagcgtccaatgccggttctatccggagagaagccacggagacttccggaagatacaccagattcagataacggtaaatgccgccatacaaattgaagtccgataaatccgaaggtatcatttcagcatcccgggtattatcacaacgaatactcaatgggatttcacctccaaaacgttcagcatctttgcttgccagaaaagctcgcacggcatctgttatatctacattccaactatcatatccaccgacatgactacccactttggtcatataaacatatacatccgtcttctgtcccgctccttcgaattccaataccatccgtccgtcaggatacggattatccagcttcaggcgtgttttataccaccccggcccctgatagtaattcaaatccggatcgacagcatcctccgcattaaagcagtggggcaacgtaacttttgtccatataggttgttcttccggctggcctttctttatagggcgtaccagttcccagatattgcccacatcctgacggagaaactcccagttatccgttaaccggatcttattgcccatcacaggtaccttcgcaaaggtacctgcaacaaagcaactcatcactaacaatgcaattatacgtctcatacctattgattctccacgtttacagaatagccgtaccttctttctctaattttgcttttttaagcaaagcttccaggaagtaatagtctgcataaaccaaaggcacgtctctctcaaagttgtgcgcacctgtactgtgcagcagtaagaatccacggtcaccatctaattgtgcacgatagttcttgcttaaactctcaacaatcgtatccgcccatttcttgtataatgctgctttctccggattgtacatggacagttcgtacatggcacaagccatcactgcagcagcagaagcatctctcggttcgttcggaatacccggagcatcaaagtcccaatatgcaaccatatcttccggcatggtaggattggtaaagatgtaattggctatgttctcagcctgcgacaagaattccggaagtttcgtttcacgataacacatggtataaccatacaagccccatgcctgacctcttgaccaggcagattcgtgattgtatccctgatgcgtatgcttatgaagcacgtctccggtgattgtatcataatctattacatgataagagctataattatcgcggaaatgatttttcattgtagtgcgtgcatgtgtatttgcaatgttataatacacagagtcacccgtttccttaaatgcccagtacagcaattcaaggttcatcatattatcgataataaccggacattgccacttgtcacgactgtgatcccaggaacggatacaaccaattgttggcttatagcgggtaatcaatgtggctgcagattccaacaggatatttttgtagtttgcatcattggtcaggcgataaccgttaccaaagctacagtacattttgaatcccatgtcatgcgttccgccattcgttttctggtcttctatgttagcggtaaatgcctgcgcctgcttcttccagaaatcatcttgtgtatactcatacatataccacaattcaccgggaaagaaaccactggtccagtctcttgatgctaccaggcgcaaggcaccgttatcttctatcgtgcggggagaaaccggtttccttttcagttgttcctccggcatgcttgctttagcagaatctatttgcgtaaatgcatacttcaactgctgtccggcaaaatcaaaactgtcttttacgacatccgcttcttttgtcgcttggctgcatgctccacatacgaccaataatgatactaatcctgttttaaatttcataatagttattcttactaatgttgatattgatttaaagattaaattctccataaaaagattgcgctaagataggcgatttatcttagcgcaactttcaatattgtcttattcatttgagattctattccaaacgatatgtaaaacaggagctatttgggagtttctcccttatcattatgcctttgtacccactctgaaggtgaatagccataaaatgacttaaagcagttggtgaaataagcatgactattgaagcctgtgtagaccgatatttcagaaaccgtataactggattccaacaagagtttggcagctatctccaaacgtttattacgtatcaactctgttggagaaagctccgttaccgctttcagttttcggtacaggttggcacggctcagccctaactcctggctcaacaagtctaccccaagctccggattagaaatattcttttctataatctcaaagaaactctgcgtgaaccgatcatcccccgaaacaatctcgatacccatcgcttccggagagaacttctttccatatagtttcttcagtttctcacgggattccaacaaactgttgatacggcaaatcagtacatccatgctgaaaggtttcacgatatagtcatcagcgcccaccgaaaagccttccttgatatgaaccaccatggacttggccgtcatcagtacaaccggaatatgcccaagctgtaaatcctgcttcacacgtgagcacagttccaatccgtccatctgcggcatcataatatcactcagtatcaaatccggatatttctccagactcagttccagtgcatccttaccattgtttacatccagcacatagaaataaggatccagacattctttgacgtaagctcttacttcatcattatcttccgccagaagtacagtccacttcttctctatctcaaagtgcatttccttggctgacgggataacgtcctccaccacctgctcttcatcatcctccaccaattgctccttgccgtagacagaattgctgatcggaatataaaccttgaagatcgtacccgtaggctgattatgggatacggaaatagtgcctttatgcagaagcacgattgagcgtgtcagactcagaccgatacccgtacccacattctctttattatcatcttcaccctgataaaaaggtgcaaatatattcttcatatcttcctccgtaatacccttcccggaatcggtaaccgagagacaggcaaacctggtatcagcaggcatcttattcaattccgcctgctgttccgacggaagttcggcaaaggtacaccgggacaatgaaaacacaactttaccattattcggagtaaacttcatcgcattggacaagagattaaagaccaccttttccacgatagacttatcaaaccatgccgacattctctcttcactcttctcaaaagtaaattctatggatttctttgctgcaagatggttaaaggcatagtaaatctcttgcaggaacagattcatatccgttttggcaatatgcaatttcaatttaccctcctggttcttgcgcagatccatcaactgattcacgagcagcaataggcgttgagcattactgaatatcaggctcagcttattcttcacactggaagagaattccggcatagacaccagatcctgtaaaggtgcaataatcaatgtaagcggagtgcggagttcatgggagaaattggtaaacatacgtatcttcgcctgatggaactcttccagttgcagtttctccttctgtttgaattgcaattcacgctccagcttttgcttcttcgatatataatacatgatgagtgtcattataaagacaaaagcaatggcataaaacaagtaagcataccaggttttccacaagggtggatgcacaatgatgcgtatcttacgtgtctgttgactccagactccatcattattagaagccttcacttcaaatacataggttcccggacttaagttcgtatagtaggcttcccgacgattgccaatataattccaatctttatcgtagcctttcaggaaagtggcatactgattctgccgggcaaaaacaaagttcagtgcacagtaaccgatagagatattattctgattataactcagctctatttcttccataccgtccagcacggtgtccaatattccggtttcatcttccggttcaatcacctggttattcactaccaacttcgtgaataccaatggcggtacaaaagaatttaattgcaactcctgcggactaaaggtcacaaagccgttgttaccgctaaagcagatttctccattgggcagtaataaaccactatggggagtaaactcatagactccgattccattcagagaattgtaattggtaaactcctctgtcttcagattgtatttcgaaatgccattgctcgcactgatccataggttattgtcgctatcttccacaatggagcaaatatcattctctatcaatccctgttccttcgttacggtctttactattcctttttcttcctcgtacaaagcaataccgccgccgaacgtaccaatccagatacgaccagaactatcacgcacaatacccgtcacataattactaagcaaccgatgaggctctttctcatccgtatcataataaaccacctcttccctatttacatcgtaccttatcagaccatcattacggctaccaatcaacattaccccatcacgcaacttcagtatgcagcgcgaactggcaaacagacaactgtcctttccgccattaataggaaagtgtttctgaagttcctttttatccgacaagcgcatcactcccatacgcgaatcggaagttataatccacagactatcatccttatcacgaagcatggagtaaatggacatttcccccggcagctgataatagaacgtatatttcttagtacgggtattgaattgatagatagatcccttattcgttccgcaccaaagtatatcatcttccaacagaagcccttttataatattctgactgtactgcaactttgaagctttatctatcggataatatgcatattgcctgttttccagattataatcgagcagccccctgccctccgttgccatatataaagaaccgccgggagtggaaaccatacaaccgtatatcccaaacaatgcatcaaacaccgtagcaggatcatggaaatcaaagcggttgttaaagcggctggagaaactcactccgccggcatacgtccccacccataccgtctgactcctgtctacaaacaatgaataaatggaaaagtggctcagattccccttttcaagggaagcatccgtatgtttccagaaagaattagtagaaagatcgatggtatatagcccgtcgaatgtaccgataagcaacattccgcgcaactctgatatggctctgacgctattgctcgtcagaatactgttgcccttatgataggtcaccatttcttctttctcaaagtttatgcgatacaatccgctcagtccgcttcccacccataacgttccgtttgaatcttcatagatagtagagatactattgccaagcagatgaagtcccggcgtccgggtggtcagctgccgttgcactttcatgttcatatcgcagacaaacaggcctttcgtagaagtacctatcagaatctgatgctgcttcgtttcgtaaactacagagatgaattcatctttgatcttcccgttcaggtctatacgctgaaatacatccatggcaggcacatacaggtacagccccttggtagtccctatccaaaggcgattacgggagtctaccgtcaggcagcgtacttcacttttggcaaaagcgccgtatcgttcgtcaacaaacggcttgatacggttggttttcaggtcgagtttattcaatccgcgtgccgtaccaacccacaaattgcggtcgttatcttcggctaaactccagatatgattatcactcagggtcagagagtctttcggatcatgtttatagatcacgaactcactgccatcataacgattcaatccgttgcgcgtaccaaaccagatgaaacctttggtatcctggaatattttaagcacagagatctgagacaaaccatctttcagattcaggtttgagaaatagaagttctcattattctgcgcggttacttccagggttgctaacaaggttatcagcaaaagaatatgttttctcataggtcaaaaaaaatgtgataggcttatttcgtcaacaactccgtagcgcaccataacaatggagcatgagcgtgcaggtcaccggtgatttgtttgcggttcatgtaatggttcttgtcattcttgatattggttccctcgcatacgtttgttatctcgtcttcatcattgatatatgagaccaatgccaaccatccttttgtggcagcaggagcataggttttcttatcgagccaaccgtgtttcacacccaccagcatggcataggtgaacattgccgtgccggaagtctctttatacgaagcgggttcatcaatcaactggtgccacattccatcgggatcctgattttcgagtaaagtagccatcatctttttataggctttcataataaccggacggttcggattatccttcggaagtacggaaagcagacgggacattccggcagccatccaaccattgccacgtgcccagaagaaaggagctgtgggggcgtgatagaaaaggccgttcggtcgttgtatcttctccaggtacatcgccatttcagcagcggcgcggtctatatacttccggtcacccgtagccagataggcttgcgattgtatggtggttatcataaacatgtcatcaatccatacgcgcgtttgccaggaatagccctgctcagcatacgctttctcctccggcttggcatcggcaggaacttcccattgggtatcggcatatttcattccgagatcgaaatatttccggtcgcccaacttctgcatatagatttcgaggggaacagcgcctaccacgttatagtctacgtgcaccatgcggggaagcatattcttttctgtagtaaacaagggttcaaagcgttccttcagccgctgctgcatatctttattcttcacggctttgctgaaccataaggcgcccaaccaagtgcaggcatcaggataagtcacataattgggagctttttccgcccgcggatttccaaagcgggtatgaggggtgaccaggaacttattgactatgcgcgtacctatcactttcggatcggcatctttcatacgtttcttcaaatcagtatcctgggcgttcattgttccacaccagcctgaaaaggcggcaaataggataagtaagatcttgtgtgtcttcattccatagtattgttagcagattaataactatggcaaaattagggaatttgggtctgaagggtttgaaagatcgttccaaaagcttgaactattagctcaaaatagcgtatataggcctatctcacagcatcttcctcttctgccggttcctcgcccaccctaagcactttatggtccacccaccgtaccggttctttcagcggtgtaggtttggtgcagcactgcgaactgacggccaggcgataggttccatcgggcaaatctttgggcagacggaagaaaaggcgcgaacgggtgttcatactccccaactctgcggcagggaaatggtgtatcacttcttcagtttccgcatccagcagttccactccgcgcaggggcgaatcaccgttcatcagcagcaggcgtcctttgagaaagacgtaacctccgggggtgagacgttcattgtgcgtgccactctccatatcgcgtatatcgaagatgaaggggcctcgttgaagggagttttctacgtggaagagagggtcttcgaatgcttttttcagttcgatgctcaaagcgtaagagagcgatgcctggttctgtgcacgggcggcagggttgatgcggttgaaattccacataccacgcacgacgggggtgagccgtcccataggcgtgttcagggcatagccgtctacaagcgcgtcgcgggcaacggacatgagttggtttacaatcagttcggtgtcggcggcacggtagataccccggctgttttcttcgaggataagtgccaggtcgtgtacatcgagtgtgccccgcagtacggcacggggatggaggtcgtcaccttctttcaggttatagtgctggaggcggacaccccattctacacgtttcttgtatttagccataatgatggaaaagttttattcagagaggtaaaggtaggcaatgcgtgtgagagtatgatggtagtagcggttaaagtgtgtgaaagggtaaggaagaagtttatatatgctttgatatagtattttatatctatacatatattaaattatatcgatcggtatatttatttataccgagtgatataaataaatatatggaatggtataatttaatatatcgattgatataatttcgcatatcatacgatatgtatacttcatccttaggctgtaggaaggtataacaagggtaggaagggaagtgtaagacgttaagaaacggcacacttgtcagaagggaaattgaggagttatataaatgataatttagggatgaatgggtacgcggacgacgcgtacctatctccttctctaactatcatttccaaaaacgcacccgcctataccctgcataaatcatcagtgcaaaagcgcaggcgtacgtaatgaagacggcagtcagtcccggcggtgtatcacctccaccatacgaatgaaggccggacaggtagtagttcacaccgaagtaagtcatcagtaccgaagcaaggcccagtacggacatgacgctgaatgcataatccgaacgaagagcgggaagaaagcgtgcatgcaggataaaagcataaaccaccatcgtaatcaatgcccaagtctctttagggtcccagccccaataacgtccccatgactcatttgcccaaacagcaccaaggaagatgcctgccgtcagcagataaagccctatatgcagggacatttcattgatgatgctgagttcacggatatggggctgcaacaaggcaactttcgacggattgccggcactcatgaatgcaagggtaagcagaccgagcaggaaactgataccgaagaagccataacttgccgtaattacagccacatgtatcatcagccaataagacttcaacaccggaaccagaggagtgatttcggggtccatgaagttcaggttggcaacaaacaggatgatacctgcaaagaaagccgccaaagccaacgtcatgaaggaacgcttgataaacaaaagtcccgccaacgctgtagcccaggctacatatatcatggactcataagcattggcccaaggagcatgcccggatatgtaccaacggatgccgattccggaagtatgcaacaagaagatcagcacgaccaatgccaccaagggaatgataacggttttaacccagcgtctgggtttcagcaactgccctaccacgaatatcaataataacagtccgaccgccatataacccatagccgaccagaagaataaacgtgctttattataaaacaattcccacgacacttgcttctccgtcagcaaaggtgtggcgctctgcttctgttgatacacgttcatcatggaaagtacctctcctgcgctctcccatgtaccggtacgcaaggcatcagaagcctctcccagataccacggcatgattttcgatacgaacagagagtctttcccggaatacacacttaaatcatctcccggagaataccatttgccactcgtatctcccggcaacgggaacagtgcaaacatctttccttgttgcagggaatacaggatattaatcttttcgtccagcttcaacagatccttttcaagccgcgaacgttcggctaccggacgggaatatgccttgtctatggcatcggaaatcagatagctaccatcttcactgaatacatcaaagaaacggatgtatttaccttcaggcagagaataggcttgcggcaattctttattagtctggcggataaaaggaatatttccccagtaagacggattcataagaaaaccgataatgacctgttcggaactaagtccttcgaaagtatcgctacggtagatcttgcgcaagagtttgtccgtataagtatctacaggttcaatacggcctgtaggacattgtatctgcattcgtccccattgctcagcctgttcggcagggatggtattcttcagcagatgttccgtttctgccttttgcgcaaaggaaagggtgggaagaaaagccagtaacaaaagaggagtcacccgtttcaattgttttgccagttggcggaaacgagactttttatctgccagggtcagcagcataccggcaagcagcagcagatatccggtatacgtaatacttgttcctgccgtatcattgttgacggtcaagatggtgccctgttcatcagcatcataggaggactggtagagccggtatccctgctcgtaaatcaccttattcatgtagatgtgttcacttcgttctccctcttccgtatgaatggtaaggaaactctcaaaagaagaagggctgtgagaaccgggataacgaactaacttaaaatcatccaggcggatggaaaaaggcaacgaacgttgatcttccgttgtacgcatatgggacacggtttctccttccctgatatgcacaatgccctcaaaaccgaacatattggtcaccaatgctcccaccaggattacaataaaggagatatgcaacagtaagactccatatttgcgctggctccacagacgggcttgccaggcagtagcacagaaattgagaatcaaaagaaattgcagaagatagaaaagcggattgttatagattatttcccttgccattgccgtcccttgcgccttctcgacaaaagttgcggcagccagcaggatcacataatgcaccagcaatatcaatgttatcttccacgaggtgaacattgctttcagggaggagcttacttttttcatgtgcggatatatcctttcaattgttttatgatctatctgtcattctattgaaacattcaacgtagccaacaattctgcaagtgccggtggcgtcagttgctgggcagcatcagaaagagctttctgcggacagcaatgcgactcgataaacagaccgtcggcgtgcaaagatatggctttctcgcaaatagccgccaataattcacgttttcctccgatatggctcggatcacaatagaaaggcaattcaggaaaatgagtatgaaaacgttccgccaattcccaaagggggtcattgcggtaaggagaactatctaccgtgcaaaagccacgatgaatgatgcggatgtctttcagtccggcctgttgaaggcgttctaccgcaccaatccataagtctacgtcgggacatacaggattcttcacccataccggcatatcgcacccgcgcagggattctgccagttcgtgcatcataaaagggttgaccgtagtacgtgcaccaatccagatcatatccagaccggctttccgtacagcttccacgtggcagggaagtgccacctcagtcataacccgaagtcccagttcctgttgtatctctcgcatccaatccagtccttcttcgccaactccctcaaatgttccacagcgcgaacggggcttccacaagccggcacgcagaatgccaacgcccatctctttcaatcctcttgctgtttccaacatctgtttacgactttccgcactacacggaccggccactaaacctatagttttcatatttacttatatagtagctacaacaactacgggctacaagctacgagtacctttcggcatagtaaccgaagtatctcagttctcctcctcccgggaggaggggaattgagatagtctataaataacacgccgaaaggcactcgtagcttctagctcgtagctggtgtagcttattctctaatcttcgataatcacacggaagcctacattatatactttctgccaaggcagatacgatctgcgatagtatgtggtggacgctttcggatgatcattccatgatccgcctctaaccactttctccgtacccgtaccttgcgtcttttcattgtaaggataaggcagataatcagaggatgtccattcggcaacattaccctgcatgtcatagagtccccacgcgttagcctggtatccaccgcctttcaccatcagcatattgccgtcatccacaccattttctttaggttgataagtgtagtacttgtaccaaggatcattttcccgcatcggcatcggattcactccttttaccgccatcagattcaaatgcttgtcagccagattctcaaacttaccaaagtctgtgtttaaagaaccataccagaactcaccgtcgctacctgcacgacaggcccactcccactgaacctcggtaggaagagtaacagtcttaccggtcttttcactcagtttcttgcagaatgccattgcctcttcccagctcacacggatagcaggctgttcagggttattggcaggatagccttggtgtacatggtctttccataattggcggatgaagcggctgtcatgttccgggaagattgtgcggaactgttcattgctgacttcgatctcacccatccagaatcctttcttcacaacttgcttatgagcaggagagtaatcggaatgacctctgttactacccatcacaaatgaaccggcaggaacacggacaaaattcatctttacacccggagctaattcaatgctcattttcgtttctccttctttggcaagcatagtctgggcagcggctttatcaaacggccagcctttgacttttacatccttgtctttatactccttcttttccggtttcactggagccggtttctcttgtccttccaagtatttagcatacgaccggatctcagcctgccagtctacaccggagcgtgcatatttctccgtcaattccgtacggcggctgatttgttccactcccttaaattcattggctttaaacttgccatgataaggagcattgaagtcaatccagttgtacagagcttgccattctttgtcagtcagttccactccatgatgtcccgtcttcaatatcttgatcaacggactcacggaagcatgatattcatacggatcgagcacttcaatctccgcttccggaccttgacggtacacataaggatgcagattcaagtaactgactccgaaaccggagaacttatctatcttcccacctgtaaagtcagccagtttattggaaccatcgtggcaggcgatacaagcacgatccagcacaggctgtacttccaaatcaaaagtgaaagaacgtactccaccttccggcttcgtaatttcatggggcgccatagccgaagctttcacacgtttcggtataggcaattgattctggtcttcgtggcaacctacacaagaaacagtttctcccggcataccggtcagccagctacgcatccactgaatggcacgtccttccgaatccaacggctgcaatgagatcggggtattggcaggaatcttaaatatcgcggaaccgtcttcttctacaggaacggtacccaacaaacgcttgatatcccaaccactctgaacaccttgcgcccaatggtcggacggagttctgttataagcatattcataagcaagcacacggaatgcttttactgtaccacggggcacaccttccagaccttcaccctcgtatatatcctgaatgaatacggtagcctctttactggccagattaatcttttcaggaatcaccggaggtaccggacgctgcacaaccggagtcgggcaaataagaccttccccttcaaattcggcaatcaacgtgaggttatcgtatatgtcaatcagatagactccccacagggcactttcattcagcttagcagtaaccaggaaatatttatccgtcaatggataaggcttgataaactgaggccatacgccatccaccaaacggtcttttacaatcggttctatcttacggtcacggaaaggcaattcctgtaacatacctttctctgatttacggctctttgaaggatcaaacaacatcaaacggccggaacgtgtcacaccatgatgaccggaaatcacaccgataaactgtgatgaaccacctggcagcggtttggcatcgaacgtactgttcgggaagtaagaaccactaccatacaaagacttctgctccgttccgtccggattcatgtgcattacaaaacgggagaaatagtgagtcaaatccgtatactcccaacgtgtgtacatgatacggccattattcataaccgttggcgcccagttagcatcctggtcaaaagtcagacgacgcaaagaaccatctttcggatcatacaagcacatattacctacctcatcattaccattcacacaaggtacaccgttataaccgatattggatacagcgataagcttgccggaaggcaaataagtggcatcaaagaattccagatctttttccggggtttctatgagcttcttcaaaccggtaccatccagtttcacttcaaatacttgccagcggcggtcggtatctaccatagagaacatcaggcgttcagcatcccaatgtagtttcaaatcaggaacagaagaaccgttggtaggtttaaagatagtacgagtcttaacatctccacgtaagttggataactctgcaatctcagcattaaaaccaccgcgtggagcggaagtctggttagaccagttgttattctgagtacccagagcacgcggattcacctgacgggcagaagtacctatcttgtaacgaccgacaatgatcttatccatatccaacgctgtatttgccagcaagatatcacgcttcagttgcaaagctttgttggcagcttccagggcagaagcctcattcttataaatgccggagaatccttttccggtcagtagcttcagttcagcaagcttagcctggttcgcattcttatcataaccggcatcttttgccatatcattataagcttcttcaatggcacgcatattcagccaactcagggactcctgcaactgatatactttcatagcctcttgtgccagattcaaatagccgataacctgatcatccaaagtaggtttagaagcaatctgggcaacttgtgctgtaaaataggatttatcattcagcaaattaataacttccgtcgctatatgcttttcgatactggcatcatgggtcgtaaccagtgctttcatatcgcttccgccgaatggcagaaacaaagtagcctcagtcggatatttagcaacgatatccgaagcagcttccgcgccggtaatcccttggagacggaaaatcaccgtacccgcagaagagcggttctccaatccgatctctgcctcaaagcgggtatatttcttatccagaggaaccacgatttgcgcattggcattcgccatgatcgtgcgtttataggttttgcctttcatgactacatcctgtcccttggcattctcattaaaacgcagactgccgctacctgttttcttgaaaatacttttcaggtcgttcaaccaaacagaagagccatctgccgccactaatttagcatttgcccatacagcctgatcatctcctgtaccatctacagtaccccaggtataaagcaccatttcatccagtccggttatatccgccgagaaaggcactgccgcctcttttgccttaatcaccttcgatgcaatcggcaaacaggtcttttgcatttccgcatgggcctgattcttagccgcagcaatgctttccgcccacgtagcaggcgctttcaccttcgcactcgcccttcgctgtgccatagtgggaagcgacaaggcaatgcatacagacattactaataatttcttattcataatactttgttctaaagttaatctcctattttaagtccggtaagcggaaattgtctatatagcaggcagcggatatcttgccgacattcttcttatcatgcaagctccacaccactttaccgtttttatctatctctatcaattgcggctcatccaccgtggtatctttcgtatgtccgtaccagttacaaatcaatagattcccattcttcaattgcaggatttgccctacaaacaataaagcaactccttcaatatccagtgcattcacccgtttcaattctttgcctgtcttgcggtcgattacgatgtaataatggttgtctccacaaggcaacagcagatttccgtcaggaagttcaagagatgagaatgccttgccttcaatctgatgttcagcaatgatcttccctttacggcttacttccagcactttctgtttcgccattaccggtatcagataatggctgttccggagctggaatacttgtctaaactgactgtggggtctttccacttccagattcaatgttactttgtttacttctttgcctttcttatccaattctatgaattgggcaggaataccacatattcccaatagtacgccaccgttctgcaacaaggtggctgattgtaattccgtcttatccggtgttttataatcccagaccacctgatggtcccatgtcacgagttttgctccccgcttatacgaatacaagatttctccctttttagtcaaagcaactgcattacattcttcccctttctccagagcatgctgccattccacttttcccgtttgtttatccaacagcaggatattcggatttccggaaccggcaaccaagagtttatcttgtgctgccgcccgaaatcccatggaaagaatgatcccaataattatataaaccctcatcattcttcttgtaatcagtgttacttattcttcagttcattgaacagttcgagtgcttgttccggtttcagattttcatgtactaccgcatgaacggcctgtatcatagcagcgggagcttccgactggaacacattacgtcccatatccacaccggaagcaccttcgctgattgccttatagcacaattccaacgcttccaattcaggaagtttctttccgcctgcaatcactacaggaacaggacatgctgccaccactttttcaaaaccatcacaataataggtcttcacgatattcgccccattctcggcagcgatacgggaagctaaaccgaaataacgggcatcacgtgccatatctttacctacagccgtcactcccatcaccggtattccgtaacgggtacctttatccactgccttgtacaggttggcaaccgtttttgcttcgtgagctgcatcaccgatagacaacatgattgccatggccgatacattcatacgtatcgcatcttcaacgtcaatcaagacattgtcattcagttctgtaagaatagaagtaccggcatccgaacgaaggcaaataggtttattggtgctgggtggtatcactgtacgaagaatgccgcgtgtacacatcagacagtctgcatattctatcaacggaacgatgttcaaatcgatacgttccaaaccggatgtcggtcccataatgaaaccatggtcaaatgccagcatcacggttctgcctgtcttcggattgaagatacgtgataaacgatccttcatcccccacggaagatgttccgctcccttcacatgaaaactattattagtagaagctacccccaaaccgaaattgcagccttctcttaaatcatctaaatcagccatttcttatcttttcattagttatttactataaagcttttgcaaacgcatcaaacatgcacgaccaggatgaagcccctgaatccgcataaccgatagagcgttcgccgtaattacgggcacgtccgaagtttgccttcatatctttagtagcttcagcacctttcacagcagcttcggcacccgctgtcaggatagccttcacatcagcggaatcacaagcctgaatggcttccaccgctggtatcagggcatccatcattgttttatccccctgttttgcttttgtttgtttcctcacaccttcaagtccacctgcaaacatagcctttacacccgccacatccagttcggtaccttccgcatggtcgctcattcccaagaagaatccacccagtaatgtgctggtcgaaccactgatctcaagcatcaggttaaaactcatgtcattcagcatcgacttaaattcagtgcccttatcagccgtagcaacaagggcggacatggattgaacgatagctgttccatggtcgccatctcccaataccgcatccagttttgagaattcgtcggagcgctccgtaatgcacaccagcgcattacgaagcatcttcttgaaatcatctatagtcagtttatccatctcttatttaccgatagtcgtccaataaggagcattagacattttattgttcagataatcgatatgatcgtcatccagcaaaccaagaatcatctggaaacctgcctgttcctgaacggtcagcaactcaccgatacgggcagcagccacttcgatgccggcattttccaacacctgatgcgctttacgataaacgatattcatctccatgtgcgtagttgcccctacaccgttaataattaataaagccttgttaccagctttcggctgtagcttcttcatcagcaaaccgatcatttcttcggctgtttcattggcagaaaccaattgcttgcgaccgccaccgccttctccatgctgtcccataccgatttcaatttcaccgtccggaagatcggagatggtcatgccgttttgcggatgggtacaggacttcatagccactgccaatgtagccaaacgtgcattgaagcgttcacctatttcaataatctcgtctagtgacttaccttcttcagcagcagctccaacgatcttaatcaaaggaacacaacctgccagaccgcgacgatcttcatccggtgcatccagtccggcactgatatcatcgtgtgtcaggatagtctttaccttaatgcctgtacgttcagccaactggcatgccatatttgcactcatgatatcgccggagtggttcaacaccacaagcaagataccggcctcacgtttgaacatctgcaaggcctggaacaaacgttgtgcacccggagcagcaaaaatatcaccgactacagagcagtccaacattccgtcgcccacgaagccacttaatgcgggttcatgaccggaaccacccaaagtgatcacagctactttatcttcagctttcgcatgtgcacgcacaataatattttctccgccaatggccacctgattactataagccattacatatccttccagcaattcagctgtcagattatccggatcatttatgaatttattcatcatagtttctttctactaattgattatttatcaaactgcattaactccaaagcaataccttcttcttcaatgaaagcaattgtcagattctctccgcccggcatcggttcaaccaatacttttgcacctttcagttcagccgccagatcatctacttcgtaagcgatatgtgctactttctgaatcagctcaggcatccaactgccttcttcaaaacgcaaatattctatcttattggggctttcattaaagttagtcagccataccttcaatccttccgcatatacctcacccggttgcggtgtggtggtcggtactccaaaatgattaatctttctcatggtattcttaattattgaatgatttacaaagcagcctgtccattagtaaaacgcagaccatcattatcatggtaacatgcccactcatctacaatggctccctcaggaccggccatcataaagtggaaagtacccagttctttcagacggagaacatcacccacattctgtttcacgaaattcttgctcttaataggaccgtgagatgccggaaccgcaggagcattcggtgtttcatctcctacttcggagaagttataaacccaaccgtgatttaccatccacgactcatgtttcgcagggaatgccgtttttacatgggcatgttccggaatcatctgtcccggcaacaagtaaatagcatgtgcaaagtagccatattccggatcgtttacccagaagatgcctcccatacctacattctcaaagtcgcccaaaccgaaatctgtaaaccagatatctttctccatcagcggagtgtaaggcacgccataaaatttaaacatgtcaaggaatgcttctttagcagcttcctggtcaaactttccgtctttgtagaagtcagcattcgtgtacttcttctgatacgttgccttttcctgtgtcataacttgttctgtttttttagattctgccgtacaagaagcgagtcccataccgcaggcggcaattaatgccagggttaatactttttttaatctcatgtatttatctgttttaatggttaataatcagcctcaacaaagcactcccattccttctatctctatcaatagttccgaacggcatacatcggttaaagtatagatggcaggtaaatcgggatatcgttctgtcactacttgccttgctttttccatatcttcccaacgtttcacatacacgcggaaggtgataagggtagcattctccgtagcaggaataccggaacgattgaggttatcatgggataccaaatattctatattctccaaggtagtcagtgtttgctgttcaataccaacgccttccagactctgctcaccacgaatagcggctgtgcccgatacatatacgaaaccatgatcctctttccatacagccttggcacgttcgaacttcggggtagtcttttgaggaagagccacatctttttctcccaataatacattctgtgaataagcatgagcggcaatctgcaaaggattatccaccccaaggacccggacacttccatctttgcagagtaaggcatccacatcaatcataatgccgccccactgagtcccgataccggtagcagccggataaccggtagtccactccacaccattatagaatagcgaacgtgcatcattgaaatcctgataatgctgatgaccggttgcatcgcaagctgttatcttttcaatatagttccattgacgtatgattgaggaaaccggcataccttccgtttccaagaccttggctatcctggagaatacttcatgagattgctcacggatgctctgatgtagtacatctcccgtcacaccactcaggaacaagcgtttacaaccttctctttcgataatgatataaggcaaatctcccagcatccgatattcaatgtgatcttgttctgtcagttgcacttcatgcacttccatcaccaatcccatactctgaggaggttgtgccacatagcttacggaaggttgtttctctttgaaaagctctttcaccgcttccctgatacaagcaaaacgggctacatattcttcattatccaccggcgcatcgaatatcactatacgtacaggagtatgaatggctttatattccgccagaagttgcgccaacatcaccttaaagggagctttatcaacttgcaggaaataatgaataatctctatattttcgtgtgtaatcatggtcttcttattctattaaagtgaattcacatattcggcaagttcttccgcttctttagctgatattttcttttcaataccatgcttatgtaccgtgaacacttcttccatagtggcagcacgtccgtcaaacagataaggagccgtacgccagacttcacgcagtgtcggagtatcccacccattctcaaattcgatatcttcgccgatacggtgcatcttcatatccgtataatagggaccggaatgacattcgtcgcaattaaacttttcataaaccttacgtccccgtttagccttctctgaaagttcgccatttaccagatacggactgggaaccggtttcaatgacatcagatactcatccacacactctgcaaattcttccggtaaatcactgaactgaatgagcttatatcctgcacgaacggcaacctccgctttagcacgaataccggaaatcatacacggtggagtgacatgggaaaatagcatactcttgcagtttttcgaattaccaatgccatcattcatcaaatcccagttcatggcatccatacgtgcatcgcccggatggcatccgttacacgactgccagttctggaaacaatgtgccgcatcattaaagtatttctcaccacgctgtattctgttttccgtacgattcttcaccatagcaaccgactgaacatttgccgtattcaagtccacgatattcaatgtatcagagaaataagtaggaacaacagccgttccgtccttcagcatcatgcaacgcggtccattgcctaccaatgctacacgtttacgcataccatataaaaagcgtaaatcatacgccaaagcatccttttgaggatactgctcaaatttctgaataaatgcaggataatctatcacactgacctcatgggtaccggagtgactgaccacaatcttatcatccgtacacttcacgtcccatatacctgccgcaccccgttccggttcatccagcaacacggcaccctcaaagttcagagtagtcagatttacaatactgatagcactggtattcatccagccttgttgcaattgggatgtcggaacctggaaacggcccagattatgagtaaccagcaaataacgcccgtccggagaaagcgacattccacgcaaggcattacttccgttggccagttgaatatcctttatcttccggaaactgttcatatcaatcacagatacgcaagctgctacagtatccacatccgcccgctgcataggcaggaaattagtaacaaacaagtgttttccttctttatcaaagacagctgatttcggttcacgcaataccttcaccgttcttaccacattctttccattcttatccaattctgatactgtgccggcaaactggttgcaaatatataacttgccgttacccgcatttaccaacggagcgcaggcaccggatgctgtttccacaaagactttttccgaaggattggaagcagacaggaaataaacaccattcttatgttcacctgccaccgttgcataaatctgttctccatctgtagcaactccggtagggacttcatccagttcccactcttgcaagcgttctttataatctgatgaataaatagaaaccttctgaacgcccttctgagatacgatcattccagatttataaggagtgatacccgttataaacaatggagttccttccggctgctccgtggtatgagtagtaaatgcaaatagagataccactaaaaatacaggtactataacctttgcgatgctacgacttttatacttcatagtgattgaattaagcttgtttttcacatcacaaagatagggcatcaccggtctgagggttataaatcgtgtatcattgacttgcaataatgtctcaaaacaaatgtagtaagcattttgagacggtagtgagaaccgtttgagacaaaaaaggcgtaaactcctttccgccttaaatcttatttttcgtcttacatcttctctttgttcgcactgttcatctgtacgaactcggtaggtgtgaacccatagaatgctttaaacgaattagagaaataggaatgactgttgaatcccaacaaagttgccacttccgaaacactcatattcgtttccttcagataacgcaaggccacctccaagcgcttattacgtatcagttccgtgggcgaaagctcggatatagctttgattttgcgatagagattggcgcgactaataccgatctggtcacaaagcatctctatacccagattctggtcagatatattcttctctataatctcatacagtttctgtgagaagcgttcatccgccgaggtagtacttacacctaccacttcgggcgagaagcgtttgccatacagtttctttaattgctctctcgactgcaacaggctctgaatacgtatccgaagcacatccatactgaaaggcttaatcacgtactcatccgcccctgcctcaaaaccttccctgatatgcatcaccatggagcgtgcagtcatcagtattaccgggatatgtccgatacgaatatcattcttaatcatggagcagagttcaagcccattccgcttaggcatcataatatcactcagcactaaatcagggaagaattgtactgccttatcatatccttttacaccgtttgccgcttcaatgatttcatagtcattttccaaggacttatgcagataatcccgtacgtccttgtcatcttccaccaagagaaccaccggctttttaggtgcgatttctccaataggagatgtttgcggtttctccaccggctgtgcaaatgccgtatcgccaattgtttccacaggcatggaatccgtctcttcctcagtgaaagcttcacgggaaacgggcagcaaaacaatgaaccgcgctccttccgtcccatcttcccggtcttcaatacggatcactcccttatgcagcttcacaatggaatacaccagactaagcccgatacctgtacccggtacatttacccctgccgtttcaggtacccggtagaaaggtgtgaacaccttatcccgttcctgcggtgggattccacaaccggcatccacaacctgcaacatcatatacagggcagaaggggctacttcttttcgatacaattcttccaactctcccgccggaatacatttcaccaacatacgtatgtctttaccggaaggagtatacttgaatgcattggataataaattgaatacgaccttctcaagcagcactttatcataccaagcctgaaactcccggtcccggcaatccagtgtaaaagtgatttcattggtttgcgctatctgattgaacgcacaatagatctccgtgacaaattcatatacattattctctgtgacttgcaattccatcgtaccactctggtttttctgcaagtccatcagttgattgaccaataaaaggagccgctgggcattcttataaatgaccatcagtttatcccgcagttccaaagtcatatccattcgcttcaccaactcttcaaagggagtgataattagcgtcaagggagtacgtaactcatgggcaaaattcgtaaacagatgcatctttgcctgatgaaactcttcctgttgtagtttctctttctgctccattcgcaacctttccctcaagcggcgacgggcattgaaataatggaatattgcgtaaaacactcctatcagcaatagtccataaatcaggaaagcataccaagtagcccataaaggcggtgtaatcacaatcttcaaagtcttcccttcctcattccataccccatcgttattacaagccttgacatgaaaaagataggtgccgggacgcagattggtatagtaagccgtgctgcgttctcccacatgattccagtctttatcatatccttccaacttataggcataccggttcatctccgaattgatgaaattcaacgctttatagtctattgacagattattttgattatactgcagattgataacctccgcttcattaagcaatccacttaagattccagttccatcgtctgcacgcaccacacgattattcaccaacaggtcttccaatacgattggcggtacaaaacgattcatcggcatctccggtgtgtaaaaagtgataaagccatcattaccggtaaaacacaatgtaccgtccggcatggctaccccaccccgatatgtaaattcacgcaaatgaataccattattgaatggaaagtttttaatctccccggtggacggagaataagaggaaattccctgtaatgagctcatccatagattcccgtccgctccttccagcaatttacaaatatcccctcccatcagcccttctttctctgttacccagcgaagcacacctccccgtttgtccagttggaaaataccgcctccataagtagatacccatacatcaccggatctggttaataatatagaagatatatagttacttggaatttgcattttctgttccgggcgcgatgtacgaaatacagtcatttcacctgtacgggtattaaaacggtatagtccggcagaacgcatacctatcagtagcacaccgggactctcttcctccatgcaacgaaccgaggaaaaatgcaatttctcccctttcggtccggtaaactctgtcttccgctcaccggcaggagtaaagcaagtcagtgcatatccgccttttgaagttcctacccataaattaccgtctgcatcacgcacaataccataaatagcaagttctatgggatatttatagaataaagaaaaacgccgggtagcaagatcaaaacgatagacctcacccaataccgtaccgcaccagatacagtcatcctcagcatataccgtcttgataacattcgaattatgcacggaatagctatccttatcaatcagataaaactgcccttcccctgtcgaaatttcatatcgcagtaatccatacccctcagtagctatccataagtttttctgtttatcgacacaagccgtaccatagattcccgtttgctgattcaccgtcttccccggagtatgatgaatgaagcggtcggtaagcgagctcagccaagtgacaccaccggcaaaagtaccaatccacaacgtaccggtatgatcacggcaaaaagcataaatggaaaagtgccccaagccacgcccgggttcgtcataactgctcactttacgaatctgatccttcagcggtgcataagcataaataccatcgaaagtaccaatcagcatctctccatcccattcggcaaggcaacggacataattatttttcagaccactgttggcagatacataagaagttattttatgattacggacatcaatacggttcagtccgccaaattgacaacctacccagatgcgatgataagaatcttcataaagagtggaaatactattgtcaggtaagccggcacgacggtcatagtgtttaatcacctgcatctgtttgttacactggtaaacaccattcactgccgtacctatccagaaattgcctgccttatcctccatcaaggtagtgacggaactattgaagttctccacaaattccacccttttaaagttgtcttgttcgggaatataacaacaaagcccactgcgggtacccacccatactttgccggaactatcaactaaaagagaaagaatacttgcactggagagtccatctacattaaaatagttgcggatacgttcggtgcgaagacacatccggcttagtccgcgactggtacctatccataaattcttgctatgatcttcgcgtatttcattgacttcattgtctgccaaactcagagaatctcccgggtggtgacgaaaaacagtatattcacttccattataacgattcagtccattacgtgtccccagccaaaggtatccccgggtatcctggcaaatggtcatcacggagagttgggaaattccttcattcagtttctgactatagtagaatgaatatttagaatgctcagcccataaacacaagaccggaaatgagcaaattagaaagatcatcaatattttcgttttcatcagtatagatatgttttgcacacaaaaataagaaaagcccggaaataacatagaatattaaggtgaaataaacaatataaggagaaaagaaaggttagtccggcgtcactaaatagttacagaataattttatagtacagatcagtcgtaatcttatcctatttcagtcgtatactgaatagggttcagtcgtataccgaaccctattcactcgtatactcattatgtgctaccttaacgttcttgataaccaagtagttaaaaatcgcgttttcgaaaagagaaattggctataaatttatacaaatagattataaattcacctttatcgttgccccttccgtcacgctcttcttcagcactgacttgccgcctttcaatacttctacatgcagcttctttcctgcacgggatacccgaatatcaaactccgaattgaaagcacgtacacgattcagattcatatactcccactcctgtggcaaacggggagtcatctcgaaactgcgtaatcctgtggggcgaataccgaacaggccttcggtatagatacggcaatacaatccgctttcagcagaaagatgacgctgatctccttcgggccacgcttcaatggcataaggcacatgatcgcccaacaaacggcgatgtgaatacttcttgaggaaattcatacctttctccacttctccggcagcaatggtgccacgcaaagcatagagggtactacggtcccagaaggtttcagtaccggcttgcgtcaataatccgtcgtccgtccagaggcggggcgaaaagagagcatcgatagtaccttgcgcacgggtgtagatacccataacaagaggcatacaaatccaggaacgcaggatatcattaccttcataataacggtaactgtggaaaccttctatctcataaccaaaatgtttttctatggctttctctaaagcatttgcttgattacgatacatgttcaactgctttgccgatactcccaattcacgccccagcataacggctgaacgcaaagcatcgtagtaaagcgtagaggtacagaggtttgcatcaccagccgggaagcggttctccaattcatctgaattcgatgcaaccacgccggcaggagttagtttacggttgcaatactccagacaccactcaatcagaggccacaattcacgcgcttccgccttatctccacgagccaacgcataacgtgcagcaccgtaagcaatcattgcaccgtcccccctatctttggcaccatgccagaaactgacaccttcggagatgatggaactcggaataggtttatactccggattcatatagcgggcaaagtggcggaaagaattcaatgcggactcattaccaatctcataacccagaaaagggaagaaggggttgatatactctgcctggtcgttagcccagacagccgcataataggcttcaccaccgggaccatgcatcaatccacctttcgtgcggtagatgctttcagcgccacgcagtttggcgaaggcaaacatgcgattaagtacgggatcgggtgtatccaaaaccagattgctccaccactgactgataagcgcttcacgcgcggcacgttcactaaggatattgatgtgtgaaagaccggcatcgtttcgtccggacgaggcatccaccagtttccttccggaaaagactgcatagaactcaagcgtctctcccggttccaaaacaaagacaccacttttggaaagaccggcttcgatgcaataagcaccatatacaccggcttcctcaggagtagtatatgttacgttccactcaggcactcgcagcgttatctgattcgaactgctattcttgaaagtatattcctcacaatagcgcgcggcattggtggagggatagagtacacgcgtcaattgcacggcatctttcagttccttacgccggtaaatataaccgaaactactttccacacgcataatgccattgaaggtaacatcacgtacttcttcattcagcaaggtttgatcgtccactgtcaccaaagcgggaatattcacatcgaaacgttgcttcagattgttctgtgtcttattgggatgcatgcgaagcatagggaaaacaagacttcggttcagatggaaacgcttttgtgcatccacaccgtaacgaaggacaacggaaagttgttgcccactcatttccaaatgatcgtcatgtggaatattatcattgatattccagcgaatggctccatcatcctgaatagtccaacgatctttcggttgtgcaatggccagcgaaccggcaaagatgaaagagaaaagtaataaggttcttctcaggttcataaggttattgtgtttaattgttagctattaatatcaatactgcactctcaaactgggtattcaatggattctccagacctttttccatcagttccgctcctgtaaataccttgccattggcaggaaaacgggaagtcactccctttgccagacttacttcctccacacgatattttttatgggcatccaggccacccagcattacccggggttcattgccatctttagtctggtagaagtaaacgactgccttttgtttatctgttgaaacataactcaaagaggccaatggggactcataaggagaaatcaagcgataaagttcaccatgcatcaccaacggacggatgcgctctttgtacaatttcacagcatcggcaatctgtgcgcgttcttcagccgtagccttatccaatgcaaggtctattccgaatgcaccgctcaatgccacatcgattgccatcttcaaatgccgtttacccatacgagtcacatgagcagaaatcgtatttgcagggaagaaatgtgagaagccccattgtatcttgatacgtcccaacgggtctgtgttgtcactgggccagaaggaatggaaatagggcattgcgccatagtccacacgtcccgatccaccggcacaaagcatggccatcacattggggaagcctttggcaaagcgatccatcagacggtaaagcgcccaattatagtctatccagagatgactttgatcggcaggctgcaaataagaagatccgggttgagtgatgtaacggttacagtcccacttcacataagtgatatccgggttaggccgcaaggttttgtcgataatatcccattcaaaagcctgtacttcggggcgggtgaggtccagtatctcctgatggcgacccaatatcggttcacgtttggattgagttatgatccaatcgggatgttgctgataaagttcactctgaggattcaccatctcgggttccagccagataccgaagccaactttacgcttcaatgcttctttggcaatatatgacagacccttgggtaacttcttggtagaagggtcccaatctcccagaccatgcttgtcatcatcacgggagtaaggtccattaccgaaccagccatcatccaataagaaaagttcagctcccacctggcgggcaccatcaaagagttgcttcaagcggtcttcatcaaaatcgcagtgtgtggcctcccagttgttcaacaatacagggcggtctttctctgcatcgcggatggcatttgccatggcccaacgatggaaacgacgactggcttctcccttaccctgcttactatacgtgtagagaatggcgggtgtagtaaatgtcccgccacgctccagattgtactgtgagcccaaaggattcataccggtcagcaaacgcaggttcttgttccagtctacatcgaaagcaaactggaaactaccgctccaacgcaaagaagccgccagtacttcaccttcattctctttagccggtccgttcagggagaggataaaagaaggaatacgcatctgatgtgcacgaatgcctaatttggaatccagaatcttgactccttccgaaaggcgttcttcattgagggttgcttcgcgcttatagttaccggagaattgagtgagccagtattctttcgcctttaccaccggggcagcagaagcaaaacgatgcagaataactttacctttctcattatgcgtaacggtattccaaatttccatcatgctattatctgcatagcatttgatatagatatctacggtgaaaggataggcagggtctttcagtgaaataacggtttgttcaatacccggtgccagcgcttccgtacgatgtccggcgtagtgaagctccgtagatgtatttccatctacgtgagttgcctggatagccggttctgtcaggacaccgtttccataaggaggaagaaattcccattcacgcgagggcatcttagcaggaggttctacttcacgggcagcatctccaaagcccaattggtaaaggcgatcgtccgtagctaccaaaaaggtcagtttcagttcgccggatgtaacggtgaagagcttcttcacatttggattgtctgctgcatgccccgtgaggagaaggcagagaaataaacaggtcgtcaatatattcttcataatcttatcattcttctgtcataaacttccaggtaacattggcaatgctgttcggtttccccttttcagctttggatatagtacctttcagcttgcctttcttatcgcgtgtcacagtgatatcacgccaggaataggcgcctttctcataatcgaatgtttcaccgtcatcatcatacagccggtaagcaccatctgcttttccataatgacggatttccagattcaccttctctcctgctttcggggcatgtaggcgggcctccataaatggcaggatagctccatcctttacatataccggaatacggtccaaacccggtgtaacagtaatcttctcgccattgcccacatatttacctgtatagaaatcgtaccagtctcctctaggcaaaaccaccgtacgctctttctggcctttgaacatgggggccaccaacagatattcaccagccatatactgatccttaatttctttggaaactgcttccaaataaggattatcttccagattggcatccgacagtttcgctgtagttccttgttcagggttgaaacccggttccagattcatggcgcggaacggaggaataccatcaaaatgatagcgtgcaaattcactataccagtaaggcatcatctgcatacgcagcatagcatactcttttatctgattctctacttcggggaaagtccagggtttcgtaccgcttgcccaggcattaatcattgccatcggcgagaatactacagattggaaacgacgcaaccagtcttccgatgaactggaactacgtacttccggagtccacaatacaccactaaagcctgaattaatcaaagcagtaataaagtccggatggctgtaatagtcattataaatcacataggggaaagaagttgcaccggcattcgatgcacgaaccaatccgaaggtacgttgattacgcttcttgtacaattccgcagtagtacgttgtacccacaaaccataagtctggcgcatctgctcagcggcaattccactggggaaagtagccacatccggccaaacataacggtcgtatccgtctacttcatctactttataaccgctgacaccaatattcacgtgttcctgttccagcttatccatccagatttcacgggctttctcgcctgctaagtcgggcacaataccacaccatacggtgtgtgagccacttaccggatacatttccttatatatctttgaatcgggagatacgtatgggtttgtccataagttgatgcgtactcctttagccaacatctctttcacaaagccggcgggatcaggatagcgggtaacatcccactcaaaagtacaaggatacgctttgctttgccaacccggttccagtccgatgaagtccaacgggaaaccacgttgttcaaactcatccgcttcgttcttcacgtcttcagctgtatagagcttctttgtacgttgcgtaaagcccagcccccaacgcggaggcaatgtacctcctccacagagcaggttataacggcggataacatccataggagtaggtccggcgaacagataaatttctgcacccggagcaggaaccaagatcgaaacggcatccgaataaggcgccgatgtccaggtcttatccatattacggtctttagccaccggagcattcggactgtccttacgtgcgccactacctgcatatactgtcagataacgtgccgaattaatcagtactccgtaaccggaactggaaatataaaaggggacaggagcatgtgtgcgcccgttatcacgtccaccataatggtctacatgcaagttcaagatcttgccacgctggtgtaccgtctgaaagttcagcccaaagccgtacaactgttccttgcgttgcaaaggaatgcggagacttgttttaccatcttgtatggaacccacaatttcattcgccaattcaggcaatgccacctccggtaagcgggcaaaaccttccttttgcggcgtaacaccggccacacccaataatgaatattcttcaggagtgcctaccacgcctttccagacgccgggctccacttgctgccatgcaatctgtgctttggcaggacatagcatcaacagggtcatcgcccctgcaatcaaaattttcttcattctttccattttgttataatagtgttattatcatcgaatcataccggcaaagccaccgttcggaagaactttcacttttaccgtcccaattgtattttctacaggcatatagtcaaaactatctttatcttttccatctataatcatagtgaatgatttaccttcacatccggcgggcaaagtaaattctatttcacgttcctcttccttaccgctgataccaccgatataccatacatcaccggaacgacgtgccacaacagcataatcagccggatagccagccaacaggaggctctcgtcccaggcagcgggtacttctttcaggaattgtttgggttgttccggcaaagaaagataagactccgccttatcagcaaaacattgaaaaccggattcaaagactactgccagagccaactgatgtcccatagttgtcttacgtatagcaggtaccccttggcgtactttatcagagaaagtcaccggagtatagtccatagaaccgactacattgcgtgtgaaaggtacagtagcattgtgttttgccgcctggtcgcaacgttcctgacgtcccagagtttctgcaccccggatagcttccgtagtcagcatattcggatacgtacgttcaaaaccacggggtaaagtggcaccatgaagatctaccagcaaatgattgtctgccgcatctttcagtaaagccggataaagttgaataatacgttgtttgtctgtatcaaagaaatcgaccttgattcctttcactcctacttcactgatgcgtttcatttctgcacgacgtaattcaggatcactcatcagacgatgtgtcgatacagaatctttttcacgtcctgcaccggaatggtaccataaccagacacccactcccttttgctgtgcgtatttcacgacatcttccatagtgccaccgttgcccatgttttgccagccggcatcaatcaacatgtattcccaacccatttcagcactaagatccacatacttcagctgtgctttataatcacggggagtaccgccattagaccaccaactccaagatgcgcgtcctgcctttatccaggattcatcattcactacagacgcaggattcaggtgtgaaatcatttgtgtttggaatatagtattcagatcatctcctatgataatagcacgccagggagtgaaccacggcaattccgataccggttctaccgcatccggtacaattggttcatccgcctccggaaaacggattttataagctttatcggttccggcattatcaatatgagtagcaggatatgagccatccagatgggcttccgttatcatcatccagactccgttggtgttgaatagcatagggaatgcccaaccacgtccatgtccacattccgaacggatatctatttcgctccggcaatattgttcatagctcggtttgtgacgatcgttccagtcatacggatgtatccacgcttttccatttacgggtacggcaaactctgtatgttcggcctggatagtgtgcatttgtccatcttctccgggtagttcatagcggaaagccaccccgtcattatatacccttacgatcaaattaaactgcctattctctttagtacggaaagtaaaagtctgttcacgacactcatccgtagtattcatcttcttaccggattttagctgataagcattagagatatctttcacagcagaagcggaaacaaattgtgcgtcttttccatactcacaattatccataaccagccctaaaagagatttctccatcgccactccatctttataaaagacagagtaactaagcattgtacttccattttcttgtttattctccaaagcaaaccggacgttgctgtcttttgatactaattcccaggcattaggagccgtacaagaagtcattaatactgcaaacagcaataatgctgtattcaatagttttttcatggtattcatctttttgtataatcactaattattctttaggggtaaacatcacaatatatccgccgcctacacgcatacgccctgtaagagcatccgtattccggcagaacacacgttctatcttaatagaagccgcatcagcagggcgatcattcaacaccatcccttcataccagccatcacccaaaaacgacaaagggaattgtaaggaatgctcattttgtccattcagaactgccagaaaccaagtcttgccacttctacgtgcaaacgcagcaacttcacctattcgactagacggtaacactactgtttcatcccaagttgcgggtatctgcttcagtaattttaccgccggattatccagcattgttttcgggtgcgaaccgaagaatatgacagaagaattaaatacaagggcagtagcaatctgatgtacccacgaggtttccaagcggcgctctccaaaaacaacaggcgtataatctcctgctcctgctatcaaacgcgtaaaaggtaacgtagtgttatgtgtactccattcatactggtttttaccatattctaaaccacgaataccttcgcgactcatttcattcggccatgtacgtacctctcctgccggtttattgcttccatgaatattaagcatcaatttatactctgcagcttccttcaaacaagcctgatataagtcaatgaactctttggattcgtgtgagaaagcatccaacttcagaccaacaacccccaaacgatggcaacgttcaaacaattctttccgcttctgaggatcacgcatatcccgaccatgacgccatagccaaatcttcactccaaactgagaagaataatccaccaaatcttttagctgctcatccgtccaacgataccagaaagcgtctaccgtattatattcaaatcccaattcgcctgcagctttagaaaattccttcataccttccacagttcgtgctccaccatccaaccagcaccacacggaacgtcccggttttatccagtctgtctgtattcctttaggaaataaccgtttatcaggcacaggggctaaattggtaatcaaatctgaatttaccagctcattcaaatcaccggctattataatggtacgccaaggagtggtaatcgtaccggcaagagtagccggttgtgacaatcgctgtgcctccgccaaactataatcatgagcaaaaggatatccggctggttgtacatgccctaattttgtttcaaaaccattcttaccatttgcctgcaaagacatccctgcataattcattaaagcagattccgtaatgcaaagatatccggtctttccaggtaattgcaccgttacgggaggagccgcccattctccctgcattatctcagagatttctttcttctggtgaataccttcataatgacagtacatatcatgataccacacaatacttccctttggcaatgtaaatatagtgtgctcatcgggaactctcatctccccttgcttcccgggaagtattatccgaaaagcaacaccatcattataaactctcgcctctatagtaaaatttatctttaaaatcgtattctgcaatttgaaagtccgcccattactcttgtctacagcaagagaatggcttccccgaataggatatgtattatctgtcttataactatccgatgataatatatccacagaattacagagttctgaaccatcgatagtaaaacgtatgggtgcctcatccaatacatttactccatttttttctacctcataataaagcgacttttccttcagtttcaatgataaagaaacagaaccatccggactggtaacaggaaacagtgtctgtgtctgagcattgacagaaaccaatgcacaaattccaactaatattgcactaatagtccttcgcatattcatcatttatatatttgtatatccccatcttcacaaataatctccggacgggcatcggggttcttcaactcaaacgtaacattcttcagtttcaaccctttcacgtggcgtgcccatactccgtatgccggaatcttaggaccgaaagtctttacctccgggtatttatcgatagcttcaggtacctgagacaaggcatcctcaggagttcctgtacccaataaacgaatatgaatattttccaaagtcaggtttgtgatgtaatgtcccggaatacccgtaatcagaataccggaaggaggcgtcagttgagccttatcggcagccaccgcttttacattacggattatcacattttcaaagacaccgatagattgctgggtatcttcctgtttacggaatacactcagacgggcacccaaacgaaacagcatcggcgtacgtacttcatccattgtgatatcagagatttccacattacgcagatgggctccatctacggagaataactttatacctccattcttggtgtcgtaaatatgacaattgctgatcttgatgttctcaaatcctgccatagattctgttcccatcttgatacctgcctgattacttttcaacttcatgtccgtaacaatgatgtcatcacatcccattttactggcagtagtcttgaagcatagagcatcgtcaccactgacaatatcacaattactaatgcgtacatgttggcaaccatcaatattaattccatcgttgtgagctactccaaagctacgtatcgtcacattatggatattcacattccgacattggaaataatgggaagtccaggcacctgcatattttaaagtaactccttccacgcgtacaccttcgcaacgcacccagcgaagcaagaaaggacgcaatccccaacgctgtccttccggacgggtatctacttttatatgtcgttctttcaaagccgaaccttgcccatcgatagcaccttcgccctccaatgccacatttttagcatccaccgctaccagcaatgcccaaccgacatcgatacccaggccttccgtaaaaagatcaaggttatcataagctttataatcggtagtacctagaataagggcatctttctccaaatgcaaagtcacattatcttttagcacgatagtagccgacaaataggttccggcaggcacaagtaccgttccaccacccgctttatgacaagcatcaattgctttctggatggcaggcgagtccatctttttgccatttccccgcgcaccgtacttctttacattaaatgtttcagcctgcaacgtaaatggcagaacaagcaacatcaacaacagtaataagttctttttcgttttcatggttagtatatgtaagttaactatttaatttcctttgcaatattcactgtatatatcctattacttcgccgcccggggtgttctaaacgcaactcattggtaccttttgccaacgctacagggaacacaaactctctgcgtttctcaccaaatgtagccaaataaccgatattctcactgattttctctccattaatatataagtaagaaggaaccggattgccacctgcataagatactaccaaataatattcacctttatgtggaatatttactttccaactcacacttccttcagaactgcctttttcacctttgaactctactgaaccatcctcatttagggatgccgatccctgtctttccatatctttagcctggcatatctctatatcctccaaacgacgtaccactacacgttgtgaagacgttacttttccatttgccaaagttttcagatcaaactcagtcgtcttagaaattgacaaaggaataataccttctgcatcttccaaacgtttaccatttaatcgcacttcctctgcatgagaggttttataatgcaaagcattctcatctgcgtaaaagtattctattgccggacgtttttcattcaacggaactctgtataattcgattcctttacctgtacccaaattacggctgtacatccgatgcgtcggattattccaatgctcatgtacgcccaaactaccttgctcttttccaacataagctattcctgaaggaggattccctatatctgccgcctcatgaagaaaattgtcggcattggcacataaaggaagttccgaataaatgaaatcaagtaccactgattcgatagcgacctgatcattggaagccagaaaactggaagtccagccattattgaacggaggaagttggaaacgtaccgctttcccgttatgcttgggatttacgtacatagcatccaccagatacaccaaggtatttccacctatacgctcgtgagccatcagatcgacaatactattataagtgcccataccacggaaagaagaccagtcacgaatagaaagatgcaagggcggcacattgcctatggaaccgaactgattcttacccgtagcagttatagctgtctgtccggcactgtccctccatttatcggtcggttcagagtgtcttttcatcaatgccatgttaatcatatagtcggcttcgtaagccgcacgtgccaagcttctagcacctgcatcggtaatctcactggaataacgaattacatcgggaacaaatcctccccaattctgataattgacatttggataaaccggctgtacataatcgtaaacagccgaaatacctcgacgctgtgcatcatataccgtaatacagctctgaggaaccttcatgatatctaccaattgatgcaacaaagaatacactgactgtggagtagcatcaatgatattagttccaccattgtcattcagattgattttgatagcaatcttctcacctttcttatactttactgcacccttacctttcttataattaaaggttctgaacagttcatcccatgccttatcaatcgtattctggcgggtcagtgcaatgatcactccctccatcatatcatcaacccgtgtctgactattattatccggatccgaataaagtcctctttttccatcccaagcagcagctttcggatcatgtgcccatgctacccgccccggatgaattcctctggctactcctatcggagtgttaggagcatcaataggcacaaaacgtcccatatcagtaccattatcaatttgcttacgaatgacctgtcccatcagagaattatccactgacattatatataatgtacccgataataatataccgaccgccaatacggccccccccatatagaaccgacgggaatgccacaaaagtttgaaacgtttccacgtaccaaatccaaccaatgtgctactgacaaaagctatgaaagagaaagcgataggagctgcaatttgctgacaaggatagtctattctggaaggtttgggcacaacacgtatcagaaaccaaatcagagctgctaacccgaacagaggaaagcaaatcttcaaaacaacatttttcttgttgattccaacgatccgtccactcttcggacaagtcttaaagaaccatctttttatttttgtattcatttcattagatataaaggattatctttcatggttacaaaaatagggagataaaaaagagacgattatcagtattccatcaaatacttgaaaaatcgtctcaaccaagcagacagtatcttatttatgtaaatagattaactctattccaatgtctttccccatattacggctatatttcttttcctccggattgttccaatgttccaagactccgaggctgcctactcctgtgccatctctttccggatcatagaaagtagtggacaacgggcggtctgccagagcagcttccaccagatacatatcgcaataatccacatcggccatacgcggaaactctgcactcaggaaatcaatacccaccgcatcaatggctaccggatcctgggaagccagtagtgagcaaggccagtctccattaaacggtgacatcttccatttaccggaaggcgccccgttcaccttttccgaaccatatagaccatctatcagaaaaagcattgtcttttgtcccagatctttatgtgcgatataatcggtaaaggtcatatagcgcggttttccaccacgatcctgattgaaattgttatgctgatttttacggaagtcccggttgatgtccgtcactccataccagtttttcgcacagagtgttaccccctgcccgccatgtcctttcagtaatgccatatttatcagataatcagcctcaattgcacagtttgccaatcctctcgccaaacgaccattatcagctgaatatggaatggcatctgccgtataagtcgattgggtacgcccgtttcctccttcattatccagatatacaacaccgggaaattcggcataacatttatcataaagagctttcgtaataaaacggctggcatcgaatactgtgatttgctcctgaggcacaccaccgtcatttaccaaactacgaagcaaggcaagcgtcagatgcggagaagcattcaactgttcacaatcttcatgggagaaagtattattctgattaatcttaatagcaatcctttctcctttcttatatccacgttttcctctaccatgctgctgattgaaataaagaaaaagagatttccaagccaccttttctttcttttctccggtcaaagacaagagagactggtttagaagccagtcggcatctgcctgattattccagcgatcttcaaaccaaaaaccgtctcctttctcccatgtagcggcacccggtgcatgagtccataccacccgtcccggataaatacctttcgcctctcctaccggattattctttccccatgccatacggggttctctcaccggaagaacagtttgagctaacagttcagtactgttttctaccaacatcaaagttccgaaaaaacaaagacctgcaaatgcaaagactcctattgccattttccggttatgaaatgcttcacgcaacttacgcagactcacccaaactcccgtgaacgagagtaaatacatgacaaatgcagacatcagcggcgccgctgtctgcatacatggatagttggcacgggaaggcttcggaataacccgtaccagaaaccagatagtagaaaaaagaccgagtccccagaagaggaagattcgcatccccctggaggaaaattcctctttctcgatcttttctttaaaatataaatagatacgcttcatctttatttctgtatatcaatatctttactgcgaagtacttttacgttttctttatccgtaatgccttccttcactttcagatttttaatctcgccaccgatcacatcgtccagtactactgcataacgcccatctttctgctcagcactaatactacaattatctaacagaaagtctttcacatgacgcgcccagaaaccaaaagagggttgtattttcaaatcacctacattataacgtcctaccccgatttcaggcggatacgcttctgcatcttccaccggatgaccacctttcacaagtaaattcacatcatggaactgtacattattaatataccccgtatgctgaccattcggcaaacggaatgtcagtcctccttctacaacttccgtatccggcagtttgaaacctgcgatgatgggagttgccgtactttgagaaccatcgtatgccttccagcgctctccccggaaagaacttccaccataaacctcatcaatgtctactccacaaatcacaatattctccacctgcccgatatcagagttagttaccaacaattccttacgtacatttccattttccgtgaaagtaaaaggagcgacattggcacccagcacacggcctctattggatatagatatgaagaacggagcacgcgtacgatgcatcaccgagcgggaatgtatcgctcctgtctttccactattcaaataaacattttttatatgtccaccatcattggtagatatggagaaacctgctttattagcacctagtacataaatattatccacatataaatcctgaatatcatccgctgtttccgaacctatctggaacaggttacaattggtatctccaactatattgcgtaccatatagttacgtgccggacgggtaaaacctaatgaacaatccgaacctggtttcacaatgtcatccgaactgacacgcgagtaaatgttcgtcaccgttacgtcattgcacgccataaagtcgtagatatcacgagcattccgggtattatgtttggcaaagtaagtatcgtgcacatggatgccatcggtacctgtagccagcaaaacaaaatgacctccctgatctatatgcagcatattgctgacgtcataattcttctgcccatccgcatctatatagtaaggttcatccttttgcggatcataccacatatctttatctatgttccagcctccaatctcaatattggtacaaagtttcaaagaaaacattttgtcacagcgcttctcgggagcattattcattactttatcagaagtaaccagattaccattgcccgtgatacggcccgtacccacaattttcacattatcaatgcgttctccaaagaacattgcattacggaaaaatgtatgtccaacatcctgcttcgtcagatagttctccggatcagcataaggacgaggatcggtaggagaaagtcccgaacggtaagcccggtcactaaaccaagttgtttccggcgcatcaccacccggaagtccctgaatggtagcatctgcatccagatgtagccaaacattacttaatagatgaaccgtccgtacattataggtacctgccgtaaatcgcagaatacccccacccaacttactcatctctttaatagcttggtttatggtttccgtatcgtctgctattccatctccttttactcctgccgtcttaatatcctgcaaaccggaatagaaccaagctatatttgattctccttgattatcacctccttttacaagcagtttaaaagcatacagttgattaggattcagccgaccggcagcagcgaaatcatcgtccggcaatatcgctgttcttacaggtttccaggttcttcccttatcctcagacaataacaaagtcacagactccgcattacgaggagctgtccagtagaaagaagtgaaagataaatcccaattctttttatatgtaaatgcctgcaagggagtacgggtaaaatcggagacagtcgtcactccttcaaaagttgcagtagcaaccggactatgcagaacttccggttgagaggttatataatcagcctcaaatgtataattacctttttccggtattactactccgcgaaaacaaagacggatatcagagccgttagagggacggaaatccaaatctttaaagattaacagggtacctttcttcccatctttacgaatttccacatctccaacctttttataagaatagttagttccggttcttccgatagattgtttgtgcaaatcacgaagaatcacttctccacgacctattacatttaccgttgtattgtccaatgttacatcaatcccttccggcacacggatagtgacagtagtcatcgggctacgttgtccggcataaaaatcaagtgtcagacttcccgcagtctttatcgtgaatgcagtacggtccaactttatcacaggcggcaatgcccctttacatacccctaccagcaaacgtcttttagaagttgattgcagataatctccatgagccggaaaaccttctgttttctcctgtccggcagaagtaaaaagacgataaatgcccgaaccggaatgagccaattgctctttcagagcttcaactgacggtaaggtagaacttaatccctcattctcaggagtatctacagtatagcgataagtagagccttcgaataataataaagagtcacgagtcagctgccagggatacaattcccctgcctgaatgcttgctcctgccactcccagcaacagagacaaaagaaaagtttttgataatatagacctcatatccaatagtgtatttctcataaatcagcgattcgtatcgatatggttaacattttctttcaacgccttataccatgtcggaccgacagtaaagatacaggcatctatccgttctttttcctcttggttcaaaccgtcaggcatatcaaccggcttaaaaccttctctcacctgttcataagggacactcgaaagtgattttttatcagaaaatgcccactcattatccagaaacaagaaaccgggaaatacttcatccgcccttactattttcaaatcaggagtttgtcctgcaaagagattatgggcaaaacgaacatttcgaggcatcttttctccacggcctgatcccaactccaatgaactattcagaaaggtattataagcgatatccacattctctacccgatggtatgaagttaacggctccagtttcacatccgtttctgccgtaggacgttcatagactcctacacgtaccaacaatccgaatgaccttacatctttaatataattatcgtaaaccgtatgtccctggttaataatacgaataccggcggttccacgcagattatgtcctataaatgtattcgactctatcacattataatgcccatgacgacaaaccaatccaccggcggattcataaaacaagttcctgcgcaatacattatgacaggatttcacagaaataatctcattttctccactacatctgaaaaagacattatcctcgacaatcgtacgtgactccaattgggaagaccaggaatgcccgatacgaataatttctgctccattgccaccgtaaggctgacgttcaccaaagaaattatgatctatcaaatgattattcaagtggttatcagcactcagccacacctgcaacaccagtccgcctactcttttattagcaaagtaacaatggtctatccggttattagttccccgtaatccgacccaatattcatctccttcattcggtcgttcacctttctgaggatcgttgcactcatcaatcacacaacgagtcatccgacaaaaagaagcatacacacctttttctccttgaaaatcaatcatatcatgccctatggcccatgccttataaaagagcaagtcttccagttgcaaatactctccatatatcttcagccttaacttaccggaaataacagcctttccgggattctcagcccgccagacaatcggtttaccggaaacacccttaccggtaaaatgtatttcttccagattatgatacgctccgtctttcagtacgacggcatcccccggctgcaaatttccactacccagcaactgtttcattgctggaacatctttcggtgaaaatgtatactctttggcattagtaaagagtgatactgttaaaagcaaaagaacacaaagttttttcatcatgttttccgattagagtttaaaatcacagagcaaatatagatgattaaaatatgaacggaaatagcctcctcccctccggaagtagtttgagaagataattcaaaagaatggtacgtttttataaaccagaagtgcagatatataaaaatcgtccccttacattgtgattacaacgtaaggggacgaccctattctaaatcgaaattatttatttcttagccggagaagaatatcttgcattcaatccgtctacgatttcttttgtaatattatagatgctgtcagcatacaacaggttatcaaaaccggtattactgataatcatgctgtatccctttgtcttattatactctttcaggaaagcattgatagaatcacgcaattgcaagctgttcttttcgttttcgctcatcagctctgattgcaatttattgcccaaagcctgcaagtcttgttccagtttagcaatacggttgtattcctgctgtgctctttcctgagaaagatatgcattgttctgtactttagtctggaaatcctgtttctgtttttctaattcccgagctttctggtttattgtcaaacgaacattttcactcttctttaccataccttcattcaggtcgatgcagaaattatattgtgccagaagcgtgtctatttcaacataagcaatcttcattccagtaagttcacctgaagcttgtcctgacgtagttgccgtttgattatcagctttacctgtacactgagaaaataaaacgataagtgcaagggcagccaaaccgtttacgaggtagttcaatctcttcataacttgtaaaaaatatagtttttaaattattaattcatactatcatttaaggctttttccaattcgtcaatggagaaacggggtttcttctgtgcttcccggtcctgcgactgggcacacccaatacctctctcccgcattgctttattaccgctgacgtgcccgttcgggaactttccgcctttcacaaaaaagacttttacacctaataatgcaatgcaaatagcaactattaacaaacttatcaatactgtatcgagcatttctactatttttgtaatacgaaaatagactgcatttcagcaaaatgaaaataaaattttcttttgcattcaatttgctctatttttgtgggtgcaaatatagggctttgtatggactaacccactttttttaccataaaaaaagagaaacggtaataaaatagccaattgatttaaccatatttagcaataagaggttaaatacgaacattcataaaggaattaatatggaaaagaatgaactgaaaccggcaggcgtttttcattatttcgatgaaatctgccaagtgccgcgtccttcgaagaaggaagagaaaatgattgcttatctgaaagcattcggtgaaaaacataagttggaaacactggttgacgaagccggcaacgtcctcatcaaaaagcccgctacaccgggtatggagaaccgtaagaccgtagtgctgcaatctcacatcgacatggtgtgcgaaaagaacaacgatgtgcagcacgacttcctcaccgacccgatagaaaccgtaattgaaggggaatggctgaaagccaaaggtacaacgctgggagccgacaacggtatcggtgtagctacagaactggctatccttgcagacgacagcattcagcacggacctctggaatgtctgtttacggtagacgaagaaaccggactgacaggtgccttcgccctaaaagaaggtttcatgaacggtgatattctgttgaacctcgactcggaagatgaaggagaactctttatcggctgcgcaggaggtatagactccgttgcagagtttacatataaagaggtagacgtacctgccggatacttctgctgcaaggtgcaagtgaaaggattgaaaggcggacactccggtggagatatccatttgggactcggtaatgccaataagatattgaaccgtttccttagtcagactttccagaagtatgatatgtacttgtgtgaaatagacggtggtaatctgcgcaacgccattgcacgcgaagcacacgcagttatcgctataccggaagactacaagcatgacttgcgtgccgatctgaatatttttgcggctgaagtacaagctgagtatgccgtagtcgatccgggactacaactcatcttagaatcggaaaatacccgtacgaaagccatcgacaaagatactacgaagcgtctgctgcaaagcctctacgcttgtcctcacggggtgtatgctatgagccaggacattcccggactggtagaaacgtctacaaaccttgcatccgtcaagatgaagccgggcaacactatccgcatcgaaaccagccaacgcagttctaccgcctcatccaagcaagatatagccaatatggtacgtaccgtattcgatatgggcggtgccaaagttaccttcggtgacggctatccgggttggaaacctaatccacactctgaaatactggaaatcgctgtcgagtcatacaaacgcttattcggtgtagatgccaaggtgaaagctatccatgccggactggaatgcggtctgttcctcgataagtacccggcactggatatgatttcctttggtcctactttgcagggtgtgcactctcccgatgagcggatgctgattcctacggtagataagttctggaaacacctgctggatatcctggctaatgttcccgtaaagaaataactcacatcccttattcctcttatacgaatggttaaaggggagtatgtaaaagatggcatcttttgatgtaaaagatgccatctttcgtaacataagatgccacctttcgctgcaaaagatggcatcttttgcataatagcctatagagatgtaattcctttcaatataccatcgtctcatcaaggtagtaagataaaagcgaaagatataataaagcgacagaaataccgttatttagtaaaacctacagaacgtacggtatgaaatcgaaagcactataccttatatatatatttccggtacttttcctgttgtcccttgccgcctgcgacgacatggatgattattcgtccgatccaaagcatacactttggttctcacaggacacgctgcgtatggacaccgtactcaccggtattcccacttccacccgccaactgaaagtttacaatccacataagaaggcattgctgatatcttccattattcttgccgatgccggcaaatccggtttccgtatcaatgtggatggcattaggggagatcaattctccgacatagaaattgcaggagaagatagcctctacatttttgtagaagcgactctgcctcagcaggacaatgccgacattaggttgataaaagactctattctctttcaactgaatggcatccggcaagaagttaagctacgggcgtatgcacaagatgcttttactttccgggggaaagtgatcgagaaagatacattgatagcctcccaacggccgatattgatttatgacagtatcagtgtggctccagatgcgcacttaacgctggcagcaggtacccgcctgtatttccatggcaaggctggaatgcaggtacacggacgcttatcagtggcaggcagcctatccgccccggtcgttttccggggagatcgcaccgaccgtatgttcccttatcttccttacgaccggttaccgggacaatggggcggcatacgattctacaagaccagttacgagaatcatcttgtttatgcagacattcatggaggaagtttcggtatccgctgtgactcttcgatgacagaccgcaggaaactgacattggagtcttctatcatacggcagatatcaggcaatggactggagctaacatcttgccaggcggtggtaggaaatagcgaaatcagtaatgcgggagagaattgcgtcagtttgttagggggagattatacattcactcactgtacgctggctaattatttcagttggaacgtacggaaaggaacggcattgcaagtccggaatgaacaggatgacatagcctatccgctttcatcagctatcttccgcaactgtatcattgcaggttcgggtacggatgaaatcaacggaggacgctccaagaatgagaatatagctttcaattattacttctcccactgcctcatcaactcagtgaaagaagaaaatgacaagatagtcaatgtgatttgggagaaagacgataacttcttgctgatggatagccgtacgcaggaatacagttttagcctcaatgaaaagtctaaagctatcaatttaggaaagcaagaagatgctatcgcttatccgacagacagaaacgggaactcccgactacaagatacagcaccggatgcgggatgctatgaaaaatcggcttcaaaagatgaataataattgctataccttaaaatggcatctcctcttcttgctgttcttccctttttttaccctctacggacaaacgaagaaagatactctctcttttcgcgttgtcagctataatgttgaaaacttgttcgattgccgccacgatacgctaaagaatgattacgagtttctacccgatgcgatgcgccactggaattatacgaaatataagaagaaactggatgccatagcccgcacgatcacagccgtaggtggttggactccgcctgcactcgtagccctttgcgaagtagaaaacgacagcgcactgcgcgacttgacccggcgttcggttcttaaggaagccggataccgctatgtaatgaccaactcacctgaccaacgcggaattgatgtggcactgctttatcaaagagatcaattcaagttgatttcccatcagggtattcccatacctcacagatccggcaaaaagaaattccgccctacacgggatatactgcacgtctgcggaatgttgctgaacagcgataccctggacatctttgttgtacatcttccatcccgttcaggaggtgcaaaggagagtgagccctatcgtctatttgctgccggacaactgaaagccgcagtagacagtatctattactatcggcatcatccgcaaattcttatcatgggagacttcaatgattatcccgataatgcatccgtcaacaaaatactctcagcagaagcaccatctcagaacggtgacagcctgcaaccgcaaaagctctatcatttacttgcccgcaagagcgcaattcgaaagcacttcggcagttacaaatatcagggtgaatggggattactggatcatatcatcgtgtccggcactcttcttcaaccggatacggatttctgcaccgccgaggataaggctgatgtatttcattcttcgttcctattgacggaagataaaaagtatggcggtgtacagccattccgcacttactacggaatgaagtatcaaggtggctacagcgatcacctcccagtatgggcggatttccggctcatttattaatccgaatactgatacaatttcaaatcaaacttctgtaccatcaccagcaaatgatcgaatatatcggactgaatacgttcgtattccttccataccttgtttcgggaaaagaagtaaacttgaatgggaactccataagtggtcatttccttctggctgataatcaagtccaaatcctggttcacgacaggaaggctgcaaagataacgttcgatgtaaatacggtagagttgtgcattggtaggtacctcgccttctgccggctgatagtctgccatcaaaggaacttccttacggatggtatccaacatttcgggagtgcaaaacttcagggtcgtcatgtccagatagatattcttatccacacgccggccaccactctcctgcataccgcgccagttctggaaagagccgttcaccaaggtataaggcggaatggtagaaatcgtattatcccagttctgtatctttacggtgttgagggttatctctttcacaataccgttggcggagccattgggtaaggcaatccagtcgccgatacgcaacatctcgttggcagaaagttgtactccagccacaaagcccagaatactatccttgaataccaacattaatactgccgccgaagcacccagcccggcaaagagggttgcgggagatttatctataagaatagaaatggcaatgatagctgccacaaagaataacaatacctgtaatacctgaacaaagcctttcatcggatgattcttactgttgtccttctgattatgaaaatccagaaaaacgagcagtagcccattcagcgcaaaggctaaagcagccactatatacacggcacaaactttctgcgacaactccaacagttctactccgtgtacaaaggtatgaggcaacaggaagtaaatcagaattcccggtaaggtatgtatcagatgaggaaccactttccgcttcatcagcaaagtattccagcgatggggtgaacgattggtataatgcttcattccccctaccaatattgcctgaaacaaatagtccagccctacagctacggcaatgattaatatggcgatgatagtttcatcaaatgtattcgcaaatttagggtctactccccaccctataagggttttattcatccaccctcctaatgtcgtcatatatttctccgattttaattgcttatgggaataataacaaataaaggggagctgttgtttaataaaacttttttccggcttcatcttctacttttccggtttcagtaaaaaagtcccggtatatctgtctggaacaaattattttcgcccccggattaaacaaaaaaagtatgaaccgaaatgtaaaacttatcagtattctcagcctcggactaatgttgggggcctgtggtggtaattcgtcttcacaagaagaaactatcattgtaaagactgctacagcgagtacctacagcaacgaaacagccaaagaattccccattatcacccaaccgttccgcaccacagaactgtccttccgcgtcagcggccccatcgaccggctggatgtctatgccggaaactattaccgccgcggagatattattgcagaaatcgatccacgagactaccgcatccggcgtgaacgtgctgaagccgtctatcgccaggcaaaggcagagtatgaacgtatcagtgcgctttatcagaaaaacaacctttctgccagtacttatgagaaagcacgtgcggaatatacttccgccaaagctgctttcgacactgccgtcaatgaactggaagatacccgccttgtagcccccttcaacggatatgtaggtgaagtctacgtagagaaattccaggatgtcaaggccagccagcccgtattgacatttatcgatataaaccaactgaaaattgaagcttatgtaacgcaagatatagcctatcgtgttcaaccaaggcagaacgtgctattgacgctggatgtgcagcccgacacagagctggaagcacagattgcagaagtatccaaaggaaccacacaaaacaatctctcttatctggtaacggcattgttgcccaataaagaagcccggttactggcaggtatgtccggaaagatacgtttcgaagaaagtacttcggaattatcggacagtaccgccaccggcgaacatttggtttgtattccgcaaacagccttgtgcaatcgccccacagtgggaagttatgtatggacggtacatcctgaaagcgggatagtcagccaacgtaaagttagtgtcagcaaactgctgccgcacggcaatgcaggcatcactgccggactgcaacccggtgaaatagtggctacaagcagtctgcgtttcttatcagacggaatgaaagtaaaaatccaatgaaacagcaagtatcatgaaactaatcaaatattttctgcaacgccgctctgtcactattctactgctggtactggtacttgccggcggactattctcgtacgtcaaaatgggaaagctggaggatgctcctttcaccattaaacaagcactggtactgacttcttaccccggcgcatctccttcggaagtacaaagccaggtgacagatgtattggaagaagccatccagtcattgggcgaactttattacctgaaaaccgagaaccgtgccgggctttccaaaatcactgtatatgtaaagaaagagacacgggcagatgagatgcagcaactttgggataaactacgccgtaaggtaggtgatgcgcagagcaaacttcccgcaggggccggaccttcggttgtgaatgatgacttcggtgatgtgttgggcgtcttctacggactaacaagcgaaggacgcagttaccgggaactggaagatcaggccaaacttatcaaaaatgaattgttaaaggtaaaggatgtcgcacgtatcgaaatctatggaacgcaaacacctacaattgaggtagtggtcagtcccgccgttatgtctcgcagcggcattacgacagcggacatagccaatgcattcaatgcccaaaacaaggtagtggatgcaggtggaatcacagcaggtacaggacgcatccgaatcgaatccaccggtaacttctattctttggatgagatacggcaactcaccatcgtttcacgtagtggggaacacttccgactgggagatattgccgacatcaacgaaaattaccaaacacctgccagcaacttgatgcgcatagacggaaaaccggctgtgggtattgccatttccaccgtacctaccggtaatgtggtagatatggctgaagctatcgaagcacgcatcgaagaactaaaatctgatatgccggaaggtttcggcctcgtctctatctacgatcaggggcatgagtctgccatagccaaccaaggttttatcatcaatctgatagtttccgtaattaccgtagtggctatcctgcttttcttcatcggtttcaaaaatggtttgctgataggtagcggacttgtattctccatatttgctactctgattgtgatgttggcaggaggaattgctttgcaacgcatgtcactggcagccattattattgccatgggaatgttggtagataatgccattgtagtatccgactctgcactggtaaatatgcaacggggaatgcggaaacgggtatccatcatgaaagcatgttccggaactgccctccccttgttggctgccacggtcatagcgatactgacattcctgcctatctactattcaccacatatcaccggagaattattatcctctctagttattgtcatcggtatatcgctcatgttcagctgggtatttgcactgacacaaaccccgttcttcattcaagaattcgtacgccgcccgcgcccctcggaattgagtgaaaccctcttttccggcaaggcttacgaccgcttccggagcacattacatttcgtcattcgccatcgttatgccacagtggggttgatggttgtattgcttgtcgtttccgcctggagtttcaagtttatcccgaaagtctttgtacctgctctggagaaaccctactttacattggatgtatggctacccgaaggaaccgacatcgctgaaaccgaccgcacggcctcagaaatggctgactatatccgcaaccaggaagaaacagaaatgatttcaacttatgtaggacgtacaccacccagatattatctgtctaatgtatctttcggcccgcaacccaactatgctcagttattggtaaaggcacgttcctccaaagaaaccaaagcgttgcgcaccagactgcaagactctatccgtacgcttttcccgggtccactcatcaaagtgaataaattcgaactgagtccgctaacggaagctgttatcgaagcacgcttcctgggtcccgatcctgccgtactcgattcactggcaggtatggctatcgagattatgcgccgcaacccgaaagtagcggatgcccgcgtgataatgagaaaaaggtccctgtacaattgaaatccgcaggtaccgatatcacagatgcacagggactgggagacttttctgtatggaacgggcagaattccgccccattatcacaagtcaccgaagatattgaagtaagctgggaatggccacagatacgtacttataaccgacaactatccatggccgccatgtgtggggtaaaagccgggcacactatggcagaagtacatggtgaaatccgtcaggaaatagaatccattcaacttcctgaaggatacaccttcttctgggatgcccaatataaggatcagcgcgaagccatgcaagccatagcaaaattcttcccattggcatttctggcattaatagtcatacttgtagccctgttcggtaacttccgtgacccgctaatcatcctatgtgtattgccgttatctcttatcggtgtcgccgtaggtatgctgatgaccggtttcgaattcggtttctttcctattgccggttggctgggattactgggaatgattatcaaaaatgtaattgtactgctggatgagatacaggtacaacgccgggcggaagtaccggtctatactgccattatcgaatctaccgtgtcgcgtacccgacctgtactgatggctgccaccaccactattctgggtatggttcccctattgttcgatgtggccttcggtggtatggcggctactattatcttcggattgacattcgcaacgctactgactctgttcgtcactccggcactctattcattgttttataaagtaaaagaaaaatagattatgaagaaaatatatatcctttttattctatcgttgtgtgatccgttcgcttttggccagcagagtgcgatgctggagaagtacaggtcgatggctcttgaatatagccacgacctgaaagcggcggagaaaaatctggctgccagcattgaactggagaaatccgcccgtgcagacctgaaacccaaactctccggtgatgcaaactttcagtataccggaaatcccttagagattaatctgaacctccccggtatggataacccgctacagatacaaggacgtgataccaaatatggtgcttcccttaccctattacaacctatatatacaggtggacgcttacttgaaagtatccgcatggcacagcatcaacacgctcttgcttcgcaccagaaagaacaacttttatccgaggtctgttttcagacggatattcaatactggaataccgtcgcccgccaggaaattgtgggtatcgtcgcagattaccggaattctatagctgcgctgactcaaacaatccgtgaacgggtggagatctcactcgtcaatccccaggatttgctaatggccgaggtgaaattaaacgatgccgaatttcagttactccaggcacaaaagaacttcgataccggacttatggccttcaattccctcatcggattacctctggaagagcctacacctatagatacgatcattccacaagtggacacttcggacagttcacgactgacacttgcgatcccacgccctgaaatcaagatagcgcatgaccagattaaaatggcggaaagttcattaaagttgaatgactcaaaatacaagcctcaactatacgtaggagtagacggaagttattcttctccgggctatgacctgcgtgccgatctggaccctaactatgctgtatatgccaaagtcagtgtccctctgttcgaatggggaaaacgacgaaatgagaagcgggcttccaaccaaaagatcggtatggcaaaagacaatctgaatcagattcaggacaaagtcaacttggaaatacagacggcccgcctctctttgtcacaggcactggatcaggtacaactaagtcagcaatcgctggaaaaagcccatgagaatgaacgtcaggctatggaacgctataatgaaggcgaaatatccattgtagaggtaatagaggcacagacttaccggcaaaatgctgaaataaatcatgtacaagccaaagcttccgcacaaggacagtattcggcattaataaaagcattaaaccaatataaatgataagtggaaattcgtaactttgcctttatgaagtggaacactcttttatacagcctactcttttcaggattgggaattttctcattcctgttgttggccaattataccaaccttactccgcaggttacgaataccatccacactcccggtgcatttgtttttgttgttgccactttcaatatattgggatactgtactctccgcataagttcgtggatgaaccgtctatactccaacaatttacgttggaagtggaaattcatagcggtatatataggtgttatgctattgtttctgctgttgaactacggtctgttggtggctgccaaactgatgggcagagcggaaaatccatttactttccagatagggggaatacgtattctattagtagtgtggttggtggagcttgtaatcctgggattattgcttgccaaccgctccataaagaatgccctccggctgcaacaaaaagcagcgcaactacagaaagagaataatgcggcccgatatactgcccttcaaaatcagctgaacccccactttctttttaatagtctgaacacgctgatagctgagatagaatataatccgtcaaatgccgtacgcttcacccggaatctctctgatgtatatcgctatgtacttcaatcgcaagataaaaccctgatcacattaggcgaagaattagaattcattcaatcctaccttttcctgcacgaagtcagattaggcaactgcatcgcttgcaacatcacaataccaaccgaagctatggagtatcagcttcctccgctaaccctgcaactattagtggagaatgtcattaaacacaattcaattaacagcaataaaccgatggatatcacgatacaaattgtcgaccactttctggttgtcagtaatccgatacatgccaaaaagagcgataccacttcaggtgtagggctacagaatctatcaaaccgttgcaagctaatgataggtactgacattattatcaataatgaaaatcagatattcaccgtaaaagttcccttaatctatgagtaaactaactgctgccattatagaagacgaagtacccgctgcccgtctcctatcttccatcatcacacgtctgcgtcccgactgggaggttaccgtactacccggaagtgtggaagaagccattgtttggttcaggacacattctcatccggatattctgtttctggatattcagttatcggacggtaattcatttgacttcctatctgccgcacaaccttcttcattgatcattttcacaacggcctatgatcaatatgccattcgtgccttcaccgtgaacagcatagactatatacttaaaccggtagatgagaaacgtttgctggatgctatcgtaaagtatgaaactctgaaaggaaaagactataaacaagaaaattacataggagatttaattcagagcctgcaaaaacaggaaaaaagctaccgcacccgctttcttattgccggagtggataaattctgggctttgcaagtcagtgacattgcctatttctattcagaaaataaaatcacctttgccgtcacaaaaagcggacaggagcatattatagacctgtctctcacccgacttgaagagcaattggatcccagacgttttttccgcgccaatcgccaggtaatagtttgtattgatgccattgtgcatgctgcaccttattttaatggaagaataatacttcacgtaaaaccgattcataaggataagattactgtcagcgaagaaaaagtatcctctttcaagatgtggctgaacttttaacaccatatacagtctttattccaaaaaattatcatatatttgaaaacatgtttataatatagactaactaaagactgaaagatatgacacaaattaaagaatttctaagaagggggctattcacagttatagtactttgcagtactgcagcatgcagtaataatgatgaaaatgaagataccaattacacattggatggcatacaatgggctatgcttaatgatgataaagttgaagaaacagtcataaatataatgccggaaatttatgaaaatgcgagttcatctacaataagcgttacaatcgacccggcaatggattatgaacaactctctcaattttattatgatgattcaattttttttcaacctttaaaccaaacacccaatgaggtgaatgttcttacgggtgaattagtttttaatgatttccgttatgtctccgaaggaccagtagtaccctttacccttgaagagtatgcttatcctcccgacaatcatattgaggagactttaacgattcctccgtaccacactttatactataacgccactgttatcaaacgcgaggtgactgcgacatatcgggcttatttcattggaaataactctaatgaacgaattgaaataacaggaaaatggaaaggaactttttacagaaatgataaaagcttaataagacttgaaaaaatggaataaacagtccctattcgggaataatcaacaaatactcctgacaatcattttattatccttcgcaccactttctccagtaatgaaccggataaagtggcgcgaaataatatattacaattctaatatccttcattttgcgacatacttggattcacaaaaatctcgcgcatgggaacaggaaacacctgtctccaaatcggtatattcaaagtactcactgcaatattattacgctttaggaaagcaaaataagtacctgtccctcttaattctgattgccatacattagccaaacgattaatgaactcatcagaagtacgagtggtaaaagctgaagaagacagcgatgcatttgaagaataagccggagatcctatattggctgtcatcacctgattcaaataattctcagcctgcgcagaattccctaaacgagattcacattcagccagattaagcagtacttctgtatagctaaaacaaatatccgatacctgttcaaactgaacattgcgattcgtaccggaagcggataattgatagattaaatctcccaattgatatctgccactgtttacaattccagtcaacatagatttagcctcagcgatttttccctgttccatataaatacgagccaataataaagaagggaagtcacgggaagggaagaaaaaatcattcatcaccgactgtccatttatctctcccggcaagcgttcacgtaagaacagcaatggttctacaaaaagctttaatacttcagcctgtgatattacaggtatacttgttactatttctgatcgatactcaggaaaatatacagcttttccccataaattaactttctcataaaataatataaaacgctgcatatccagcaatttcgttatagttatactatccgaagaagtcaactcttccttgctcgaacgtggtatttgctgattcatgaatagaatcatatttacagcactataaaaggcactccatgcattttccacctctctactatttgagttcaatgtatgatttataaaatcgaaatgccattcataaccttgttccttttctgactgccgggaatagagttcctcttgcgtatacatttgttgcaaaaccagataagaattcttataaagccctgcaaatgtttgttcgccgtattgagtcagacacaaacgtactacctttgtcagatcagtttcttgcttgattatcagtttcgcttctttgttctcatgctctccataaatggtgattgtagcagaacttgcttccgcactaactgccggttctacctttatttccagatactggccatcgtcagataaggttgcctgataaggaatccgaggtttgttttcatacataaacaaaggctccttaaagtaagtatctacagaaacatcataaatagggtcattctccttgccttccggccacaaaagattccacttcgtcatcttcaccggtacattggcatctactttgatacgataggttccacctgccataggtatatccaagcttgtctgttctaacttcacggctgtaggttttcctgcttgccagattttcaaggtatcacattcctggccattcttactctttatcaacacccttcctcgacggggagcaaacccgtcattcttggcagctttcagatagattttgcgaagttgcaatccacgagccgcggtactttctgtaatccactggcaggtatccgccggatgtatttctacatcgacattggcatttacgtctatacccataattgtatcattaggagtcttcagttcgatattcttattatcaatcactactgcatctttctgtgcttgtatcacagtcagtgtgtcagcaatcgcagtattatctttattatagaaaataattttggcgcggcgactctcattcgcatcattgggactgattgtataataaatggtgtgactggacattccccgactcattgtggcctctttaatccaactcacatccggcatagttataccatactcacaattgctacgtaactctaccttaatcgtctctcccttgtcaccaacaggatattcattctcattcaacaatattacatcacctccatactgataaacttttacggtttcggtcaaagtaccatcagtgatatatatttctccttcacgtttctctctttccccattcatctctatcttgaagctgatagtagaggctttcaatcctcgagtagtagtagaagctgcggattttatccaactctgacaatcatctgcaataatagctttatactccacattagcttccacttccacatcaattgttccaccttcctgcttcacttccctacgttcacttgatatcagcaaagcatttttttgcttttgcgcaaccatcaatgttttcttagttttaccggcattaatagtaatagcaacgctacgttcatcataactatcattatcctcaacactgatagaaatttctgcctttccgggacctccactagtgggataaacttgataccacttttcaccattccgagtggttgcagcggttatgttccagttttctgtagccgtaaactccaaagactgagtacccgcagatgttgtgaaattcacacctttctcaaacagggtttctgtttcaggtggcaaggtaattgtagtttcatcttctactttatcatcactacaagcaaccaataacatcaggcacgcaagtagatgccatgtgtttttcataaacgattttactttcatatattattgtttcattaatgatcaagatttcaaggttttattcttcgctcttcctcctgctccggttctcttcaatgcagaggacaaagatataaagacttccatgaaataaggttaaaagggggtagaaaacatattttgacacccatttattcatctattgcatggctttctcctgtttcatagcctgatagagttgcacgaagcacctgtatcatatcctgtcggaatgattccggtgaaagtatcgccaatttatcccgataccaaagtaattcttgctttagatcatacgtaggtcgcacgaacatttcaaaatccgtataatcttccgtatggttcacttctatttgggatgcgtggagcggaacatcttttagataagcatcttggggccaaaatgcacgaaaacgaatagttattggctcaaactgtcgtataattccaaaacaatgttcaaaataaacttccggcttcaagattgcccgcaatttaggggagaatttcaccttactctcttccaacaattctatttctttcacccgttccagtgcgcaagtcatggtgcgctccttgcctctaacttcgcctatcacataccatcgttgtttgaacaggcgaacaaaagcgggcaacagaatgatttctttctcatcctgataatgtgatttatacactatcctaagcagtcgcttcccgtcgatagcctccatcacatcctgtaaaagattggcagccggtggtgcaggttctatcatcacttcctcccgttgattcacacgttcagcaagactcgatacacgaaaagcacttaaaagccactgctgcaactcgtcatttttaaaaccatccggtcgaataattttatataaattcccgtcacgtttatcacatttgatgtctacgtacatcaatgattccgcttcccgccggtaacggttgaaagtccgctccgccaacgggtctccatcctcattagccgatgcattcaaccattttttctgtatctcaggcaaagttagcggctggatactcaaggtatcaatcaaccacaaacaaaatttatatttgaatatcattattcatcctccttaccgaaaagaaagtcacatatcgaattactcaacattctactgaccttcactattatttttataaatacaattaaataaaccaagagaatcacattggtatgccactgcaattcaaatatactgggtgcatcaggatcaagcaataccgcaataaaaaatgcacttccaaacatgaaagttgataagccacttgttatcaataagaacacaatagttgttagacagcctctcatagtccttatcttatttaataatgaaataaacaagtttacccagaacccacgaggtaaaaagtaaagctatcaaccccactatgacgcacaaagttactgccagaaagttagtaatatgccatgcctcacgtatttctcctgccacaatgagaagaaacataattacgaacggcgaaggcaacaggcaaagtatgatagacacccactcggctacacctttctttgtcatcactttccctcctttctttttcgttcttcttctctcctatcctcttctgccagttcttctttactttccctgacaccttcccaaaaacttttggaaagcaataaccatccaaggatatagccaatgacagcaagaatccattcgttccatccgaaagcagtggcaaaagccgcaccaacaatagctccgatgcctccgttaatgaggctcttaatcaaacctttaattgtctccataactaaacgattttaatgtttatattccgtttgttttatggaggcaaagttagggggaggttcggccaagggcagtcggcatctcacttatttttcaaaatcttattatctattgtttctagcaaatatctattcatccatttctccttttcagctttcaactcattaaccgtctgtcgcaattcagtaaccaacaagccaaatcgtcgaccctccccttcctttttccaaactctcctttcttccgaagtcattaaatccttcttacgcaactcgctcaccaagcgtttgttttctctctgtaaccaatctattttttccatcagttcttctatattacgttgctgtcgatgtaaacaaactttgtctggaatatagggactcaaattgttatcatccgtcacataatccatcatccatgtcactccacgcatgaatgcatccatttctttctgtgaagggtcgaattcctttatgtaatcttggagaaggtgttctctcgctttagataaatcgttcatttaaatatgttattgattcatttcacttaacatttttgaaacatatccatcatggcgaaaccacttatgagcccagttaggcaccataaatatatatcctgaaccatcctcatgaggagcacaatccaattgatttcctatagcaagtccggcttcctccttggatattccgcagcaacgtcccagctcctcacgcagcaagtcataggtgacagcccgtatcatagcggctgtaactcgatgttcctttaccgcttgagctgttttgggattcttcagcaatatctgtttcatttctgatgtagatggcgttctgactaccggccccactcttaatccccaaaagcagtactcaccttcgactttgaacatacagaaacctccctgagaattacgagaattacactcttcagcatagtgcttcaattgagaattcgttatgttcctcattaattcaggaatgataggttgatgacgtagctgaccgtaagtatagcgttcgccattaataccaccactgccggaagggatatcagagtcactgacaatgcaagtttcagtatcaagcttttccaatgataaaggataatcaggatacttcatcttaaatctaacttgttcttcaatcattcggttcataacatctaacactaaatcttccaacatccacccaaactaaacaatcaaccaaaatattccccaaagaacaaatgccactaatggtatccaaatgtccaaccaatacatttccatcttagtacgcgcaagaattatcaacaaaacccacaaaatagcaagccctatccaattagaagagaaaaaagcgacatacgattgcataaaatctaccatattaaattatttataaaattaaaaacttcatttttcttttgaataaatcccatatatacttctaccctattctatccaccttcaaatatcccgaattcaatactcccattttcttcaagtcaaccccaaaagctgatttgaagatattattcacttgttccgctgtgggttgatgagttataggtggatacatggaagctatttcaatactcatgcccggttctataaccatacctgccgaacgggcggagattttcactgtaattcgataacgtgccataaattcctattattagactattcaattaaaaatccaaattcaatacttcatcctcattatccagagccttggtaaactcagcaaaactctccaacggattttgagaaactatagaactaatacctttcaaagaaataataatcagttctctgtcatcagaagccagtgcttggtccaatgttttatagtgagccatcaatgccgtactacgttctgcaaaaatctgtgtcagcacatcacggcataactcataacgctgcgttatcttttgaatttgcacagcattctgaagttccaacttcttaatttctttactcaacctattattctccgcccatatatccgtagcccgattcactatttcaggattattccgaacataggtggataacgaacccgcagttcgcaacacagcatcttttgctcccatttttattacacttttgattgattaactttattatattcactgctcaccagaataagatgctgcaagtccttacggaaatcagtagtcttaaacagttcttggtttttctttatgccagttaaatacttccagaacgttggctcaccgaatatctgtttacgcaatggttcatacgcacaaacaaacgctttattgcactgggtcaatgccaccagtacctctgattgacgcaataaggctgcctgataattctgaatagccggtatagctttctttatatattccagagcctcgtttatctgttgctgcacctctctgcgagcctctttggtctgtgaatataaatcaataatattagcaattccgttaatggcgatggacaacccagcctcgacacctgctgctataaaatctcctttagataaattgccttctttttctaaccgattacctaaattctgaagtgtagaatccatatccattcctacagatgataagaaattatccccattaaattgtatatctgacgcacggaagtccacaccggcagtcatattatcaggtacctctatgagtttgaactcgtcaaccaaaagtttttgctgctcggatgatatcttcgtttttataatacctatcaactctttcgacaaatagaggtttcggtatgcagccactcgggatttttgcaaataatcataaagttcatcgttatacatttctgtttcactgatgtccctacccaaatcatcacaacaacttcctaacaagcgcagacgatccatttctttttccaatttagatgaattacctagggtcgcaatacttttaaaaaagcgttttacacctccccacaaactacgatctttatccggatcttcaataatgtaatcttctttgacgtatttattaatatcttccaattcttgagtcaacgacttgatatgggcagacaacctatgatagaatcgatccgcctgaacgctctttccactcagtatcttgtcgttctcatggtgttggcgaaagtagcgggcattgtaaacataagtccagtaaggtataaatattaatccaccgaggacattcataaagaataagtaacgagctatttcaaatgaatagtttagaaaataagagttaggcattgaccagctccaagtgggcatataaaaagagaacagacttggagtatcgtaaaaatacatgattgccgtataattgaatataaacaccaaaagaaccattataaaagagaaccatttccaaacagaagccagcgtattattgtgtttattccataaaaagaaaatatgccctccccacaaaccagaataaagccaaactaaatagactttccacttagacaatggcttggcacgatccaagttctcttccgactctacattggtcgctaccaaagtgatgattacatatgctatgaataccgctccaaaccaatatttcccaaagaagcttttataatcatactgtataacgttttctcgtgcttcctgaaaagtaacatcagatatccgattttccttttgcagattttcgagcatactaattgttttttccgctttctcgcttagtactttatcggccgatgaacaagaacaaagcaacaggagcaatactcctaataaatacatgtttttcatatttacaaac

SEQ ID NO: 6295 - DNA, 8372 bp, Unknown
  gut microbiota DNA sequence
tctgatgttcagatgaaggaagcggtagaaaaattcaaaggcatccttactgctgaaggtgctgagattgtaaatgaagaaaactggggactgaagaagctggcatatcctatccagaagaagtcaaccggtttctatcagctgattgagttcaatgcagaacctactgtcattgagaaattggaaataaacttccgtcgtgatgagcgcgttatccgtttcttgactttcaagcaagacaagtacgctgctgaatatgctgcgaagagaagaagtgttaaatcaactaaaaaggaggattaatcatggcacaacaagttcaatcagaaatcagatatttaactccgccctcagtagacgttaagaagaaaaaatactgccgtttcaaaaagagcggtattaagtacatcgactacaaagatcccgaattcttgaagaaattcttgaatgagcaaggtaaaatccttccgcgtcgtattaccggtacttctttgaagttccaacgtcgtgtagctcaagctgtgaagagagcacgtcacttggcgttgctgccctatgtaactgacatgatgaaataataggaggaggaaagtatggaaattatattgaaagaagacattgtaaacttgggttataagaacgacatcgtaactgttaagtccggttatggtcgtaactacctcatcccgacaggtaaagctgtgattgcttctcctgctgcaaagaaaatgttggctgaagatttgaagcaacgtgctcacaaattggaaaaaatcaagaaggatgctgaagcattggcagctaaattggaaggcgtatctttgaagatcgctactaaagttagctcaaccggtactatcttcggttctgttggtaacatccagattgcagaagaattggctaagttaggtcatgaaattgaccgtaagatcatcgttgtaaaagacgctgtgaaagaagttggccagtacaaagctatcgttaagctgcacaaggaagtttctgtagagattcctttcgaagttgttgctgaagaagcataattaaacttcatatataaaagaagcccggtttccgaaaggaagccggacttttttattgctggttagttctaattgtattctttatcaataaaagtaattgtttcatcaattagtttcatgtagtggctgtatgtgagatgtgggtcatcatgtataaaagagatttgccgcatggcagcaaacccttccgggaggaggatggtgaattccaagatttctcttagtgacttattttcattagaaatttttctaaattcttgctgactgacgcatttctctaccgctgtctcttttgctttggagaatccttcataaaaaagatgtgcattttttattacggcataggcttggatgatttcgacagcaagctctttatttttaatattttgcatgacagaagaagctctgagcatttccatagcatcggtgaccggaagaaaatcttgtgattggaatgggaaatagccgtagtaattcagagagtcggaggatgcttcattcattttgtctttatattgaagcaggtagcatgcaccttctttgttgattttttcgattttcatcatctcttctattgtttcccggttgataagtaattcacttttgaccagttgcagagcctgtgccacctcttttttcttattgtgctcctgaatcatatcacttcccacgaatgtgattgcaatacccagtacgactgcaatgaaattgcagatgaaatcacctaatcttcccttgatagctgatcgcttaattttttctatcagttttgtattcataatattagcataatatgtagattagcaaagataaggattttcagaactaatcaaataggaaaagtgatgaatcactgaagtatctttgggatggtacaaatgggtataaaaaaagtctgttcgtgctttcgcacgtcagactttcaattctctcagtgtgttgttctgaattattcagctacaactgctgcgctatctactgctacagtatcagctgctgcggctgcctcagctgctgctgcggctgcttcttctactgctgcgattgaatcagcaatacggatagaatctgctgctgctttttcagcgtcagcttgtttgttaccacaagatgcgaaagatactgctacgatagctacggccatcaaaactaattttttcattttctttgctttttaaaaacgtaatacaatcaattgctttattaaaacgctgcaaaggtatgtactttttcaatatgttgttctccaaatcccaactatttttatgttttttttggaggttagccccttttgattactttttgtatgtttaataacatactaatcttctgcaatactgttatataagtagcgtttgatgctccttttaggagttttctcaaactcggtaggatagagctgaatctggctgactttctcgtaactggccacactgctattcaggttcttcaagttctcgttcatgatggttttgaggttttcctcttggttcagtccaagggaatccaaagcttcgtaatctgcatagactaaagctaccagttttttattgcgttcgataacgagactttccagtacgaaaggcaggttgttgagacgtgcttcgatttcttcggggaagatgttttgtccgctggaactcaggatcatggtcttactgcggccacgaatatagaggtttcctttttcatccagtttacctaagtcaccggtacgtagccagccgtcttcggtgaagacttctttagtggcttccggatttttataataacctgtcattacattttcgccgcgtacctggatttcgccgatttctgcctccggattttctttgtagatacgggcttccatgatgtcgagcactcgcccggaagaagtcgggatgaattcgttccagggagcgtaactgattaacggcgcacactccgtcatgccataaccgatggtgaacgggaacttgatgcgatggaagaattcttccacttccgggttcatggcagcaccgccgataatgacttctttgaaacggccgcccaaagcatctatcagtttcttccggatttgcccatagatttgtccgtcgagcaaaggaatgctgagcgcccatttcatagtctttttatttatgataggttgaatgacattcttatagattttctcgataacgagtggcacggtaataatcaagctgggttttacctcttcgaaggccttcatcagaatctttggagaggggactttgcccaaaagtgtgacgtgagtacccacggcagtagctgtaagaaagtcgaaagcgcaaccgtaggcatgagccaagggtaagaaggatagtactttatctccctttttcaacaactcggtgcggataccgaaagtgacatttcctgcgagattgtttcctgtcagcatcacgcccttactgaaaccggtggtgcccgaggtatagttcagcagcattaccttatcattggaaagagtggtatactgcacgtcttcccgatggaaacctttcggataagttatgtgcatttcttcatccaggtgtttgaggaaacgattgattgtttcaccgtcgcgctgatgcaggcaacggaaatcggaaagggagaatacggcacgcaatccggccaggcgttcttcttccagatgttcccagatggaatcgctcgtaaagaggaaaacagactcggagtggttgacgatatgatgtacatcattcggattaaaatcttgaagaatgggaacaacgatagctccgtaagtgatggtggccatataagcgatgcaccaacgggcattgttcttaccgataatagcaattttgtcgccccggcgcaagctgcaatgtttgaatagcaagtgcaatttggctatctcttgcgccacttgtccataggaataactctcgtcttcaccgtaatcggtatagcaaggaaggtcccagttttcacggaaactctgctcgtagagtttgataaagttctcttgtatcattgcacgaaaattgatgatttgtgcaaaagtagaaaaaatctaataattatatgtaactttgtagcagaaatgtgtttagaatagatatgattgataccaatatatttcaagataagacagcggtttactatacattaggttgtaagttgaacttctcggaaacctctactatcggtaagattttgcgggatgcaggtgtgcgtacggcacgtaaaggcgagaaagcagacatctgtgtggtgaacacttgctcggtgacggaagtggcggataagaaatgccgccaggctatccatcgtctggtgaagcaacatccgggggctttcgtggttgtgaccggatgttatgcccagttgaaacccgaaaccgttgcaaagattgagggtgtggatgtggtgcttggtgccgaacagaaaaaagatttgcttcaatatctcggcaacctgcaaaagaatgagtcgggagaagcttatgcttcggcgctgaaagatatccattcgtttgcaccgtcgtgctcacgtggcgaccgtacccgttattttctgaaagtacaggatggttgcgattatttctgctcttactgcaccattcctttcgcccgcgggcggagtcgcaatggaacaattgcatccatggtggaacaagcccgccaggctgcggccgagggaggaaaagaaattgtgctgacgggtgtcaatatcggggatttcggtaaaactaccggagaaactttcttcgatctggtgaaggcgctggatgaagtggaaggcattgagcgctaccgaatttcctccatagagcccaatttgctgactgacgagatcatagaattcgtttctcattcccgcagtttcatgcctcatttccatattccgttgcagtccggtagtgacgaagtgctgaaactgatgcgccggcgatatgatacggaacttttcgcttccaaagtgcggaaagtgaaagaagtgatgcccgacgcttttatcggcgtggatgtgattgtgggcacacgtggtgaaacggatgaatactttgagcaggcctacgaatttatcaaaagcctggatgtgacccagcttcatgtgtttagctactccgaacgtccggggacgcaggcattaaagatagaccatgtggtaactcccgaggaaaaacaccgtcggagtcagcgcctgttggaactttcggacgaaaagacgcatgcattctatgcccgtcatatcggacaaaccctgcctgtattgttggaacgttccaagccgggaactcctatgcatggcttcactgctaactatatccgcgtggaggttccccacaatgatacattggataatcaggtggtgcctgttcgtttgggcgattttaatgaagacggaacggcgttgcagggaatggtgctattataataaggtataagaaaagtatgaaatcgaaacttgtctactggctgacttacgctggcatgtggcttctggctctgcttcctttccgggcactttatatattgtccgatggggtttgttttttgatgcgtcatgtggtgcattatcgtcgtaaggtagttcgtaagaatctgaagaattcttttcctgaaaaatccgaggctgaactgcgcgagattgagcgtgagttttatcgctatatctgcgactatatgctggaagaaataaagatgatgcgtatgtcgttcgaagacctttcccgtcgtatggagtatggtaatactgaagaatatcttgccatgctcgaaaaacatggaggcatcgttgtactcattccccattatgccaattttgagtggctgacggcgatgggagccttcatgaagccggaagacgtaccattgcaagtgtataaacctttgcgaaacaagtatatggatgaaatgttcaagatcatccgtgcccgtcatggtggctataatgtaccgaaacattccactgcccgcgaagtaatccggttgcgccgtgaagggaagcatgtagtgatcggactgattaccgatcagtctcccaatcgcaatgaagcccatcactggacaactttcctgaatcaggataccgtatttatggatggtggtgaacgtattgccagaatgatgaattatcctgttttttattgtgaattggaaaaacggggtagaggatattgcaaagcatactttgatctgttgactgaaaccccgaagcaaactgccgagggagaaataaccgaactatttgtgcgtcgcttggagcagaccattcgccgtgctcctgcttattggttctggtcgcataaacggtggaaactcacacgggaagatttgaagaaacagcatgaataagatagcagttgtcatattaaactggaacgggtgcgatatgctccgctcgtttcttccttctgtagtacgcttttctgaagcggacggtgcggtagtgtatgttgccgataatggttctacggatgcatctgttgatatgctttgtcgtgaattccttaccgtccgattgattctgttggaagaaaatcaaggtttcgctgatggttataatatggcattgcaagaagtcgatgccgagtatgtagtacttctcaattcagatgtggaggtgacggaacattggcttcagccactggttgactatatggatgctcatcctgaagcggcggcttgccaaccgaagatacgcagttggaggcagaaggagatgtttgagtatgccggtgcggcgggtggttttcttgatcgttacggctatccgttctgtcgtggtcggattatgggtgtggtagaagaggataggggacaatatgacactatcattcccgtcttttgggctacaggtgcagctttgtttatccgcctgaaagattatcgtgaagccggtggattggatggacgtttctttgcccacatggaagagattgatctttgctggcggcttcgtgcacgtggccgccagattgcctgtgtgccgcaaagtgtggtttaccatgtaggcggtgctacgctgaagaaagagaatccccgaaagactttcctcaattttcgtaataatcttgtcatgctttacaagaacctgccatccaaggattttgcttccgtgatgcgtacccgtgcagttcttgactatatagctgcattgagctttatacttaaactacagttccccaatgcattggcagttcttcgcgcacggcgtgaatatcgtttgttacgttcttcttttactcctgcacgtgaagagaacctgaaaaaaacttccctttccgtgataccggaatggacaaaaagcagtatcttggcacagtattatttacgtggaaagaaatttttctcgcaattatagctttttctttttaccgattgtttattatttaaacgtattgccttatgacaaaattagttagaaagattggactggtggcgcacgacgccatgaagaaagacctcatagagtgggttctctggaactcagaattgctcatggggcacaagttttactgtacaggtactacgggaactcttattcttgaggctcttaaggaaaagcatcccgatgttgagtgggattttaccattttgaaatccggtcctttgggtggtgaccagcaaatgggatctcgcattgtggatggcgagattgattatcttttcttcttcactgatcctatgacgttgcagccgcatgatacggatgtgaaagcgctgactcgtcttgccggtgttgagaatatcgttttttgctgtaaccgtagtacggcagaccatattatttcaagcccgctattcgttgatccgacgtatgaacgcactattccagattacaccggctacaccaaacgatttgaaaataaaccggtggttgccgaggcagtggagtctgcaaaaaaacggaagaaaaagagaggataaaggagacggttggttctccggtgaaaattaaagggggaaggttttcggatagaataccttcccctgcttttttaaagcaaagaactctataatatatatcctaaagagaaagtgaaacttctgtttttgtatgtatagtcgttagctttagatacgttcattaaactccaatcagctccaaatgagagttgaaaatgctttgcatattctacaccaacattgaatccgcatccccaatcgaatcttttatacccatatttatcactaaaaatgtcactttcagtgtgaaacttttttccgtttctataagatttttccttgccccacagtgctactcctgcatatggacctacattggcgaaaagtgaaaccgatttactgcattctattttatatcctatatggacaggaacaactaaatagttgagattct

SEQ ID NO: 6296 - DNA, 20546 bp, Unknown
  gut microbiota DNA sequence
tataagctttctcattgtgtctcgtaatttgtgggttactgttaatgattacttcaatttgtttatgcaaagttaaaataagtatttgtgatacccaaattatataataagtaaaaacaggataaataaatatcttagcggataagtggtcttaaaattgtactaaatgggaaaaactattatatttgtagcaatgcatgaaggatatctttattctttatataaatgtcaatagctatgaacacgatatatggcaaaattctgtggagaacttctcttccggttctcttactactattcttagctgtttcgtgtaaacagtctgagcaacattcctcttgggaaaaaaaatacgactctttttatcgttcggttacagactctttgaccactcatccacaacagatacgtgcgctggcaaagcaaaagatggagatgtcgactgatagtctggaatggtattattactctgctatagtattaaaaacgtatatgttcacttcggatgtggactcagcccgctatttaataaaacggatagaagacttttgtgcccgtgaacaatcttcaccctatcttgctgatttacgctcggaatatctgaatacaaaaggtaatatttatgtgcgtgtaggcgctatggattcggctattgtctgctttacagattcttacaaacaacgtttgcagggaatgaagacagaatcagttccggatattcttatcaatctggctgatgcatgcagccggcagggaaaatatgatgtaagtgcattttggtatcgtaaagcgctgcaaatcggagattctttaggaatatcggaggggcgtcgtcatcctgtttattatgggctggctcaggtgtatatggctttacacgattttgatcagtgcgactattactataatctggcagggatgttttatgataaaatgcttccttacgagaaatatatctatttgaataatcgtggtaattcatattattatcgtgaggattatccggaagctttaaaatatttcaagaaaggtttctcgctggcggtttctcatcccgatatgggctttgagaaaaacctgtgcatggtgaatctgggggatgtctatctgcaaatgaatgaacctgactcagcggctaaatatatcaatgaatgccaacccttttttcggaaaataggggcggcaggagcgctttattatattgatacccaacgcatcggtctggctctggagcgaaatgatatggcaaccgtaaggaatctgctaagtaaggctaccaatccgaatcatatagagccggacatgctgcatattcgtaataagtatttgcaggagttttacgagaagacggcagattataaaaatgctttcttttatcagaaagaaaacagccggctggacgattctatccgtaatgaacatgtaagaatgcgtacagccgatatgtcattgagatatcaacaggactctacactgttggcaaagaacatattgattgagcagcagaaggtagagatgttaaagttgcacgagggacgtttcttctggattggagtttgcgttttggtattggttattgcttgtttcatctatctgtatgaaaagaaaagacgggctcttctgctcgcgcaaagtcagcgtaccatatcttctttacgtttggagaatatacgtaacagaatgtcaccgcattttatttttaatgtgctgaaccaggaaatgggcagtcgggaaggggagaataaaaaagagctctcctcattggtgaaactaatgcgacggaatttggaattagctgagcaaatgtgtgttaccttaaaagaagaattaggttttgtgcaaacctacattgatcttcaacgccgttctttgggaccggaatttaaggtgactattgaagttggtgaagatgtagacaccaatcagttgcttctgccttccatgttaatacagataccggtggagaatgccatcaagcacgctcttcagggtaaagaaggtgaacggcgcctttggattgatgttcatcgttccggtacttatatttgtgtccggattacggataacgggggcgggttcaaactgaacagtgctaacagagggacagggaccggaatgaaggtaatcatgcaaactattcagattttgaatgctaagaataaggaaatgattgaaactacggtacacaatattcctttgccggatggcgagaccggatgtgaagtaagttttcatttaccgttgaattatgattattcagtttaatgattttcgaataatcctcaattttgattggatatccgttgttttgatcgaatatcctgaaaatgacatattctgattttttaaattgctttcagttctttaatttcgcagaaacaagagaggtatggacaggtataaggttgcaatagtagatgacgatgagttgtccttggataatctggtattcgggttacagaaatttgaaaactttcatttagaaggcactgcacgcaatggagtatccgggaagaaactgatagctaaagtgcgtcccgatttgctctttttagatgtagagctacctgatatgagggggatggatttgctggacagtattcgcgaatctctgacttggggcatgaaagtcgttttttatactgcatacgataaatacatgatgtcagccattcgtcaatctgcttttgattatttgttgaaaccttttgaggacaaagatctggaacttataatttcccgatttatggaaagaatagaattagaacggaaagctgcattttttcctgcggcattagcaaacactagtcagacatttatggtgtttactccgacaaatgacatgcgggcattacggcctgccgaaattggatatttccggtattgctctgaacggaaacagtgggaggcggtgttgagtggacaaacgccgttacctctgaagaagagtaccacggccgatcagatagtgagatatgctccttgttttgtgcagattcatcagtctttcataatcaatattgattatctgatgattatcaaggatggtaaatgtgtgttgtatccgccatttgagaatgtagatgagctgctggtctctaagaaatataaaaaggagctacaagacagatattgtttgtaaatgaaatatatatattggttagggagtcgacacttgaatagtgttgataaaggaaagagggcacaaaacgtgatgttcagtgccctctcttattatttcacttcgatacctttattctgcaaagtgacattcaatactttcgcataatcagcgtattgcttgtcagtaagcgttttcttcatcaacttcaagtttccgtacactgcattgtggagtttcttttcctgatccttctttgcagttgtggcacgtcccatctgtgtagagaagtattcgcagatgtttgctacttcttcatgctggccagccgacaattttaaatatttactcaacttggttacgttgatgttaccatcccattttgcagttgtaggttgatttcctgctgcaaatgtcgtagcagtcagacagactgctgttattaatgttaatcctaaacgtttcataatacctacttttaatttgttatacctaaaaacaattctaactctaaaaatctaatacctattgaaaacagctctaagcgcttagctttttctttttacctatgcaaatatagaaatatgttttataacataaaagcaaagaagaaggaaagtgctgtttaagggagcatttcttgatatagatcaattatatggtattattttgcttgtttaagaccttatttgtaatatgaatgtaatatagttatcgaacacgggtgatcataatgatagtatttatccggattttaccaccatccccattttttatccggcatatctatggtgtattgaatttcagatgaaatacctacaaagcccaatccgccttctacattgctgggcaggctgataggttccatcagggcttcgtcataatcttcgtcatccatgcagtttaaagctttcaggtagcgataatatgtttcaggcaaactgagcacgcgcacggtgatattttgtttcaggtagcaacgggtataattcagtgattggagaatatcatagttgtcatcgtaaagtggggtgtaaactttcagcgtggcagatgaattggtgaaacgattatctgtgaagatactgtatttgttttcaatgttggtgggaaacattgcattttcatcatcatccgagctggtgacatgtccgtcggtcaggatcacgtcttcacggttgataagttcggtatatctatagttgacaactgtgtctttcgttatggtgtaaatgtaatctccattttcatcctttatatagtctccgttctcgtcttcgttgggcgtgtagataacgcagcggaagtctttgttattcactatctccagacggtaatagttcttttcgttagggagatcctctaaggtgatgcggtattgacgatgggctctcatgctaccccattggcggatgagggcggtacaggtgtccacttgcaggctttgtaggggacggggaacagttacttgcgaactgacatgatactttccgccttccgctgtggcttccaggcgaatgttatctccgggttgtaagcgggcagtgagacggaatattttgaagcgcatactttttagtaatgcttcatattgccctttgtcaagctgattttgcatatttccatagtattcctcgggagatatggcttgaggggattcaacctgcttatcgtttacgtagagggaaagcgttgcttcattgatgcggccgatgctgtttccttcactaagatgcagataaacgagattctctgtttgtccggcgttgagcagggcattcatgataagctgcggattttgttgtccgggattatatggaatttcattttcacaagccataaagagtccggcgaaagctatatatataataaggtgtaatttaattcttgttttcataatctggtatggcttttaaaatttataggtataagtcacagagggtatgcagggtaatatcgtcagtttcttgataacagtcttcgactttttctctgagttgtattgatcaccgtttccttgatatatgctgttgtaaaagtcattgtaaatcagattgtaaccttgttcccatttgctgtaaaccaggttggggttcatagcattgtaggcattataaaggctgatgttccaggtacgcatgccatgcttggttttcttgttgaagttgatacccaggtttaggcgatgactggctggcaggcggtagttgttgcgccgggaaatataaggagcagattctatattgccttcgggacggatgataatggtctcccgttcaggtactgtgatgcatcccccggtattgaatatccacgaagctccgacatcgatacgttcactgaatttatgattcaaacacagactgatggtgtggcggcggtcatatttataaggaaaccatttaccctggctgatggcaccatctttgaaacggtgatcggtctttgccagcgtatatgccagccaaccggtagtctttcccaaagtcttttgtaccatcatttccagaccaaaggaacgtccttcacccatttctaccttttcctcccaattagtggaagtgccgaaaaaggaaacgccatcctgatattccagtatgtgacgcatctgcttataatatccctctatagagaactcccagccagccagaccggtataatagcctccaagagagtattgattggcatacatggggcgtatgtttttggtaattggtacccaaagatccgtaggcatagagaagggagtggatgaaagcaagtgtacatattgtgccatgcatgtataggatgccttggcggagaatccctgtccgaagttgtagcgtgtagagaggcgtggttgaatcgaacagtagttctttccttgtgtagagaacagagatgcccttataccggcatttaggctgagatgactgttcaggttgaaattatcttcagcatagagtgatacctcttgtcctcgtagtacatgattattgctggcggcataaattgtttcttcctcttgctccccgttttccacttcctgagtcttggaagtggagatgcccgggcggaaagtatggtggatatattctgctccaaacttgatgtgatgttccggagcgggtgtaaaatcgaagtccatgcgcgcactccagtcactgatgcccgaacggaattgggataaatagctatagcgatctaatatttgcccccggtaggtgcgtgtatcttccacatcctgattcaatttcatcagatagttattgtaggaaatagtggtgttgcagaacaacttactattgaatacataattccagcggccataggctatcgtgtttccccagttcaggtggctgtcatctttataatagactttagtgtcgtcgttgttctgatagtagttgttgctgtcggtggtgtcaaagtggtagtggtcctttcctttatagaaaccgatgaagaggcggctgcggtcattgaatttatggttcaccttggcattgatgtcgtaaaagtagtagttgtatttatcagcgtaataatcatctttatccactatgaggtttttgaagaaggcggtgtgcgtggcacgtgcactaagactgaaagaagtgtgtcctttccagataggtccttcaaaatgcagtttgtcggtaagtgtacctacactgagtgcaccgtggtaatggtgcatatctccgtcgttggtgcgtatatcgacaatagaggaaagccgaccgccgtaacgggcgggaaaggaactcttgtagagtgtagtgttttttatagcttcgggagtaaatacggagaacacccccagaagatgatctgcattatataccggaataccgtctagcaatatcaggttctggtccggtcctcctccgcgtacatataaaccggaaaagccttccgttccggcttgtacacctggcattaactgaatggttttcaatatatcagcttctccaagtacggctggagtatgttgaatttgtgccatcggaatttcatacgctcccatggcggtggcttggatgccggcttctttcttgtccgaaaggacaatcacttccgccagttcattattgctgtccaagcggatattgagcacggtgtctttgtttagcgggaacgaactgtgccgggtttcgtaccctaaatacgaaaaaatcaattccgcatctccttccggcaaagtaagagtatagaaaccgaaaggattggtggcagtgcccacacgctgacgactatcgaggatattggcaccaatcagcgtctcggaagacgccccgtctgtcacgtatccgctgatagtgaaccgacggcttacggttttctgcggcacgggccgcttgtttagcaaaatatgttttccggagatttcgaaacctatcggttggttttcaaaagctttccggagaatttcgttaatagtaaggtctcggacggccagtgtgatgcgtccattcagacgtacttcttctccgtatatgaaactgtacccggttttttgttccacttgtttcacaaactcctccagtgtcgcattttgcagtttgatgctgaaacgcgtttgtgaaggattggtcttctgtagaacgcaggtggcaaatacaatcgtactttgtagtgtacaggttgataggagaaccgctcccaccaggaaaaatttcctgatggtgcggggtgaacagatagaggatttcattctagtttaatttttgtgtgattgttattatgtcattagtttttgtgtattcaaacttttgattgcggcaaagcagcgaaagaatttcttccagcgtttcgccatcagagaaagtagccgtcatgcgatagttctgtaagtcagcgtcttcaatacgaatgtctgtgtggaaagcgttagaaagttgtcggacaatctcttgtaaaggaatgcttttgaaaagcagtgttccgtttctccagataatctcttcggatgcattattttcggtatgtagagtcagacttttcttatccttattatatatagcgctttcattgggtgaaagtttcaggctttcttctgctttaccgatgaggctgacagaaacggaaccttccaacaaggttgttttcacttgtgtatcttcgggataggcttcgacattgaaatgtgtacctaaaacctgtactataattgctccggcttctactttgaaaggatgtgctgcatctttgctgacttcgaaataagcttctccttgtaactgtactttccggtcttttcctctgaaacgttcgggataagtcagagaagaatagcggttcagtacaatttctgtttggtcgggcagtgttacggtacgtgtttctgccaatgtggatacggtttgcaatggtaccggggcgaacatataatatgcccaccagcccagtacacaaagcacggcgacagcggctgcaccagccattgtgtgcaatgaaaggatgcggcgttgcagatgcggcaaccgtttctcaagaagtatccagctattggctttcgagaattttcctctcggcgaacgggtggaggttgcgagtttatcgagtattctttcaaattcttgttccatgttcttcttcttttctataaagacaggtaaaacggaaaaactccctatgccgaaattacttttttttcctacatcctacacccgctattgtttttatctggttatcagatagataggtagtgtgaaaagtggtgtaggaaggtgtaggaaagttgcatcctacaccgaaaaatagaaaaaaagagcgtttttatgtttgtaattcactaattcacaagtccttaatatgtattatacaaactttgcctgtattcatgcaaatatctccttttaaactgaattttcatcgcagaagttatcacttcgtaagaattgaggagtcaggcttcataatcccattatatagaaagctgaatgatagaggagaaacttgatatgctccttcctttttctcctaaagccttaatgttaatgtcattatgctataagcaaaacctcgtttttcagttgagggctgtgtagcccgcagttgtgggaccgacagccctcaattggaaaacgtagagctcgcaactgtgggacgaagttttgttacgggcaaaaggacaaaaacaataaagcaaagcttagttttcatacggccttaaggcatttatgtaccaagctcacgtgagaaaaagctagtgataggatgaaacagaatggagttgtagttcccattattggggacttagatggatagtgatctgtgtctttttgccttctttatccttcggggtacagacgatgcggaattcagctttgtctgtcactctcttcggatagatcttcactcgtagattggctgatttcttcttggcagggataatgaccgtcttgtcttcaatactgaaaatagctgctttacccggcatgtttatgccattaatgagaacttccctatcctcatttttcttttcagcggcaataatctttacgtcgaactcttctgtgtctttgtttttgtcgaacgaatagtttttggtggctttctcaaaacctacatactcttcgggataactggaactgttgttactgcatgcggcaaggataaagagaagccctgcggttcctgccatttgtttgcaaaatcttttcatgtcgttttaatttagtttagtttatatagttcatgagtaaagacaggagcaaaaaagaaattccctatggcgatagaaataaaaagtgttaattaatcaggtggaagattgttttattacataaatttttctgtccgttacatgtattttcggggagtttcggggagatggaataagtgttttttagatgatgaaatgagatcaaaaaaaggaataatggatattaaaaatgaagatttgtgttacattttattgaggctaaatatttgttttgtagcatgttgtgttgctaatggtaacgtggcgttgaatgcctgggaaatgcttgaaaaaggatgtaacgaatgataaagcttgtgttacaataaagtgagattcaataaaagtctattttctatatttgcagcaaagaatcatgatataataattgatttaatactatgtgaaaacataagttgttagctgaaaatgaaaagaaaagtgtccgaaaatgagaattgcagtttcaatattgttttgcctgcttgtagttctggagaaagtgatgaaaaatactcccgattatatataaagaaggctgaaggatgtttttctctgatttatattatgttgtatacagtaaaattatatatgtatttaatcttaaatgaaaagtgtatgaaaacaaaattattgtttatgttgcttctctttctttgtgtgtctaccgcatgggggcaaagtaagagtattagtggtaaagtcacgtctactactgacaatgaaccggttatcggtgcatctgttgtagtaaaaggaacgacgaatggtacaattactgattttgatggtaattttactctttcggcagatgccaattctacattggtgatttcgtttgttggatatgttacgcaagaaattgctttgagtggtaatacttctgttaatgtattgctgaaagaagatacacaaatgctggatgatgtggttgttatcgggtatggtactcagaagaaagcggacctgtcatcgtctattgctgtattggataccaaagaactgagcaaagtgccgggaggtttgtctgccggactccagagttctgtggccggtgtacaagttacgaatggtagggttcgtattcgtggtgtgggttctattaataatactgatccgctttatgtagtagacggtatgattggaggagttgtacccgatgaaagtaatattgccagtattcaggttttaaaagatgctgcatcctgtgccatttatggtgcccgtggtgctaatggtgtgattatgattacgactaaacggggtaccagcggtgatgtgaaggtagattatgacggttatgtgggttggaaaggactttcacacgatgtagagatgttgaacgggcaggagttagctgagcttattaatgaagaaatgtataatgccgatcctaaccgtactgactatctgacggctctctctgatccggccgcgattggtgaaggctacaatatgatggatattttaaagcgtacggctttttatcagaagcataatcttgctgttagcggtgggtcggataaggctaattttcgtatcaataccacttactctacagaccagccggtgttcattcgtgaagattacaagaattacggtatacagttcatctctgattttacaaagggaaagctgaagttgggagaaacggtaacgatcaaccgtaacttgcacgattggagcgattgtaagatattgggtgctcaaaagtggtcttctacattgcctatttatgacgatagtcatcctactggttttgctggtgccggtaatggtacagactgcggaaatccggtggcagaatcttatatgaactggaataagggtgaaggtacaactatcaatggtaatatctgggctacttacgaaatcatcccggggctgaagtacaagttcaatatgggagtggatatgtatcgctatatggtacagaattatattgctgattattctattggctatgaaaaccatacaccggacgagtacaaaatgtccagtacgaagactaatcgtttcttatatgaaaacactttgtcgtatgataaaacttttggtaaacatagcatcaacgctttgattggtgtcacttcagaagagacaaaaggtcttggacacaatggtggggcacgtgctatgcccagtcctgatattctgattctgggttccacgcaagatgatgcgtcgaaagtggttggctcttccgttagccgttcgtctatgttctctttgttgggtcgtgtaaactatagctatgatagtaaatatatgctgactttcaatttccgtcgtgatggttcttctaactttagcaaaaataatcgttatggtaatttcccttctttctctgctgcatggcgcatcagtcaagagaaatttatgaagaacctgacttggatcagtgatctgaaactgcgtggtagctggggtatgttgggtaattccaatattagtccttatcaatatcaaagtacagtgaatttcgctcagatgtggtattatttgaatgatagcaaggtgacgggagcattgcctactacacctgcaaatccggacgtaaaatgggaaacgcaatattctactgacttgggactcgatttgtcagttctggatagccgtctgttgtttacagtagattattattataagaaaacaaaggatatgttgattcaggttcctatttctttctctgccggatatatgggtaatttcccgacgttgaatgccggtagcatagaaaacaaggggtgggaatttgctctcacttaccgtgatcatatcggagattttgattattcggttacgggaaatctgtctaccgttaaaaacaaagtgcttgacttggggactaacaatgctatttttgctgccaacagtgtgacgaagacggctgtaggaaagtctatcgggcaattctggggatatgtaacagatggattgtatagaactcaggcacagttggatgaggataagaagtttgctccgaatgcgcagttgggagatgtacgttttaaggatttggataaagatggtgagttgactgatgaagacaaggactacatcggtaatcctattcctgattttacttacggattaagtttggatgcaagatataagacagggtttggtgatgttgatttctccatgatttggcaaggatcacaaggtaatgacatctttaactatagtcgtgtagacaatgaaggtatgcaccattattataataacaccaaagaagttctgaaccgttaccgggcagaagatctcactttcgtcaatcctatttcaggtgttacgacattctacccgaagaatacggatacggatattcctcgtgcagtgatcggtgatcccaatcagaatcgtaaactttctgatcgttatgtagaagacggttcatatcttcgtttgaaagccttgacattgggttatacttttccgaaggtttttctgagtcgatttggcattgagcatctgagactttacgtaggtgctaagaatctgcttactatcacctcatataagggatatgatccggaagtaggtgatcaggatagatacagcggcaaaaatctgacaagaggtgttgatggtatgtctctctgggatccgactttccctaatacgcgtgagttttacatgggtttacaattgactttttaaattatagaaagatatgacttcacttaaaaatacattacgtacttgcgttgcactgtctgctgtctccattgtaagcagctgcgtgcccaacatggatttgaacaatccggaacagctttcagtagatacttattatactaccgaagctcaacttgaagcatccattatcccggcttatgaagctttgataggacagaatcaaggtggctatgcacgagctttgtattacaatttattggctcctggtgatgattttgataaaacattcaagtggcctaacctgtatcaggatacttactcaactccggctaatgaaggactgctgaaaagctcctggcaagatctttttaatggcgtatttgcttctaacatagctattgagaaaattacacactttgaaggaacgatggatgaggccaaaaaagatcgcctgttaggtgaagcttattttttaagagctttacattatatgcatttggttcagttatttggcgaaacggttccttattgggatcatcctgtatccgatgcatcagagtattatccaggcaatgcggaaaaaggacagatttatgcattgattattgctgattttgcaaaggcagccgaattactgccattgagaagtacgctttatgccgatgctgccaataaagggcgtgctactaagggaactgcacaagcttacttggcaaaagcctatttgtatcgccccattctggaacgtggacaggctgcggaatttggaaaagcggaagctgagttgaaaaaggtaatagacagcggggaatataaactagtggataattatcgtgagaactctatgtggggtacagactatgagaataatatagagtctgtgtttgagatacagatgttcaatggccctgattggctgggaggcgacaagtctgattcctggagatggcaggaaattggtgtgcctgacggaaccggtggctcttggtggaatcttgctccaaaccaacgtacatatgatgaatttgaagagggtgacccgcgtaaatttatgacgatgtggtgtccggggggtgcttattacactcagcttgatggtactgtggccgattgggattatatgtatgcacacctatcttcggataaacacctgtacgggacccgtaaagaatgtccggattatcagattgctgatgctgataatgaaattaatacccgcctgatgcgctattcggatgtactgttgatgtatgctgaatgtctgagcgaagcaggcaatgataataagtcaataactgatcctacaggaccgaagtattatattcagcaggttcgcgaccgtgctaataagattgttccttctgaacagccacatctgtggtatcagcatgaaccgggatatattcctaatgtagatgaactgttggctagcgataaagttatcaacggcgttccgatgaatacgattaaaaatatcattgttcatgaacgttttgtagaactctgtggtgaatatctccgttattttgatcttcttcgttgggggctggctgattctaaatggcttgactcattgaaggcattggggtggagtgaaaaggctatgtattatcccttccctgaagaagaactgagtaataattccaatctgaaaggtaatgatatgaactgattcttgtgaatgaatatgaactaaggtagtttatagaattggaattgttttcaataggtatttttatcagttcggggcaggcaaaaggtctgtcccgaattttataaatttgtattgtgggtaaagtggcagccagagttgtcttattctatttttacatttggtaaatataaattttaggtgatatttattatctttgcaaatcttattgcactactatgaagatcaaaaatatactctgtattttgtgcctgtggatatccatagttggttatggacaatctggcaaagtttttaccacagatggggaactctcaaacagcttaatcaataaactatatcaagatagaaacggatttatttggattgccacagaaaacggccttaatcgatatgatggagcgaaagtaactatatacaaacatgatcccaatgatccccattctttgtctcataattacgtacgaactttatttgaggatgccaaaggacggctttttgtcggaacatgtaacgggttacaaatatatgatgcagcccgtgatagcttcactctccccgcccgacgcgaaaatggagaagtctttaatagtaatatatccgctcttctgcaacgaaaaaatggagatatctgggtgtccggcaatgaactctgtcaactctttattgaagatgatgaactgattgtaaagccgttattgctggatattccgacttccatgaccggggctgttatagaaactactacaggagagatatggatgactgcgggtgaaaatggtatttatcgtttgactcctgctggaaagggaaaacaatatttgatacaaaaaaaaggaactccaataattgacgtatgtgaagattataaaggtaatatctatgcgataagtatgggcaatggactttttaggtatgaccgcactcatgatagttttattcccataccttataaagggcaatataatctgtttatcaaaacaatatatcagagttctcaggatatactctatttgggaacagatggagaaggagttaaagtctataatagtagaaccaacgagattacagatgctcaattcagcaatagttgttttgatgttacaaacgctaaggtacactctcttcttaaagactatgcaggcaacttctggcttgctatttatcaaaaaggagtggtgatgattcccacagtgcaaaatgggttcaagtatataggatctaaagatgtgaatagtaatataataggatcatattgtgttaccagcctgcttcgtgatcataataatgatttatgggtaagtactgacaatgacggcatttatgtaatcactcccgaattagagcaaaaagaacattttgtacatgaaaacacttcgagctctgttcctgccatcatcattacgttgtatgaagattcggagcacaatctttggttcggttcttttaccaacggcatggggaaaatagaccgtaatacaggccgatgtacatatcttgataatctggttgatgctaatggtaaacatgtacaacgtgtatatgcatttgccgaggataataggaaacgattatggatagctacaatgggggcagggttgttatgccacgatttgaagagtggaaaaacagaacaggttactcctcccgattcttacttgtggttaagtagcgtattatattccaaagacaataaactttatatcggaagttatgatggtctgatatgtgttgatttgaatacaagtccatttaatatttcctatatatcacctaaagtcatagtacattgcttgcatcaggataaggaaggagtgatctgggcgggtacatcagaaggaatatataactattctccacaaaccgataaactgacgctttacactgcacaagacgggcttcccagtgatgtagtgtatgctgttcaagaagataatcaaggtttcttatggattagtacggatgccggtatttctcaattcaataagcataatcataaatttattaactattatgtaagtgatggattacaaggtaatgagttcagtaaaaatgcctcattcaaagatgctgatggtactctctggtttggaggagtgaatggggttacttactttaatccgcaagaaattactgatcctgcaaaaaaatggaatattcgtattactgatttctatattcataatactcccgtgagaaaagggatgaaatcaggtagatatgaaattattgatcggccggtatttgaagcgcaaaagtttcatttggctcataaggacaatgcattcagcatcgaatttgccactatggaattgaatagtcccgaacggcttatatatatgtattccatgaattatagtgactgggtggtgctgcgtaatgatataaatcgtatttcattcaacgatcttcctcctggtacttataatcttagagtacgggccggggatcataatatgctttcgaatattaaagagattacaatcctgatatctccggcatggtatgcatcgaattgtgcaaaattatgttatgtcattttattggcattagccatttatctgattcttatgcagattcgtaatcgctatcagatccgtcaacaaatgattgaacatgctcgtgcagaggagattaatgaggcaaagctccaattcttcatcaatatatctcatgaaatacgcacaccgatgtctcttataatcagtccactacagaagctaatgatgacagatagcgatgctgatcggcagaggtcttatagtatcatgttccgaaattcgaaacgtattcttgatctggttaaccaattgatggatatccggaagatcgataaaggacaaatgctcttgaaatttcaagagatagagattgtagagtttatcagagaccttcaatctacttttgaatatcaggttaatgcaaaacatatctctctcaattttcatgtacagcaggaaaggcttaatgtatgggtagatcctaagaactttgataagatcattctgaatttattgtcaaacgctttcaagtttacacccgagcaagggcaaattgatatatacctgcgaacgggagaagatatggatgcccccgttccattgcagcattattttgagtttgttgtggcggacacaggcattggtattgatgaaagtgagatgaatcaaattttcgaacgtttttatcagatcaggaatcatctgaataactctaacataggcactggtattgggttgcatttggtacattcattggtcaagttgcatcatggaacaatacgggttgaaaataatgaaaatggtaaaggtagtaggtttattgttcgtttaccacttggaaataagcatctaaattcgaaagaaatagatgaaaatgagaagtctgctttatctccttctaaggaaatgctcattttgtctgatactataagtacggatgaggaggtaaagctaaaatcaaaaagcaagtataaggttttgatagtggatgatgatgaggaaatccgtaaatatatttgtcgggaacttgctccggattttcatatgatggagagtactaatggcagagaagccttatccatagtattaaggcaaactcctgatctggttatcagtgatattatgatgcaggaaatggatggattgactttgtgtcataagattaaacaaaatgttaatattaatcatatacctgtcatattgctgactgcgaaaacacgtgaagaagataatatggaaggactggatatgggagctgatgcctatattatcaagccattcaatattgatattctaagaaagacggttataaatatagtgaaagggagggagatgttgcgtaattgttttggtgggagctagaaacaagaggttaagaatcagatggttgatatgcaatctacagacaataaactattagataaggtaatgaatattatcaaccgaaatattagcaatccggaacttatggtagaaatgatagctaaagaaattgggatcagccgtgtgcatctacatcgtaaattgaaagaattgaccaatcaaagtacacgtgatttaatacgtaatgtaagattgaaacaagcagctaatttgttgatttataaacgctatagtgtaacagaggttgcttcattgactggcttttccagtattactcttttctccaggtctttcaaagaattatacggaatgacacccagtgaatatatagggaaacattcaaacgaggttggggagcatagagagctataaaaagaatgtgttacttattagagcagtatttctttcaatcgaatggttgctttctgcaattgcgcatccaccgtttttgtactgatgcccaactcttctgctacttgtgcataggtttgtttttcttcgcggatgcggatgaagacttcacggcaacgttccggtagccggtcgagagcttttacatagcgggaaaaaagctcctcgctgatcagagtatcttcaggtgatactgcttgatcggagtgttcatgtagggtttctgttgataggatggggcggcgctcctctttttctatatagttgagagaagcattctttacgagtatgaaacagtaatcttcgatattggtaatttctaataattgcttacggtgttcccagagtttcatgaaaacatcgagcacaatctcttgcgaccattcttcgtggtgagtgtagtaataagcaatacggaacagacggtcatacgtcatatcataaaaatcccggaaagcagtttgcgaatcctgctcgctcattttccgtagataccttctgacttcctgttctgtcatattgtcgtttcatgtaatcagcggacaaaggtaagagtttcaaattaaatatcctattttgtgtgcttcttgtctttctaaaatgttgattaaaagatggagttctagcagaacttgatagattggttaaagtgtactaatcaatgatattagcaaatatttgcttctaccgtagctgttgttttcatgatacttctgttactttttcaggaatatagatttttattatcttttcaaactttgagctatatatttatttgaagtgtagatgaagaatgacattaatctttctttcgtaaatgtgttttgatcatatcctctgaaagcatagtcgtttattcatgttccacagctgcaaaattaagtaatattctataaaatcaaagcaaaatacgaaataaaatctaaaatacttgcaaatacatattgtttgaatatatatttggttaagtgtttatattacatttatatctgtttttaaccaagaaaatagtgattatatgattgctttaaaaagcaaaatgatagaaatatgctttgttttagtgaataataaagattcttttgttgttaataacataaaaatagcatcgctttatagaaaaag

SEQ ID NO: 6297 - DNA, 22311 bp, Unknown
  gut microbiota DNA sequence
cgttagacgcaatggccgtttgtatgttattaacaagaaaaatcctaagtataaacaacgtcaaggataatattattatttttgcaaaaaaaataatttagtatatggctataagaatagttggtgtcgatttgcctcaaaataaaagaggtgaagttgcgttgacctatatctatggaataggtcgtagtagttcagcaaagattttagataaagctggtgtagataaagacctgaaggtaaaagactggacggatgatcaagctgccaagattcgtgagatcattggtgcagaatttaaagtagaaggtgatcttcgctcggaagttcaattgaacatcaaacgtttgatggatattggttgttaccgtggtgtacgtcatcgtatcggtttgcctgtaagaggacagagcacaaagaataatgctcgtactcgtaagggtagaaagaaaaccgttgcaaataagaaaaaagctactaaataataattgttgatatggcaaaaaaaacagttgcagcaaagaagagaaatgtgaaagttgacgctaatggacagttgcatgttcattcatctttcaacaatattattgtttctcttgcaaacagtgaagggcagattatttcttggtcatctgctggtaaaatgggatttagaggttctaagaagaacactccttatgcagcacagatggctgcccaggattgtgcaaagatagcatttgatcttggcctgagaaaggtaaaagcatatgtgaagggcccaggtaacggacgtgagtctgctattagaactattcacggtgcaggtatcgaagttactgaaatcgttgatgtaactccgcttccacataatggttgtcgtcctccgaaaagacgtagagtttaagatttacctttaataaaaatgatcttgattttgtttttggattacattaatttctctctgtaatcgcggctgcaacaaattaagttcatgaataaaacaattaaaatttaaaagaaatggctagatatactggaccaaaatcaagaatagcccgtaaattcggtgaaggtatcttcggagcagataaagtattgtcaaagaagaactatcctcccggacaacacggtaattccagaaaaagaaaaacttctgagtatggtgttcaacttcgtgagaaacagaaggccaaatacacctatggagttttagagaaacaattccgcaacctatttgaaaaggcagaaacagctaaaggtattaccggtgaaattctgcttcagttgctcgaaggtcgtcttgataacattgtattccgtttaggtattgctcctactcgtgcagctgctcgtcagttggtgggtcacaagcatattactgtggatggtgaagtggtaaatataccttcatttgcagtaaaaccgggtcaggtaattggtgttcgtgaaagatctaagtctttggaagtaattgctaattcactggctggctttaaccacagcaaatatccttggttggaatgggatgataactctaaggttggtaaattgttgcatgtacctgaaagagcagacattcctgaaaacattaaagagcatttgatcgtagaattgtattctaaataaaataattaatttcatggcgatattagcatttcaaaaacctgataaagtattaatgttggaagcggattctagattcggtaaattcgaatttcgtccgttggagcccggttttggtattaccgttggtaatgcactacgccgcatcctgctttcgtcattagagggttttgctatcactactatcaaaatagatggtgttgagcatgagttctctagcgtaccgggagttaaagaggatgttactaacattatcttgaatctgaaacaggtgagattcaagcaagtagttgaagaattcgaaagtgagaaagtaagtattacaatcgaaaattctagtgaatttaaagcaggtgacataggtaagtatttgactggatttgaagtgttaaatcctgaattagttatttgtcatttagattctaaagcaactatgcaaatcgatattacgattaacaaaggtcgtggatatgttccggctgatgaaaaccgcgaatattgcacggatgttaacgtaattcctatcgattccatttatacaccgatacgtaatgtgaagtatcagattgaaccgttccgtgttgaacaaaagacggactacgacaaattggtacttgagattactaccgacggttctattcatccgaaggaagcgctgaaagaagctgcaaagattctgatttatcacttcatgctcttctctgatgagaagattacattggaaagcaatgatgtggatggtaatgaagaatttgatgaagaagtattgcacatgcgtcaattgttgaagactaaacttgttgatatggacttatcggttcgtgccctcaactgcttgaaggctgccgatgtagaaacattgggtgatttggtacaattcaataagacggatttgctgaaattcagaaacttcggaaagaaatcgcttactgagcttgatgatttgctggaaagtctgaatctttcgtttggaaccgatatttctaaatataaattagataaagaataaaaaatgagacataataagaaattcaatcatttaggtcgtactgcttctcacagaaatgcgatgttatctaacatggcatgttctttgattaagcacaaaagaatcactacgactgttgcaaaggctaaagctctgaagaagtttgttgagcctttgattacaaagtcaaaggatgacacgactaactctcgtcgtgttgtattcagcaatctgcaagacaagcaagttgtaacggaactgttcaaggaaatctctgtgaagattgctgaccgtccgggtggttatactcgtatcatcaagacagggcaccgtctaggtgacaacgctgaaatgtgctttattgaactcgttgattacaacgaaaacatggctaaggaaaaggttgctaagaaagctactcgtacccgccgttctaagaaagctactactgaagctgctgctccggcagaagctccggttgctgaagcaccggcagttgaagaggcaaaagcggaagaagctaaagctgaataaatcgactattcttttcaatataaaagccgtctcttgtgaaaggggcggcttttttaatttgcattcggatattttgggaggaaagaagatatatctttcctaaacattcattaaaaggttctactattaaacaattaaatgaaacaaactgttatctttgcagatagatatggcaaagtttctgaaggtgatattatttctggtccttgctactgccttttgtggaagtgtgagtgatgcatttaccgtacagacggtagatgaaatggttattgccgctcaagttagtttgggagaagagggggatacacagagaaatgatgttcggcaaggaagttatattccggctccgaaattgccatatttgtcagatgcagaacttgcaggttccgctggaactactcagttgctcaccttttcacgtgcgcaacgttcgtatacaacagaatatatcctttcgttaaaagacatgatagagcggctggctcatcgtgacgatgtactgtcattgcatcgctcgaagttatttgataccagcacctcttatcgctgccaccctgcgtgtgaatattatgtatttacgctcaggcgaattattatttagacgtttgaatgaattcagatttatttgccttatgtggtcatagactgtacgaggtgattattggtatgttttatcagttaaacttttattcattttaaacgatttaaattatggcaactcaagcaattgacgcaactatttttgcgtctacacaccccgatatcgcaaaacgcacaagtgtctccggactaattttttcagtggcaatgctgctgttaggtatccttatattcgcatcaacttttgaagtaactgaccgctcatctacgcttagtatgttgttgatggtgttaggtacggcatttttcctcttaggaatattccgtttgttctggaaatctaaagaagtggtatatattccgacaggaagtattactaaggaacgcagtgtgttcttcgatttgaaacacatgggtaagttgaaagagatgattgaaaaaggccagctttctattgaagaaggtgtaaagagtgaaggaagcggtaatgtacgtttggatgttatactttctcaagataataaatttgcagccgttcagttgttccagtttgtgccttatacatacactccggtaacctctgtacattattatacagggaatgatgcagcaaccatatcggctttcttggcgaagtgtaaagtgaactaaccctcagggtttctggacttaactttgaagttatggggatcagtcggtaacggctatccccatttttttcattaggaaacaggcattcatattctgagctactccttcgcgcagacgataagaaaaggtcagttcattatctgtgatgtcggcttcgaatcggtaattatggatgtcatcaggataaatgtcggcaagcgtgccgagcatcaggtcgtgagtagcgatgataccatttgcctgtaaagtcatgaattgtttgataagggcgagcgagcctttctgcttatccatggagttggttccttttagaatctcatcaaggatgatgaagaactcttcaccggcttgcagtttgtcgatgataagtttcagacgtttcagttctgcaaagaaataggattcgttatcattcagggagtcgctggtgcgcagactggtaatgagttgagcaggatacagttccatactccgggcgcaaacgggggtgccgatgcaagccagcaaatagttgatgcctaccgtacgaagatacgtacttttacctgccatatttgctccggtgataataatgaagaaaggacgtttttctatatcaatgtcattgcgtacacatttgtcgcggttcatcagtggatgtcccatagatgcggcgcggagactgaaagaccgggtggcaataatagggtaggagtaatccggatgattataggcgaatgtggccagtgaacacagagcatccatgtgagcgatagctgtcagccagcgtggcagttcagaagcatattgctctttccatccttcaatctgtatgattttgcggatttcccagaagaataatccgttgagggtagcatatatgtaggcgttgtttcgctgatcgagttcgttcataagcttacttagacgctggatggagtgagaagccgtttgtttttcatcaccgatccactctctcacttccttcaatatcggacttttcatgggttggttctcaataagtcggagcagattggcatacgttgctaatatctgtaacttctttccgtagacagcttgcattttagtgattttactagtgaaacaaaagctggcaaacacaaagcataaccatagaataccgaaaacagtgagcggaataatgcctgcaatagccaatgctatacataagatatttattccacccgccaatagcggtagcatgcgaaagaaaacatttttccggaagacactgggactcttagcccatgcctttaattcatcttcatcagcagcttttcctttatagagcagtcccagaatacggaattcttgtcgaaagttcaattccgatgtcagttcgcgaatggcttcctgtcgggattctatctctttcttatttaccagatgcgtgcccagccaattggctaacaagctttttccaagttgcgtacaggtacggtttatatactgaaaaagagaatgtgggccaaacacatccaggtcataactgtacaggtgtgccggattgataaattctgctccgtcttcaaaagaagatgtgtcatagttcagcgccgaaagttcttgctcattgattgcaatctttttttccagatagtctttccggtgaaacagccggttgtgatactttatcaataggataaaaggcagaagtgtaacggcaatgatccccgttaatactatccagcctgatgaccagaaatatataattcccgcaattcctgcaacaaataacaataatcgcagtgagcctatgcggtaaatcttgttttgtactttatttaaatccgaacgtccttcttcagcgatgcgctgataagtggcggttatttcattgattgtgttcattctattgtttctttgccgcaaaggtaaaataagcctgctttataaccaaatgcttcatctgctttctcttgctctaatgaagaacttagcatccatatttatgtttcctttaagagaagcgtttgtttctcagtgtgaaactgtctgtttctcggtgtgaaactgcttgtttcaaagcatgaaacagacagtttcaaggcatgaaacttgcagttccaagtgatgaaactattcttatccatcaaggtagtaagttttcgccttagatatccctttgatgagtattgcttatttttccagttactcgcagctttgaagcgtattatgcagtatagagataagcccaagtataaatatgcatgaacataaatctgccaaaattgcatttttcttttcaataatttgctcttcttggataaataatgtaactttcgctcagataaaactgttttagaaagaaaagcttggggtatgaaaaggtggtggttattaggcatattcggattattggttgctttgcatgggagcgcccagcaagtgatatatgccaatttgaaggaactggtggaagatcgtggcgacacactctccacattgaagatagagaagcgctccaagaatcagattttactgatgggaggtgctgactatcgcgtctcggtagatgacaatcccggtctctgccgatatttgaaatcccgttgttatgcggtgagggctgactcggcgttatacgttaactgtaagaaagtgcgttataaacgtttccgtttcggcggttggtatgcccctgccatttggatacaggggaaaatttatttctacgcacagcctgtaggttctgtggcggcaagtaccacacagcctgccgacgctacaaagctaggtggagatgtcggtacggccattgctgcttcagggctggtcaatgcgcgggtttattatgaactgaatccggaaacgggtaaagtagagttcgtaggaaaagacaaaatgctacagctactaaaaaatgagccggaacttctgaacgccttcttacaggaaagcagtgaaagtgcggaagttacaggtaaatacttactacgcttaaaatgactaaatgataaataaatcccggtatcacttgttgatatcgggatttatttctatattgcggcagcttacagaagtaaactgatgacattttgtaacctttcatcctgcatgttatggaaataaccttaagtaacacattgcccccttatcccacttttgtagagggtatccggagggctcctgaccgtggcttcacactttcgcccgcacaaactgccacggcgttaaagaacgcattgcgctatatccccaaagaattacacgagaccctcgcaccggagtttatggaagaacttcgtacccgcgggcgtatctatggctaccgatatcgtccgcaaggcgacctcaaagcgaaacctatcgatgcttacaaaggaaattgcattgaaggcaaggctttccaggtgatgattgacaataatctctgcttcgacattgccctctatccttatgaactagtcacttatggcgaaacgggacaggtctgtcaaaactggatgcagtatcgtctcattaaacagtatcttgaagtgctgactcaagatcagacactcgttattgaaagtggacatccactgggcttattccgttctaagcccgatgcaccacgcgtgattattacgaatgccatgatggtaggtctctacgacaaccagaaggattggcacgtggccatgcaaatgggagttgccaactacggtcagatgactgccggaggctggatgtacattgggcctcaaggtattgtgcatggcaccttcaatactctgctgaatgccggacgtatgaagctcggtattcctcagaacggtgatttgcgcggacacctgtttatatcttccggtttgggcggcatgagcggtgcccagcctaaggccgccgagatgtcgggtgcagcttccattatagccgaggtagatatgtcacgtattgaaacccggcatcggcaaggttgggtagggcatgtcacggattctattcccgaagcattctcgctggcgcatgaggcgatggacggcaagaaaccgatatccattgcttatcatgggaatatcgttgacttgctggaatatgctgtaagccaagatatacatatagacctgctttctgaccaaacttcctgccatgccgtttacgaaggcggatactgtccggtgggaattactttcgccgaacgtacaagtctgttgcatgaagacccgcagaaattctgtggactggtgaatgaatcgttggtgcgccatttccgggctataaaagcccttgtagagcagggtacctatttcttcgattatggaaactcctttatgaaagccgtttatgatgccggagttcgtgaaattgccaaagaagaagatgataagaatggatttatattccccagttatgtagaagatatcatggggccggaactttttgattacggttacggacctttccgctgggtatgtctcagtggtaaacatgaagatttgataaagaccgatcatgcagcgatggaatgtattgacccgactcgtcgtggtcaggatctggataactacaattggatacgtgacgcggaaaagaataatcttgtggtaggtactcaggcgcgtattctttatcaggatgcggtaggacgtatgacgatagcgttgaagttcaacaaaatggtacgcaatggtgaagttggacctattatgttgggacgcgatcatcacgatgtgagcggtacggactctcctttccgtgaaacttctaatataaaagatggaagcaatgtcatggcggatatggccgtgcaatgctttgccggaaactgtgcccggggaatgagcctcgtagcactgcacaatggtggtggtgtgggtattggaaaagccataaatggcggcttcggtatggtatgcgatggtagtgagcgggtggatgaaatacttcgttcagctatgttgtgggacgtgatgggcggtgtggcccggcgttcatgggcacgcaatgggcatgctatggagacgagtgaagagtttaaccggacacatgctgatggttatcatattacgatgccatacgtggctgatgacgaattagtaaataaatacatatcataaaaagagaatcatgaataaaatcatcgaatgtgtccccaacttcagcgagggacgtgacttgcagaaaatagatcaaatcatatcccctttccgtggtaaacaaggtgtaaaactcttggattacagtaacgacgaagaccacaaccgcctggtagtaaccgtggtaggagaaccggaaccccttcgtgatgccgttctcgaagctatcggtattgctgtaaaacttattgaccttaaccaccacaccgggcaacatccccgtatgggtgccgtagatgtagttcctttcattcccatcaagaatgtgacgatggaagaagctatcgtcctttccaaagaagtaggtgcagaggtaggcaaacgctataatcttcctgtctttctctatgagaaatccgcatccgctccgcatcgcgaaaatcttgctgccgtgcgtaaaggtgagttcgaaggtatggcagaaaagataaagctacccgaatggcagcccgactttggtcctgccgaacgccatgccactgccggaaccgttgctatcggtgcccgcatgccgttggtagcctacaatatcaatctgaatacacctaatctggatatcgcacatgatattgccaagaagattcgtttcattggcggtggcctgcgttattgcaaagcaatgggagtagagttgaaagaccggggcattactcaggtttccatcaatatgacagactatacccgtaccgccctttaccgcgcttttgaactgactcgtgtagaagcacgtcgctatggggtcagcattgtgggaagtgagattatcggccttgttccgatggaggcgctcattgatacagcttcttattatcttggtttagagaatttctctatgcaacaagtgcttgaggcgaggattatggaagaataatagaatgataaaagaacgcaaattacgcaaattacacaaataaagtttttaaatatgaccgagaacctgataattttcaatgcccgcgttgtaacccccatcggcttttccgcccgttgcggcaaagagatgggggaactatgcatcattgataatgctacaatagaagtaaccgacggtatcatttcctatgtcggcccttcccggggcgagatgcgtgacggatattatcaacgctactggcactacaatgctcgtggcaaatgcctgttacccggcttcgtcgattcgcatactcactttgtatttggtggcgaacgtgccgaagagttctcctggcgattgaaaggagaaagctatatgtctatcatggaacgtggtggtggcattgtaagcactgtaaaggccacccgcgaatgtagttttattcaactccgctccaaagccgaagtttttttgaggcaaatgagtaatatgggggttactaccgtagaaggcaagagtggctacggactggataaggaaacggagcttctgcaactcaaagtcatgcgtagcctgaataatgacgaacataagcgggtagatattgcatccacttttctgggtgcgcatgccgtacccgaggaatataagggacgtacggatgaataccttgatttcattatcagtgatgtcctgccttgtgttgccaaaaacgaactggccgagttttgtgatgtcttctgcgaacaaggcgttttctctgtcgaacaatctcgccgtctgctgcaagcagccaaggaatatggtttgggcttgaaactccatgccgatgaaatcgttccgctggggggtgccgaactggctgccgagctttctgctgtttctgcagatcatctgttgcatgcatccgatgcaggtatccgcgctatgcgggatgccggaaccgttgcaactttactccctcttacagcttttgccctgaaagaaccttatgcacgcggtcgcgaaatgattgattccggttgtgccgtagcccttgccacagatctcaatccgggcagttgtttctccggttccattccgttgacttttgccctggcatgtatctatatgcatcttactattgaagaagctatcaccgccctcaccctgaacggggctgctgccttgaaccgggcggatagtatcggcagcatcgaagtaggcaagaagggagattttgtagtgctgaattccgataattaccatttcctgccttattatgtcggtatgaattgtgtaaataccaccatcaaagaaggagtgatttatcctgtattgtaaaaacctttaaagaaaaataccatgttagttgatttaacagtaaaagaatttttgaataaagtggcgggcagtgatcccgttcccggtggcgggagcattgctgccctgaacggtgccgtagcttcggcacttgccgctatggttgctaatctcaccatcggcaagaagaattacgaagaacacgaggaacttatgaaccatattgcttctctcgcactgagagagaaagacgtattcatagctgatatagatcgtgactcggaagcctatgatgcggtgtttgcatgcttcaaaatgcctaaggctaccgatgaagaaaaagctgcccgcagtgctgccattcaggaagctactaagtatgccgctcttgtccccatgcaagtagcacgtaatgcctacgagctgatgtcggtaattgccgacgttgcccgtttgggaaaccgtaatgcagtgactgatgcttgtgtggccatgatgtccgcccgttcagctgtactgggtgccttactgaacgttcgcatcaacctgggttccatcaaagataaaacctttgcagatgaacttcaaagagaagccgatgtgttggaacgtatggcttgtgaccgtgaaaaagaagtattggatgttgttaaccaagaattacgagtatgaaaaacgtctatcatgtagggtccggtgaactcacattcgacatcatcgaacgaattatcaacgagaatctgaaactggaactggcacccgaagctaaagaacggatacagaaatgtcgcgactacctcgatcataagatagccgagtccgaagaacctttgtacggtatcaccacgggcttcggttccctgtgtagcaaaaatatatcccccgatgaactgggcaccttgcaggaaaacctgataaagagtcatgcttgtagcgtcggtgaagaaatacgtcccgtcatcgtcaaactaatgatgttgctgaaagcccatgccctgtctttgggacatagtggtgtgcaagtcattaccgtgcagcgtatcctcgatttcttcaacaacgacgtgatgcccattgtttacgaccgcggttcgctcggtgcatctggtgatctggctcctcttgccaatctcttcctgccgcttatcggtgtgggcgatgtttattataaaggtaagaagcgcgaagctattagtgtcctcgatgagttcggctgggaaccggtgaaacttatgagtaaagaggggcttgccctgctcaacggtacgcagtttatgagtgccaatggtgtgtttgccattctgaaagccttccgactctccaagaaagccgatcttattgccgctctttccctcgaagctttcgatgggcgtattgatccttttatggattgtatccagcaaattcgtccgcaccggggacaaatcgagacaggcgataatttccgtaaactcctggaaggcagtgaaatcattgctcaatacaaagcccatgtgcaagatccgtattctttccgctgcatcccccaagtgcatggtgcaacgaaagatgccattcgttatgtctcttctgtcttgctgaccgaaattaattctgtaacggataatcctactatctttcccgatgaagaccgtatcatctccggcggaaatttccacggccagccacttgccatttcttatgacttcctcggcatcgccttggctgagttaggaaacatttccgagcgacgggtagcacaactcattatgggactgcgcggtttgcctgaatttctggtagccaatcccggtttgaactccggttttatgataccgcaatacgctgctgcttccatggttagtcagaataagatgtattgctatgctgccagcagtgattccattgtttcctccaacggacaggaagatcatgtcagcatgggagctaatgcagctaccaaattgtaccgtatcatggacaatctggaacacattctctccatcgaattgatgaatgccgcacagggtatcgaattccgtcgccctttaaagacttctcccgctttggaacgcttcctgaacgaatatcgcaaggaagtcccttttattaaagacgacattgtcatgtacaaagaaattcataagacagtggcgtttctgaaccggacgaagttcgattattgacattcttcccaataaatctgccggaagtataataaacattaatatagttaatctttcaaaggaaactcaattagagaattgagttttctttctatatttgcccagttttattccgaaagtggacattcttctacttgaaatctaaaaaattaaagagaaaatagaaatgaaaacgggcgacaatatgaaagaacaccctcaaagattagagttgcgggagcgtatcatcgatactgctctgaattcttttgctactcatggtatcaagagtattacgatggatgacattgctgcggcattaggtatatccaaacgtactttgtatgaagttttttctgataaagaaaccttactgatggaatgtctcctgaaagctcagcgtgagggagatgcttacgtgaaagatgtctatgaaaaggcttcgaatgtattggaagttttgttaaaactctaccagcggagtatcgagaagtttcacaatactaataaaaagttttttgaagacatcaagaaataccctaaagtctatgctgaattgatgaagcgtcgcaaccgcgattccgaggaaacgattgctttctttaaactgggtatacagcaagggtacttccgcgatgatgttaattttacgattgtaaacctgttggtgcgcgagcagctcgacttgctgatgaatacggatctctgcaaagagcactctttcctggaagtatatgaatctatcatgttcacttatctccggggaatatcaacagaaaaaggtgctcgtaaactggaagaatttatccgggaataccgtaagagccgacagcccaatacggaataaaaaataatcctaatatacatacagatttatttttatggacagacaactatttttggcaagtaagaaaattatgttgactgtggtccttttattggctataagctatgtacaggcacaggaaacaaaagaacccctaaccttgaccctcgacaaagcactggaaatcgcacttagtgataatcctacgataaaggttgcagaagaggaaatagccctgaaaaaggtggctaacaaggagacctggcaaagtttattgccagaggccagcattggcggaacatggaaccatacgattacggcagcccagatgaaccttggcggtcagtctttcaaaatgggtcaggacgattcgaatacagtaagcgggactctgaatatcagcttaccgttatttgccccttcggtctacaaagcaatgtctatgacgaaaaccgacatagagttggcagtagaaaaatcccgtgcttctaagcaggatttggtgaatcaggttactaaagcgtattatcagttaatgttggcacaagactcttatgaggttttgcagaagagttataaattggcagaagacaattataacgtggtcaatgcaaaataccagcagggagccgtcagcgaatttgataagattagcgctgaagtacaaatgcgtagtgtaaagccgaatgtcatttcagcgggaaatgccgttaccttatccaaacttcagctgaaagtgctgatgggaataacggaagacttcgatctcaagattgccgataatctggctaattatgagaccgatttgtttgctaaccaattgaatgaactgaatgaaggtttggtgaacaataccacaatgaagcaattcgacctgaacatgaagatgcttaatcagaatctgaagtccctgaagacgaacttcatgccgacactgggaatgaactattcttatcaataccagtcattgtataataataactggaatgtgttcgactataattggggcggaagttctgctttggtctttaccctgaatatccctctttataaagccagtaactttacgaaactgaaaaccgcacgaattcagatcaatcagttaaaggaaaaccgcacggatacggagcgcaaactgaacatgcagattaccagctaccagaacaatatggcagcaagttcagagcaggtggtaagtaataaagagaacgtaatgcaggctcagaaagcagtggaaatagctggcaagcgctacgaagtaggtaaaggtacagtgctggaactcaacagttcgcaagtatcgttaacccaggctgaactgacttacaaccaatctatttacgactatctggtatctaaggctgatcttgatcaggttttgggtcgcgactattcaactaataagtaaaaagaaaaatcacaacgatatgaaaaaaagtgttcaattaattgccctagtggcagttgctctgctgagctcatgcagtggtggagagaaagacaaggctacagctgaaaaggtagatgaaaaaccgagagttaaactggcctctgtgaccgcacgtcctgtagatcagatccaagaatataccgctactgtacaggcagaagtgaaaaacaatattgctccttcttctccggtgcgtatcgatcagatatttgtggaagtgggtgaccgtgtttctaaagggcagaaattggtgcagatggatgctgccaatctgaagcaggcgaaattccgtctggataaccaagaaatagaattcaagcgtactgacgaattatataaggtgggcggcacttccaaatccgaatgggatgcagccaagatggcattggacgtacagaagactacgtataagaatctgttggaaaataccgcattactcagccccatcaatggtgtggtaacggctcgtaattacgataatggcgatatgtatagtggtggaaacccggtgctggtagtggaacagatcactccggtgaaactgatgatcaacgtttccgaaggctattttgcgaaagtaaagaaaggttctcccgtagctgtcaaagtagatgtgtatggtgacgaagagtttgaaggaacgataaatctggtttatcctaccattgacccgaatacccgtactttccctgttgaagtgcgtttgactaaccgcgaccagaaagtccgtccgggtatgtttgcccgtgtaacgttgaacttcggaacacaggaacacgtagttgtgcctgatttggctatcgtaaaacgtgccggttccggcgaccgctatgtatatgtatataaggacggaaaagtttcttataacaaagtggaactgggacgtcgtatggatacggaatatgagttgatttccggtgtggataacaactcacaggtggtcgtagcaggacagtccaagttggccgatggcgtagaagtagaagtcgagaaataatgattaacgattagtgattagtgattgcttcttgtgtcataatgctacaaagagctcatcactcatcacttatcactaaacactaataacatgagtttatacgaaggagcggttaaaaaaccgattatgacctcgctctgctttttggcagtagcgatatttggtctgttctctttgtcaaaattgccggtggacctttacccggatatcgagaccaacaccatcatggtgatgacttcctatgcgggagccagtgcgtcggatattgagaacaatgtgacccgtccgttagaaaatacgctgaactctgtcagcaacctaaagcatattacttccagatcttcagaaaacatctctgtgattacactggagtttgaatatggatatgatatagatgtgttgacgaatgatgttcgcgataaactggatatggtaagctctcagcttcccgatgaagtggagacacctattatctttaagttcagtacggacatgattcctatcctgctgctttccgttcaggcagaagaaagtcagccggcactttataaaatattggatgacaacatcgtaaatccgctggctcgtgtgccgggtgtgggtacagtgtctatctccggtgcacccaaacgtgaggtaaatgtttattgcgaccctaacaaactggatgcttataatctttcagtggagaccatcagttctattattagtgctgaaaaccgcaatacaccgggtggtaccttcgatgtgggaagtaatacctattcacttcgtgtagagggagagttcaaggaccccaaggaaatggagaatatcgtagtaggtacgcacaatggagcttccgtttatttgcgcgatgtggcaacagtggtagactctgtggaagaacgtgcgcagaagacgtatagtaatggcgtgcaaggtgctatgattgtggtacaaaagcagtccggtgccaactctgtggctatttcgcaaaaagtaattgatatgttgccgcagttgcagaaatcgttgccgagtgacgtgaagctgggtatcattgttaatacttccgataacattctgaataccattgacagcttggaagagactatcatgtacgccatgttgttcgtaatcctggtggtatttgtattcttggggcgttggcgtgctacggttattatctgtatcactatcccgatgtcattggtagcctcatttatctatttgggtattatagacggcggttcgctgaatattatttcgctctcttgtctttccattgctatcggtaatgtggtggacgatgctattgtggtacttgagaatgtgacgacccatattgaacgagggtccgagccgaagcaggcagcagttcatgctacgaacgaggtggccatctccgttattgcctcgacgctgaccatgattgcggtattcttcccgctgactatggtgagcggtatgtccggtgtattgttccgccagttgggttggatgatgtgtgtgatcatgactgtttctactatttcggctttgtcatttacaccgatgatgtgtgcgcaactcctgcgcttgcaaaagaagcagagtaagatgttcattgctctttatacaccgattcagcgtgggctcgatgctcttgacgtatggtatcaaaatcgtctggattgggctgtacgccatcgtataactgttatgatcggttgtgctgctttctttgtggcaagtttgttctgtgccaagtatattggtacggagtttttcccggcagctgataatagccgtatcggtgtgaacttgcaacttcccatcggtgcccgtgtagagcgtgcacaagcattggcttcggaactgacggaaaagtggatgaagcgttacgaaggtgtgatgaaggtttgtaactatacggtgggacaggctgattcggacaatactttcgcctcaatgcaggataatggtagccatattatcagctttaatattagtttagtaagtccgggcgatcgtgatgtaaagctggaaacggtctgcgacgaaatgcgtgaagacctgaaggcttatcctgaattggataaagcgcaggtaatccttggtggtagtaccggtggtatgagtgcccaggccagtgctgacttcgaggtatatggttatgattttaccgcaacggataaagtctcggctgagctgaaagagaaactgctggatgtaaaaggtgtaagtgaagtaaatatcagccgtcaagattaccaacctgaatatcaggtagactttgatcgtgagaaattagcattacatggactgaatttgtcaaccgcttccggttatctgcgtaatcgcgtgaacggagctttggcttcttattatcgtgaggacggtgatgagtacgacatccgtgtacgttacgctcccgagtttcgtacaaagattgaagatttggagaacattcttatctatacaccttccggtgatggtgtccgtataaaagatctcggtaaagtagttgagcgctcagctcctcctaccatcgagcgtaaggaccgtgaacgtgttgtgacggtatccgccgttatttccggagttccgttgggtgatgtagttgccgatggtaatgccattatcgataagatggacttgccgagtggtatttctatccagatttcgggttcgtatgaggaccagcaggattcgttctccgacttgggtacactggctgtactgattatcattctggtatttattgtaatggccgcccagtttgagtctttgagttatccgtttattatcatgttctccatcccgtttgcgttcagcggtgtgttgatggccctcttctttacgggcaccaacctgaacgtaatgagtttgctgggtggaatcatgttgattggtatcgtggtgaagaacggtatcgtgctgattgactacatcacactctgtcgcgagcgcggtatggcggtactccactctgtggttacggcaggtcgtagccgtttgcgcccggtattaatgactacgttgactactatcctcggtatggttccgatggctgtaggtcagggtgaaggtgccgagatgtggcgtccgttgggtgtggccgtaattggtggtttgacggtatctaccatcttgacgctgattttggttcccgtgctttattgctcgtttgccggcattggtatcagacgcaaccgtcgtaagatcaagaaagatcgtgaactgaatgattactatcaggttcataaagagaagatgacgaaaccaagaaaacaataattggatttatgatttatgaattgccattcggtctttatcgttttgtggttcatagatcataatcataaatcataaatcataaatcaaatgaaatccgtatttataacattcgaccaggcgttctttgagcgcattatggcgttactcgaccgtcagggttgccgtggattcagctattggcagcaagtgcagggacgtggcagcaagacgggagagccgcattatggcagtcacgcatggcccagtatgtgctctgctattattactattgtagacgaagctaaagttgacccgttgctcgatgcgctccatcggatggacgaagagacgcagcaactcggtctccgggcattcgtctggaatatcgagaagactatatagtttacgcaagacgctagcatagcctgtgcaagaccgtcgcatagggtagtggaggcgttcactaataacttgatagagggaaatcttacaaaacgtgaagatttccctctctttttatgtcttttctctatctttgcaaatcctttatggacaacatggaaaagaattatctgaaatatacttgcatttgggcattgattatattggcgggcttgttactgatgtacttcctgcccgcttttacggtaggtgaacacgtaatgaggcgtgtcgacttgctgggtgacgtgcgtactcagaaagatattgcggaagaaccggacagtttgcttccgcctccgccgaaggtgaaacctgcatttgtggatacctgccgtgcgggtatgacgtgcattgaagactacagcgactctactctgcgcggcatgacacctttttaccgggctttggatgaattggcacagcgtccccgtcaggtacgtattgccgttttcggagattccttcattgaagcggatattcttactgcggatttgcgtaatatgttgcaggataaatatggtggttgcggagtaggttttgttaccattacttctatgaccagcggattccgccctaccgtgcgccactcgtttggtggttggcaaagccattctgtaatggattctactttctttgaccgcaagaagcaaggtatttccggacattactttgttcctcgtcccggtgcttatgtggaattgaagggacaaaacaaatatgcttcccatctggatacctgtgaacaggcttctatcttcttttatagtaaaggagaagtcaccctttctgtgaatgtcaaccggaacgaaaagcaaacccgtactttcctggctacagatgatttgcaggaaatgcaagtggatggaaatatcggttctgtccgttggacggttgatgaggcggactctaccttattctatggtttggctatggatggtaaaaaaggaattatcctggataatttctctttgcgcggcagttcgggcttatccttgcgttctattcctgtgtggatgatgcacgaatttaatgagcagcgtccttacgatctgattatcttgcaatatggattgaacgttgctactgaacgtgggcggaattatgacaaatacattgcaggtatgcagactactattgatcatttgaaggatgcatttccacaagcaggtatcttgatagtcagcgtaggtgaccgggattataagacggaagatggtactctacgcacaatgcccggcattaaaaatctggtgcgttaccaacaaaatctggcggcggataacgacattgctttctggaatatgttcgaagcaatgggaggagagggaagcatggcgaatctggtacatgccaagccttctttggcgaattatgactatacgcatattaatttccggggaggtaagcacctggcagacctactttatgaagcgcttgtgtatggaaaggaacagtacgacaggaggagggcttatgaagcggaataatgtaaatagggttctattgaacgattttttaggcgcggattacgcggattacacggattcttttgtctcaagaaagttacatttagagtattcgtatctacac

SEQ ID NO: 6298 - DNA, 67011 bp, Unknown
  gut microbiota DNA sequence
gacaaaagaaaagataacaggactataaattatagaaaaaggttgtgccaacgttttgacacaacctctttcttgtaagcccagtatgggcgtacgctctagggtgcaagtcccgagcgagtcctgatagtgggaatcgttagccaatagcaagggtgttcatagcgatgtggaatctgaaggaagttggcggcaaattctcggccttacgaacagaaactggatacaaggccgtgtatggaggacaagtctgcatgacaaggcaaagtcctataactatctgaatccatacatggtaaatgcagagggcacatgagatgaaagcgtacgttcttatctggggaggtctcacggacacgtgtcactacttagtgtcatgtggttgaaacaagatttgtcgtgagaagtcagccgagaccatagtagcgatatgagagtgtcgtcaagggtcgaaccattaatctgtaagtcaaatgaagactaccttatgaaagcaaaaatgcagaacgaatcaatgagattagaccggccggatagtagggtggaacccaaggttatggccggtttgcagaccttcatggggataagcgaacagggacttacatcctttacctgtccgaaggagggattgctggagtttattctctctcccgccaatatgaatgctgcttacaagaaagtgaagagcaacaagggtagcggtggaatagacggaatgagtactgaagccctgcttgcttacctgaagaagcatggttcggagtttatagcctccctccttgaaggcacatacaaacctaatcccgttcgcagagtggaaatccccaaggcaaacgggaagaaacgtgggcttggcatccctacggtagttgaccgtactgtacagcaagccatcagtcaggtgcttgaggtgctttatgaacctcagttctgcgagatgagctacggcttccgtcctcaccgtggtagtcatagggcattgttgaagtgcggcgagtacatcgagcagggatacttgtttacagttgatatggatttggagaagttctttgacacggtcaaccattccaaattgatagaggtgttgtcttgtactatcaaggacagtcgcttagtatctctgatacatcgctatctgaacgcaggtgtcatcaattgcggcaaataccagcctactcaactagggctatctcagggtggccctttgagtccaatattaagcaacattatgctcaatgaattggataaggagctggaacgtcgaggtcacaagtttgttcgctatgcggatgatttgttgatattttgcaagagccgtaaggctgctcatcgtacttacgatcacattgtcccttttatagaagggaagttgttcctgaaagtgaatcgagaaaagaccaaggtagcctatattcgtgacatcaagtttctttcctacgcatttggtcgtaggaatggtaagtgtcagtatctgttgcatcccgaaagtatcaagaagatgaaacataagattcgtgagttgaccagccgtagcaacggctggggttacgagtatcgcaaagagcgtcttcaatggtacatctgtggctggtcgaactatttttcagtggcaggctacaagaaccgtcttgaagaatgggatagctggcttcgtcatagaatccgcatgtgtatatggaaatcatggaaacgggttaggacaaggtatcacaacttaaagaagctcgtacccgatgagaaccgtgtgcgtatagcagctttctgccgcaagtcctattggcggatgtcctcgcaccccacggtacatgaagctatgtcggatgaacgcttgttgcgtgcaggttaccccacgtttgctggttgttatgtggacttcaataaggcaaaagggtattggtgataatggaaccgccgtatgccgaacggcacgtacggtggtgtgagaggacgcatgaggaaataatcctcatgctcctactcgatttatttaattttagaaatttagattactcatagattgatttctttacttcctttgtccggttcacattatggagcacttgttttatctgcttaaatgcaacctcttcttgtggattgaacttatcactttccatatatttcaggaggctatagcgtaattgacgggctacaggtcgggtattgagattctttgccaggtctgagctacatactaatagctttccgtctcctgcttttacctcgaatagtaaacctaagtttctgttcttatagaagttatctaccattctgacaatcggttgcatattgttctttaaactgtcgagttccatggttgtagcattcttgcaaatatcccaccattgccagttactgtgcatttcagttggaaagtcgactaatgccggatgagcgggatcacagaggattcccattgttcccggttggttagggaagtgcacaggactccagaatacttgtacgaatttgccttccagcccattaatttcctctttttccgggttcagcaatacctttttcccttgacttaatgctttctctgcatcggcaaagctacgggtataaaagatttccttaccaacttccggtacttcctgaggatatacccaaacattccaggagttttgatactgggttcctgtaaaacggatggataaacttaattggtcggcaacggatatggattccagaggaacagagatgcttcccagattaaatgcattccccacaggtatttcttgtttatccagattaccttgtgcaatgaccgttccttttgaatcacttaatctccattccggttgaatatcactcaggactttatcgctgaagtttgcagcttcaaactgagctttaaaggtttcattatttacataggtagctttctcaaagcgtgctaatggtactaccggagaacagaaattccggaattcttcaggagtgattaaacctttgctctcccagaatgcatcgataattccaacgagtgcagtgccctgtccggggaagtcatgcaggtccaatagttggaaaccactgaatccaggagtctttagtgctcgttctatttcctctttatataaaatagttgccagtttgccacttgccatcaggttgccttctgccagatggagccgtcctttctttttaaggtctgccgctacggctttgaagtttaatggcatcagattacctgtgtatttatcaatttcttttagattggggaatacactgtattgtccgatttcgtgtgtaataagtgggacagacaaaccctctatagcactggagaagtctttattgaaacttgcaggctgatcgtcgaaaattccttgtccgcgtacccagccgtttctagtccactgtgtaacccagaagtcgtcattaggttcgggccagctaccatgtcctggttcaaaggtaaatgtagtagtcatatacaaatgacggctatcctgctgcttaatggtggtgagtaatttatccatgacactaaaatccccttgcagttcattacccagactccagaaacagaatgatgggtgattaccatattctttcatgatgtgagcagcttcagtatacagaaaatcaacagtgcctttatcttcacctacattgagtgtccatagaggtaattcgacctgaagatagaatcccattctatcagctacgttgaaagcagcttccgggggacaccaggagtggaagcgcaggtggttcatgccataatcacgggctgcactgaatactttttcccagccggcttcgtccatcggtggatatccctttagcggaaaaatgcaacactccagtgttcccctgaggaagagtcttctgttattaatctgtaggagagcattttggttcgtcagttttctcataccgaatatttcacatttcgaatcagtcatgccttccgtttcaagagttgcggttgcttcgtagatattaggggtgaattcatcccacaacattgggttgttaatgggataagtgaatgttatttcagtgttgttaacctgtacctctttatctgccagcttatttcctttagggtctttgacagcgaacagaagtttaccggatactggggatgaaccgttacttccgatttttacactgacattgaccgtctggttatcaatatcgggtgttaagcgcaattcctcaatctgtaccttatcttttgctgtcaatgctatttttcccaagatgccattccacatagtctgggtatcgttcgtataagcatgtgcaaggtttttgactgatatgtcatgctgtctccggttatcgatgcgtataacgattttgttattctctcctggaacaagatacttactcaagttgaagtaatgaggagtggtaagactttcattaaatccctctactttagtaccattgatccatacttgcgaattccatatcacgcgctcaagggtaaggaagacatctttttcgttccattctgccggaatgaagcattctttcttgtaccaggcgggaccgagatagtcgaatttacgtttcaaatttaaaaatatctccttgtccatggtaggttcgagggtacatggagttccatagccggcatcacaaagtgttccggggagggtgatcttatctggaaacgattccatataccattttcctgaaatgcctttatccatactgtccaatgctacttcccattctccggagagatcaatctcgcgtactacctgtttacacgaagtcatcaatagggctatgatgccccaggcgattaaaaatttacttattctcataatatcaaattaaaatttccattctgttttaattctcagtttcttatcttttactcttacaatcagaggatagcaaaaaggtgaatcatattttgacagaacacttccgtttcccggtggaatgccaggagcttcccccgtaataacttcaaactcttgcccctcggatacttcaatcttcatatatgcttttcctattttgcaactaaggggcgatgattgctttcgcactattgtgttttttatatagttgtagcttggcgagtcattgaggatgataacttctccggtttggctgaataccggtttctctgtaagtatcaatacataatcatagaggtgttgctcatcggaacgggcagtaagtatatctgtaagtttattcttctttaaaattaactttctttccattgtgactccagaatatgcgtccggagcttctgccgaaacttctcctccgtccttatatgctttgaatgccagcaatttgccggttgactctttttgatctttagcatctacggttagtgtgctgtgtgataaagtttttcggtaccatttagtaaatgcaggtaccccataggcacatgtccccatatccgatacaatctccttttcaccgtcatgaatggaaatggacagcttatccggatggccgtgccctccaccatgtggaccgtatttcatgactaccgtctttgtgcctgatctgagtacagcatagcccgtttccttaaaatgaacggatggccatgtttccattgatgttacttgaggaatttctatattattctgtaatgcttcaccgaagttcctgtctgtgtatcggtaacactgttgaagtacattcaggaaaaatggatcattgttgtagcgttggcaggctatttcatataggctgacctgagcaattaaagactctccataccatccgtcattgtgggctggaaaatatagatctgcatacactccggatgcaggagcaacgagcattttatatagtttcctgtcatatagattgatattacggcaacgtacggcatcggctgacagaagcatagctcgtaaaggataatagtgatatgtaggagaaccttcgccccaccaaccgtcattcataacgtatcgctccatttgggcatggtatccacattccggatcattgattgctacgttaatgatgctgtcattttgtaatgctactcctaatgctatcagaccgctattgtgccatacttgccaattggcagttcctcttcttttcaacaaaagctcagaacaaggtatgagataacctttttctatttctcttatttcgttagttgtcattatggatttggctaccatataggctcggcagacatcactggcccatgcagattcatcaaggctttgaccaaacattttgcctccccagggacctactttcctggctgtgtcgtggtccagataagtaatatatttcgatgcgtaatccaataacatatttcggatgtattcagcatagaccttattgccagtggcaaggtataaatacatacagttgcgcaaatatgtataattatgagtatgcgccacatttacccatgcccagtcgtaacgcttattccctgtccaataatgcttgcattgtgaacagtaatgtgcttccggcttattccagtcgaatgaaaaacgtactttgtgttcggggcaaaaataatcgtgtatatgtcctccttccaatagaggcacatgtaattggaacttccgccgcgaatctacagtgtcttttaacgttttgataatcttttgtccccattcggtctttgcagctgaacgcatattgtttatttcactttcagtaaagaagtaatatccatcttgcgctgaaacaataaaagggatgaaaagtagtaatattaaaatcttgtttctcatttttagtgctttaagtatttaatatattcggttgcagccattaggaaagcacctgtaccataaacttccgtatcatttatatctactttctttgggtcggcaccaatgggttgtacataacctactttaccatcttcgtgtacaatggaagtaagtgcatgccatgctttctccgctatggatagatatttctccttttcaagatatccccggttgattccccaaaataggctgtatgtgaagaaggctgacgaactggtttccggcatcggataagaggctatgtctagtaaagaagaatgccaaaagccttgtttatcttgtaatgtagatatttttcccatcatttgacgaaaaagggtaatgtaaaagttgcgggaaggtgcattagctggcatattgtcgatgatgaaggttagtgcccctgttacccaaccgtttcctcgtccccagaatactttctccccattttgctcacgcatattgatgtatctggtatctctgaaaaataaactatcggcaactgagtagagactgtcataagtgattcgaaactctttatccataaattcgaaatactttggttctcctgttattttcccaatacgggcaaaagaagttggtgccataaacagggcatcgcaccaacaccagcgggaatgtgagccttcactgtaatagctcagactgttgtgcttagggttggcaataagtgtatccaaggtctcaacggagttttggatcatgtatggttccttgtatttactgaataatatggcataaggttggattatacagatatcatcagcaaaatatatactaggtccagtctgccatttattcttctcgcccatggtcagcaaaaaatcccaatacttaggatcatcagacatcttcgcccattctgccataccgatatacatggttgcattagtccatgcccagtaaacatgtgagttggcccattgagaaccttttcgtacctgattttcgaaattcatcagttgccagtcggctacctttttcataatcgtcatggtttgcttttggcagtattcattccattgtgcctcctcgaagaaatagttcaagatgagtttggctaccacccggtgtcctttctcattggggtgattgctctggctcatatatatatttaaatcttctccattttttcttttctccttgaaggttgcatagcagtctatcagtcccgttttataatcgtgggctaaacggcgtatttggcgactatgctgttcaagtggagatttatcgtccaatatatcttcggttaaatcgggtgttggggttaggagaatgattgggatgttttgcttctgcgcttcctttatcattttctcccaggctttcaaagctctttccagtccgatgctgcggtcattcaaagcataatctatgaataaaatgtccggacgatgaggtaatacctcttgtttaaaccgtttggccccctgttcggcattttcaccaccaatggatgtggtgatagagttgaccactgcatatggatatatttctttgacagcttccaggacttgatgggggtaagcttgaagcgtttttacattaggtgtgttggcatagccggaaggtacactgtgtccatgaaatacaaggtttacagttctgttatccggccatttcttttgcagttcttggcggatctgcgtgaattcgatggattgaccggtttgggccatggtatcaaaccctaacaatgtgcataataatagatacagatatttcatgttcttcatttttattttttttctctactttcaaatagttcaatactctcggatataatttttcgaagcctttgctatcgctggtcatgattactctatttatgactcctcctccaatgggaaacgccatggggtgagttgagtatgctcattccagtatttctgctgggcatataaattatatgtcacggctgaaaaaaggatcaacaatatcaaagggatattcttgtgtttcatggctgaataaatatcttgtcaatcatttcgttagtaagggtcacttccggagagaaatcgggtgaattaaggtagtttaccaggctgtaatacatctgccgtgcaacagggctatgagccataatccggtcaaaagcaatagaagtaaccattagttttcctttacccaccttagcttcaaaaattaggcctatctttcgattgttgttccaatctggaataatctgcactaagggtttaaattcataagtagtatgatcaagtaacataggtttcgaattacgcaccaagtcaaaccattgccagtttgaatgttcttctgtaggaaaatgtttgaataaggcatgtttgggattacataaaatgcctaaagtatttggaggtgtaccagaccagactgcattccaggatatgctggaaaaacaagggggcacgtcagattttacttgagcagtatcagcaagcaacaataccgttcctcctttctgcaaataaagtttaactctattattccattctctggtcaacattacttttttttctgatatttcaggtagcttgtctgggtaaacccatatagcccagttattggaaaatgaggtgtttctaatttccatcttcaataccatctttgcagcttgacaaattccggtcaagggaatagaaatttttcccaagtcagttatgccaccattcggaatatctagtttaaaggagccatctttataaacactaccattcagatattcgagtttccagtccactaccgctccttttagtttttcttttaaaaaattggccatttgggcatctccttcaaaagtctcattttgagtccacactaacttattagtacgtaataaaggaagacaaggactttgcatctgtttgaatgtttgggcatccacataaggcttagcgtcatagaaaacatcaacaactccgaccggtgaagtaccctgaccagggaagtcatttagttgaagtaaatgataacctccgaaaccaggggtacggaaataagattcaaattcttcttttttttgaagaacttggaacttgcctgaagcgatatgaaaatcatgagcctggtcaagcatttttttattacggagatcttctctaaaaagttcatagttataaggttttaaaacccctatatatttagatatttggttaaaatcaggataagcacaccattgtcctatctcatgagtcaccataggtattgagaacttttttacataatctatgtaatcatatcttgtgtttaatggctgcgagttaaaacgtcctttcagaccttcctgccaacgctgtggacgagcaccataaaaatcgaaaaaatcacttccttccactgtaggataaccagatgcagccacataaagatgacgtgagtctttcttccattcagttagcatttcttttagaaaatccacacaatcctttcctactaattcattgccttcgcaaaagaaggcaaaagacggatggtttccatattccttaaaaatgcgttgaacttcatctaaatagaaagcattggttgcttcatcttctcctaccgtaaaacgccagtccgagttttcgacttgtaaatacaagcccaattcatccgcaacttgaaatgcggactcagggggacaccaagaatgaaaacgaatgcagttgaatccgtaatctttatataccttcattacctttttccactcctcataactcatcggaggataaccggtaatggggaactcgcaggaatttacagcgccgcgaataaatgtaggaatatcatttatcgtgaaatgcgtaccttttgttccaaagtcacgaataccaaactttattttttgcacatcactcttaccgcaacactttatctcatagtcaatttcatacagattaggctcaaattcatcccaagtgtatagcttatctcccaaatcgtagtaatgtaccaagcgtattaaagaatccgaactatcaaaagttgtatttttctcctttagatgcaaatcttgagaatcattcaaaaaatgacaatttatccgtatatcgcctttaaccggtaggttgctatagtttacaatctgtgccacaatctttagccttttttctttttgtaaaggatatatctgtacatcagcaatatgtaccttacttacagcctggatttccatacgtccaataataccattccagttagtctgtgtttcagcactgatggcatgtgtataggctatatcatggatattcccattatctactctaatacgaacagtattccagtctccaaactttacataagaagttatatcatacaagtgtggtgtagaaagactttcctccttcccaacaaattttccattaacccacacttggctttcccaatgtactcgttccaaaaacagaaaaagttgttggtctttccaagattcaggaataaaaatattttctttctcataccaagctgctccactatattcaaacatgcgagtaagccgaagcgaactcatatcttgcgttttaaatccttttccagcttggtctgtagatcccggcagagttatttcttctggaaacctagatacaaaattacttccttttaccggaatactaatattcaaaggatctaatttgaagttccagataccagctaatgaaatatgatcttttgacgtttcattctgtgcgtgtactgaaagcagacaaaagcaacttaatatgagaaagaaaatattacgcatagagtcaatatttcaagttattcattacattattccagttcaccaacaaaagttacgacagactttgccggaacaacaatctcattagtttttattgccgttccctttcctaaattggatgtttcagaagtggtgtaaggagttaaagtctgattcttcagtttcaaatcttgaagattatattttcggttgacagaaccgacattaactgctaccaatactatctttttggaagaaccgtctttgtatgcgctaatcataacatctttaccctctttctcagggtctggattttcggtaataacggcaacacgtttcatacccggacggacaaaaaaagaataattacctagcatccacataagcttagagtccctggcaaatccatcttttttgcaatagtctgtaacttgtgaaccattatttgttccatcatccagatataccaaaccgtccttgtagtctgcacgggtaagagctgtccaccaagaccaagaggaagcatttaccaatgtcaaatcattgtgaatagtacgtgcaacaaaaagtgccgtttgcatacccaaatcgcgtttatttccgtttccgttaggaatttcggactctccggggctttcgaggatagaatactcagtttgccaatattttaagccgctgtgctcttttattttatcattcaaggctttacgatgtgatactaaatccttgacgggccaaacagtccaataactgtgtccagtcattactcgctctacattgggcagagaagcaatgctcaacggagatgacggattccaaaaatcatcaatctgattatcaaagttctcattatctacatttttatacaaatattgaatactcccagcttcgcccaatgctattttggtagccaatcctcttttgctgagtctttctgatagcaattttacgaactgagatatttcttcattagtggcgggagtcccttcctggctgcctttactccaatcccattgtggctcattcacaggacttaaataatcaaatttaactccttctttcttctgcaagttatcaatgcattctactaaaaagtctgcataatcaggcatcatacctgccttgatattcatccttttctctttaattgaaaagcctttcccatttatggacatatgaaccggagcacttaggttaaaagctagaaaacgctcaacccctctgtctcgagcagcttttaaaaaccatctctgtccttcatatttattccaattgtaagtaccatcagctgataaaaagcattcagaccgtctccactcatccgcaatgtcgctatcaagcccttgttctgtgcttcccgcaccaatataaaatctccacatggacaagccgatgccttttggatttccattttcatcgacttcttggctaaacagccaatcggcaatttgatttcttttctcttccggccaatattttcctaccatctgacagcgccaagcatctgatgccccaaagccgtcaatcgtctgcatttcctgattcaagtctactgaaatatttctcaccttattgtaaacaggcggttctggaatctccaatttggaactacatgccgtaactgaaaacagtgtacagatacctaatatctgcaaatatttgctatttctcatttctataaaatttaagtttgatctcttatgtttattagtaattaggattctgtgttacagtaccaaagctacgatctatttccgattgaggaatgggccataccaaatgtttattgatatcgaagttgatacctttgttctgtagctctttaaggttgctcgtttcatactgatccgttgattcatacatattgtaacgaacaaaacttccattcggaccgaacaaaccagctataacgggttgattagtgaccggatctatctgtctcctaatatcaaacagacgcaatccttcaaatgccaattccattctgcgctctttccaaatagcataaagtatttcgttaccggttacagttccttttttcggagaaagttttactcgagcacgaatgatgtctacatcatccattgcttcatcaaacatacccaagtgaaaagctgcttctgcacgcgtcaaatatatttctgccaaacggataattggagtattcaaaggagcgttatatcttttatcttccaatgtcctacgagtagcgataggaatatagtatttacggattacacgcccagacttattctgtgccaagtcaaatacataagtagggtttaaatcctcatcaccatatacagcgtcaccacaaaccgttattgtactgcgccttcttatctcatcttcttccgaaagataacaattttccaaatcgctggtgggtactccccatccccaaccatccataatgtcattggggtctttactggggaaattttccaaactttcaccacgtcctccacaaagtgtagaaaggggattgcccaaaatcttacccacttcagggcttgtctgaacttcaataagcgattctataccattgtgattattgacgttccaaatatccagaaaatcaggttctagtttacagccactattcatgattgtggtatctgcataatgataagcttctttccattttccttgatataatgaaactcttgctaataatgcagtacaagtccatacagtagccctaccttttccttcacttccatacgtagtatttaccatgtgaacggctgacttaagatcattctctatttgctgatatatttcttctttactagaacgtcctagattcatatcattggatgaaagcattttaagtaccaatggtacaccgccaaaattacctacaagatccaagtaattatatgcgcgacaaaatagagcttcaccgacataagacttttttttgtcttcagaaataggagcttcgggaatagagtttatggcaatattacatgccataatattcttatatctctccttgaataaatctgtaagatatcccattctattgggagtgatcaagtattccgaagctggactgaatccatcagtagattgtccggtatttcccatccaagcatcatcggtagccgtttcatttgttattctggtatgagctatcggctgccagtcattattcaacaatgcacgcttatacaagtcaatgacaaagtcacgacattctgtatctgtcttaaaatagttatccaaatcttgaacacctcttttttcgtgttcaataaaatcttcacaagacataaatcccaatgaagccgctattatgaaagcaaatatattctttttcatgatttacaatctattaaaatgttacatttacacctactgagtatatacgttgtactggataagtccatccgccaaatccaaaactcaacacactacctgaaacttcgggctcaacgccgttatagccggtcaaggtaaacaagttttgtcctgctatatataatctcagtttattgacgccggggattttcttaaaagtataccccaattgtaaattctttagtcttaagtaagaaccatcctctatgtagaaagatgagaatttggtaaagttctcattatgatcttgagtagataagcgaggaacatagttagaagtaccttcaccgtgccaagccatatcaagtaaaccgctcaccttattcacttttccaccactgccggcagcattgtacaattcttgaatattctgattgacaagatcattaccgatactggcatagaagtttgccactaagtcaaagttcttataacctaagttcagattaagtcccatcgtcatatcagcccatggagaaccaatctttgtacggtcatctgcattcaattgtccgtctccgtttatatccttaaatcgaatatcgccaacttgtgcgttaggttgtaagaactgtcctttgttattagtatggcgattcacttcagtctgattctggaagataccgtcagccacatatccatagaagaaagcaggttcttcaccttctattgtctttgtcttttcaccatttccatacaatggatctttatcacctgtcaactccgtcatattcacgttaaaagtagtcaagtttaaagtagttccaagggtaaaatctccccaacgatcattgtagttgattgtcatttcaaagcctttggtacgcatagaacctacatttgtccaaatcttggcatcacccgggtagccggaataactgggataagctttctgaaaaagcatatctttggtattctttatataatactcaaaagatcccgttaaacgattatcaaataatccataatcaataccaaagttatagtcttctacagtttcccatttcacatcctcatttttaaccaaactggggtaaacagtattcaccacattatcgcccaatacatagtaaccttgtcctaattgagacatataaactcctgaaggtagattctgattacctacacgcccccaacctattctaagtttaaggctgttaagtacagattttatactttccataaacggctcattagacatacgccaagctatagaagctgaagggaaagaagcccatttattcttggacaggaatttggaagaaccatccacgcgataagtagctgtaagataatacttatcattataattgtaagttagtctacctaaataagacaaaatagaagtggtagaagaattacctccggtctgtggattaacggtaccagcatccaattcatgtaaattatctgagttgttgggcattttttcatagcttccccacaaagtagtactattccattcttccaaggtgttacctaccataaaagaaaaattatgcttatttgcaaaagtttttaggtatgtcaatgtattctgcaaactccaattacgataagtgggtttgttacgcgtgaacttgttgttcgtctgaaattcatgagctgcatcaataacaaaatccggtgcaaacgtattggaaattcgagtatctaagtctatagagaattgagatctaaatatcaaatctcttatcggcttaatttcaagataggcagaagatgacaaagcataagaattattactttgattccatctgtgaacataaccaactggattccaaatttgagaaggagaacgggaatatacactatattcattttcagtaccatttaattcatcctcaggtttaaaaatgggggtaataggatccactctgtcaaagtccgaccaattagtaggattcccccatgattcataacgcggatttaatgagaatccagctgaaaaatacttattaaatttataatcattggtaaaacgagctgtaaatcgcttatatcctcccttctggtagaaagaatcttgctgaaaataatttaaactaaccgaatacttattcttctccgttccaccctgtacacccaaacttgcattcaattgaggggtaaactgacgaatacccgcatcccaccaatttgttgttttacctgcaaaagaagcgggattttcaaattcctccggatagccggcctgacgggcggctgtattcaatatttcagcatactccacagcatctgccatattataaggatttttcatttcctgtacgccataatgcatatcgagatagaatgaaggtttgccttccactcccttacgagtagtaaccataataactccatttgaggcacgactaccataaatggcactggcagaagcatctttcaagacttcaatgctctcaatctcattaggattaaggaaattgattccttcgcccataggaaccccatcaaccacatacaatgggtcagtggacaagttgatggtagagaaacctctaatcaaaacctttggctgaccacctggattcccggctcctacaattgttacaccagccacctttccttgaagactttcggtagcattgcttacattcattgatctcacttcttttcctttcacagaagagatggaacttgttaaatcactttttttctgtacgccatagcctactaccaccacttcttgaagcagctctgaatcttctaccaaagttacattaatgacagttctattccctaccttttctacaatggttttgtaagagataaaagagaatgacagtttggaatctattccagctactgttatactgtattgtccattcacatcagatatactaccattggtagttccttcttcttggatattaacacctatcagaggctcatttttgtcgtcaacaatagttcctcgaacctttatctgcgcattagctgtaaggcagaagaagaaaacaacaagagaaaatataatatttcttttcatgactatatacatgatttaatgattattctttcaataatttagcacgcgcaatctcagtatcaataatgaatttataacttcccttttgatttaccttcaaataaggttggcttgaacccatataatcaataataccattttcaagtaagcgccaatatttactccagcccggataggtaatggttacattaagctgggtttcgttcaatataagagtccgtccaagtatatatggattttccgcgtccggtgtgagtagacagtttttattagagggatcccatccggcaccttcaaatccgtaaccacacatcgtgatatcaggagaatcgtgcacagctgaagaaggtatataaggagtcacagtatatgtttgctctttggtatttgccacaatctcatagtatccctttgttggtagcactattggtgcggcagaaggattatttagcaatttaccgttctcttctgatacgccaaagcagtgaggttcaaaagtgctctcctgtcccaaaaagtagatttccttattatcacaatccgcataatatttgaaagtaaatataccatttgattttttatgatagagcatcggtactccacaaacatcggctgttaaatcagttcccttaggaacatcagccaggaacaaagtaaccatttcactggaaacaatatatttaattttctgtgttttcctgttagcttctacaaagttatcaattgctgttatttttagttcatactcttccggtttggatggtaaagaataagttttgttgaaagagtactctttctcgccgtttaatttgattctttccatgatacccaatatcggttcttccacatatactgaatctaagcctgaatcatcagtgactttaaaggaaagtgacaattccatcttgctttccaatagctgtactgttccgtcttgtggtgatacatttgaaaaattaggagcattaaagtctccatccaaatgtaatgtaagctctttggtcacaacatttccagaaacatcctccagtgcaagatttactttatatacatcttcatttttcgtatcctttggtgccagaaactcataagccaactcatattctgtaactaaagtatctgtcgggaatacaatttccttatccagataaaattctggaattacaattttcaaagacttaaggcctaaatcatcttttaaatcagccttaatcacaaactttctgttgggattagaatacaattcatcacgcaacacttttatttccggggcatcagatgtaggataggagataccctcatcgtccgaacatcccataaagcaaagcagcattaataatgctgataatctaaataaacttttcataatattaatattgttgttaactaatagtttatttctgagtgaattactgtacagggaaatgtgtcaattctggcacatccccgtacaataagatcaatcacatcctgaacacttgtttattcacatcaagtcttttcaccttttcataatattcttctgctagttcttcctttcctaatccgctgtaacctaatgccattacataatagcagtgtatttggttacggatattcagattgtcttcccatatggcaagctccggcaatgatactgcgaagtaatcaattttacagtcatcgaagaggtgctttttaccgtggtcgattaacttgttgaagcggcttctggctttattctcttctcctaatgctctccaagcaagtccttgatagaatatcttgtcaggttgctggtcattatagtagaatgcttgttggggttctgtggaaccttgggttgctttcattaaatacttggttgactcggcatcattacccagcttctgataagctattcccttgtaataatcgacttcattttcttcagcattactcagtttaccttctcccaagttatgcggatagaattctgtctcttttaaaagtgcaacagcctctgaatatcgattctctttaatcgcctttttagctaattctacccgacagagtatgtattgccctgtcactttgccttcaccaccttcccatgggtggaattttcgattggatatcagatcttttgctttttcataatcacctaaaagattgtagagtgttatccgttcgatacataagtcgtctcgttgttctaccagatccagatgttcttccaggagtgccagacgttctgcatgtgcccttcccatcttcttatataactggtctagttccataaatatgcgggagtctgttttatccagttcgaaagccttttccaatagctgtcgtgcttcttctttcttattccttttattgtaataggccagtgaaagattacgcaaagcagtggggaactgattgtttatttctacagatttctcccagcaactgattgcttcctcataacgacgatgtgcataccaaaaattacccagataataaggagccttataatcagcaggattcattctcatagcatctgtcagtacattgatttcatcgattctgttggggaagcacttatcaggagatagactttgtgctttctgataccactgtcgggctacttcctcgtttccagaccttgatgcaaagtatcctaacatataagctgccataggatagacatcagttcgtccttccatatagatatgcataatttgggatgcttcttcatacattcctgcggaggcaaaatcaaatgcatactcgatatagttgtgtacgctgccattgagcatacttgtcatctcctgtaactcagtaagattattcccaataaaatatttctcaaaccggcatcctaggttaaacttatcaatagtcaatgactcttcgataaacttcagggctttttcagtttctccggaatgtctcaggatggaggctttcaactggcgtgctttatggttatgccaattgtggataagggccaggtcgacatgttccagagcggcattccaatcttttctgatactgtctatctgagccacaccgaagtatccggcatctctccaggctgcattccaggtggctttgtaataggcactatatgcttcatcatacttaccctgcattttcaggctccatcctaagttataataaggttctccatcatatggattaggattgcgctctgtcagtgtctttattgctgtatggaaatactgttcagcttcttcaaatttgccccggcgcatattcagtaagcctacggcattattacaacgtatatcacccggttctctttccagtgcttccatatagtaagccattggatcatacgttgcatgtcggtattgctccagatgtagcccggtcaggaagagttgctcaatagaagctatctctttaggctgtttggcagctttagccggatccggggtcggtttaatttcaggtttatcagctttatactctaaaagtaatttgccattattatcatataaagataggatcaaattttccggcagttgctccgctatgtttacctggcttttgaaaatattttccggtgaaagtatggttactttatcaaacaggatttttcctgttatgtctctcaattctactttgatattttcttgtctgccggttgcatatacgatgatatgggcggtattttctgctacatccagattcagaatgaaatctttggtcgcattttttacatatcccacttcactatatggcaggaagtattgcttccatgacttttcctcataaggttgtaaccatgtgaaatcaggttggttatctgtataaacacctgtcatcaattctatgtaaggaccatcttcatcggtaaggtttctgtcccatgcaataccaaaatcaccatttccccaagtccattgtttctttcccggtgagaggtgatgatcggctacatgtaatagtcctgcctgtacatgctcttcgtagccacctacaaagtcataacgtgactttatggccatgtacgaagtggggacagggatattcttatatttggaaatatcgacaccttccgaatagtcctgtttgtaatatatgcctgtagctatgggaaaattggatacatctctttttccatgatcgaaaacagcatgtacatcgggtggaaaaaccgagtggtagtggtcgttcacaacaacggcagggttcgcccaccaaaggaaagtttgggggaacggagttcggttatagactttcacattaatttccagataagctttgtccggatgaagtgtaaatccctgcattcctttcgtattgaacatacgctctacttcattgcaccagaccgttttactaccgtctgcattttcttcaatcatacagtcggtaggtaagtatgtacttggacgatgatgctgaggccagttgaattcaattccgcctgatatccaaggaccggtcaaacctactaaagctggtttaatgacttggttgtagtagacaaagtgacgtttcttcactttgtcataagccatttgtactcgccctcccaattccggcaagatcataattttaaggtattcgttctcgaggaagtaggcctgatagtctttttcttttttctcgtcgcatatcttttctacgacaggataagggtaaactactcctgaacttccttgataaacgcgcttttccagaaagatgggatttttttcttcctctccgatttcataagttggaagtttgattgtttctttccaaacttttacaattcctttttctgagagggtcggtttaattaaatattctgtaattttctccataaggtatttattgtttttttagacaataagggtaagttaagcgatgatttcttgtcatcgtttaagtaagatttaattcaataagtgatatgctgtttttaactagttaattctttctcaatgctttccagtgattttccttttgtttcgggtaatttgattttaatgaacacaaatccgagaatacatatgattccgtataaccagaaagtaccataggcacctaatccggaatttaataaagggaatgtatatgtcagtacaaaacaagctacccaaagagagaaggtggatactgccattgccataccacggatacggtttgggaaaatctcagataatacgacccacgtaacgggagcaagtgtcattgcatagcatgctatggctaatacaaccataattagtacagccatcccggttatattgaggtagtaacatatgcccatgatgatataaatgatggcaagccctgaagctccgaataacataagggagcgtcttcccaacttatctacagtgtacatacctacaaaggtgaatattacgttcgtcacgcctgttactacaatattgaataggatatcagaaacaccataacctgcagctgcaaagatttcctgggcatagttgaatactacgttcagtccgcaccattgctggaaggctgcaataactatacctattaacaatattcccggtatcttgccttgaaaaagcatgcggatatttaacttttctttagtggcacttataactgttttaatgctttcaatttcttttttggcatattcttttccacctatgtggcttagaatattttcagctttaccgtattgtaattttgtagccagccaacgagggctttcgggaatgaagaatataaggataaagaagagtgctgaaggtactacttctgcccagaacatccaacgccatcccatttgtccattccatgtttccagaatgttttcgccgggaactaccggttcggcgatcaaccagttgacgaactgggctgccagaatacctaatacgattgtcaattgattgatcgatacgaacttccctcgtacatggctgggtgatacttcggctatatacatgggagataagttggaagcaatgccgatgccaatgccaccgaatatgcggtaaaagataaaccaattgaggtcattgacagctcctgtacctattgcagaaacggtaaaagtgatagctgctattatcatcaaaggtttgcgcccatatttatcagataagctacctgcgattgttacccctattaaacagccaagaatggcactacccatgacccatccctgcataccgggagaattctcaattgcaaagaagatttcatagaatggtttggcacctccaatgactacccaatcgtatccgaagagtagccctcccatggcagataccagcgaaataagtaacaagtaaaaattgttgctaaatgattttgttttcatgatatacgatttattgtatggcaaatgtatgccataaaacttaataaaaaaatgcagattgttatcaatttaatgtataatcttattatatttatggctgtaaatgcttgaatatgttgactgaacaaagattcatgtaaaatactatgatatatatgtaaaatactaccaaaatcagataccatggaaaaggttgcagaaggttttaaaggagagaaggctatcgttacaccttataatatacgtaaccttcaacgagagaataatattacaaaacaattattcgtcagtcacatcggatattatcctcatgcagaaaatcatttcagggaaagggaaaaggggactaacgagaatgtctttatatattgtgagagtggttgcggttgggttagttataaaggtgaaaagtacatcctgactaaaaatcaagcttttatattaccggctaatgagcaacatgcatatggagcggacgaagtgaatccctggagtatctattggctgcatttctgtggcgagggtgtggctatgttctcctctataataggtaagactatatctttggaggagtcggataagagccgttatgatgatcgctttcaactatttgaagaaatgtatcagaacctggaaatgggatatagtcctgaaaacctggaatatgttagtttttgcctgatgcattttttggcttctttgaaatatattaatcagttcagagaaataaagaaggtgagagaaacggattttgtacagaagagtatctcctttatgaaggagaatatggagaataagattacgctggaggatatagctcagcatgtgggctattccgcatctcatttcagtgcattgttttcggagagaacttcttatgctccaatggaatattataaccaattaaaaattcaacgtgcttgttcgtttttgcaattctctgatctaaagatcaaagagattgctttccgtttagggtattacgatcaattccatttctcgaaagcttttaataaagagatggaaattactcccaaagaatataggaggagatataaataacttcagatataatgtgaaatgccccctaaaagtctgtagcaaacttttagggggcattttttaataaagaaaaattggttttgctaagctttagcttttgggagaactcagcttctttctatatacaatcaccattatcataatacctatcaccatcagagccagtgctgcataagcgatgccttctgttacatgcaagctcttcggatcaaaacgcatttcgatggtatgctttccggcagggacgtacatagaacgtaagatatagtctgcacgggcaatgtcggcaggctctccgtcaatggtggctatccagccgtccgggtaatagatttcggagaatacgatgacgccgtctgtagagttattcgtttcataaaccagacggttcggttcgtagcttgtcagacgcacgctggaaagactgtctttattggcagtggtaatacctttcagaatatctttgaaacgagcatctactacggcagtctctgttggcaatatggtgttcagggcatcgatttcctggttggcattgtccacgtactccacattgttgacgaaccatgcattgccgtaagcgtatggattctcgataggaactgtctgtccttgtccggcagggaggatgaaatacttcgtgttcagcatattcagaacgcggaacttggaagcatccacactgtccatctcaccacctgcggtagcgatagcccgataggcggcctgcatttcgggggaaatatgacgatctatcatttcctgataacgtctcagtttggctgcatgatatccacctacgctcttgtgccagtaagaagttttattctcgctgaatgcatctccggaaaagcttaatacgcggtaattcgggtcagtgtcttggaggatgatttcatcagcttgcgttttcttaaaggtgtcaacctgggcagaacgggggacgaattggtcatcgtgcagataacgcttgttgacactccacatatctactacacagagaatagcgatgccggcaattacgaatgactttcttagttttccgctatagtaaagccacagcaacatgcagccaattacaatgataatgaagctacgcagtgcatcggtgcttaccattgcagcacgcatttctgccagattggaaaggataccggatagctcgtttgcaggaatcatttgctgattgactgcattctgcaacatctgcgcttcctgtgcggggacgaaagttgaactgaaagctcctggaatcacggctaatatcaaagctacaccggcagtcagtgccagactgataccaacgaactttatcttctttttcaatacctctggttcgtccagaatctttttcagagcaaagatagccagtagtggaattgtaaattcagcaataacgaggatagatgatactgcacggaatttactatacatgggtatataatcaatgaagaaatctgtcagtggcatgaagttcttaccccatgaaagaacaatggagaagaatgtggctccgattaatgcccatttcaatggacctttgacgatgaagcagcctagaatgaaaaggaatagtacaaaagcacctacatatacaggacctgacgtcataggctggttaccaaagtattgggacagttgctggtagagtccggcataggtcggattggctttttccatggctgtttcattcagggcgaggggaacggaagcaccacctttaaagttgggtactaataaggtccaggtttcgccgataccataactccattgggtgatatagtcacggtccagtccgctactggtctgtttggcggcgtcaccggtttcgacgagctcgcttttgccgcgcatggtttctttgctgtattcataagtgtgatacaggttcgacagattgacggatataccaatcagcgcagctacaacaagcacaccgcttgccttgaagaattgcggtaaggtcttgttgcgccatgcatcttcaaagtaggctcctacaatgaagaggatgacaaataggaagtaataactcatctgtacatggttcgacagaatttgcagggcaatgaacagtgctgtaataatgcctcctgccagatatttaccccggtaagccagtacgatacctgctattgtaggtggtatataagccagcgtgataaacttccagatgtgtccggcagatatcagaatgaagaagtaggatgagaatgcccacattaatccacctaatcctgccaaccatgtaggtataccgaatgcacgcaacaagatgaaaaagcccagcatcaggataaatgtcaggttgacatacgtaggcaaaaatagttggtagaccttctgtacccaggtcaacggttgggttgactcgtagctgggggctatctgataagtcggcataccaccgaacagagagttagtccagcgtgtatactcaccagtttcttcgcgatattgagtcgcttcttgtccggcacctgcaccggcagccgtgtcatgttgaaaaagaatgcggttttctatatccgccgggaagaaataggcgaatgaaagtactgcaaacataaagatgaccaggaggtcagggaggagctttttcataaaaacggagtttttatgaagttgagagttgagagttactatgcagcattatagtgcagtaaactctcaactctcaacttcgttaataacgatagtgttcggccttatacggtccgtctacattcacgcctatataggcagcttgttcgggagtaagctttgttagctttacaccgattttctcaaggtgcaggcgtgctacttcttcatcgaggtgcttaggcaggcggtaaacaccggtttcgtatttcttgttgaacaactcgatctgagccaatgtttggttggtgaatgagttactcataacgaatgacggatgtccggtggcacaacccaagtttaccagacgaccatcagctaacagaataatgctgtgtccgtcagggaaataatagcggtctacctgtggcttgatgttaacgcatttgataccaggataatgtttaagagcatccacctggatttcattgtcgaagtgaccgatgttgcagacaatagcttggtccttcatctgcgtcatgtggtcgatacggataatgtcgatgttgcctgttgtggtaacaaagatattgccttgtgtgcaggcttcttccatggttactacctcaaagccttccatagcggcttgcagagcacaaatcgggtctacttccgtaaccagtactcgggcaccgtatgaacgcatggaatgtgaacaccccttacctacatcaccatatccgcagactaccactaccttaccggcaatcattacgtccgtagcacgcttgataccatcggctaaagattcgcggcagccgtaaaggttatcgaatttggatttcgttacagagtcgtttacattgaatgccgggaacagcaatttaccttcttcctgcatctgatacagacgatgtacgcctgtagtcgtttcttcagaaacaccacgtacttcggctgctacacgttgccagcgagtaggatctgcagccagtacgcacttcagaattgcattcagttctatttcatcttctgcatggacttctttgtccaggatagaagcattgctttcggcttcatatcccacatgtatcatcatggtagcgtcaccgccatcgtcaacgattaccgtaggacctttaccgccggggaagttcagtgcctgaagcgtacaccaccagtagtcggccaacgtttcacctttccaggcaaatacaggtactccacttgcggcaatagcagctgcggcatggtcttgagtcgaatatatgttgcatgagcaccagcgtacttcggcacccagtgccacgagggtttcaatcagtaccgctgtctggatggtcatgtgcagagaacccatgatacgagcgcctttcaacggttttgtttctccatacttttcgcgaagagccataaggccgggcatttcttgttctgccagatcgatttccttgcgaccgaagtcggcaagcgtaatgtctgccaccttgtagggcagagtagagaataattctttagacatatctatcaatgatttaaaataaaaagtgatgcaaagatagaacattctgattagtaggacaaaagctattggttttttttaaataaaagcctgcaatatgtgttgatataattgaaaagatatgctatatttgctccccgaaaatgacactctacaacatatctgccttgaaatgagggattataaagataaaacgaaagaagaactgctggagataatccgggaactggaagaacagctggcaagccgctccctgccgaccgatccttgtccggatgaagagccagaacgcttccgtgagaaatatggcaaggaaatactggaggctatccctgatatgttgacggtttttgatcgtaatctggactacatagaactactttcttctcctgataccaatcacgtggaaggtctgtccggtaaagataagtcgcatcctaacttgaaggatatagtgccggaatcagaatatcgtaagattcgtgctaatatggaaaaggtggtgcgtaccggtttccccagtataggagagcattcgttacagtttgaaggtgagacgcatcattacgagaatctggtatgtccactgggagataaatacttgttgtgtatgtgccgggacgtgacgagccgggaaaatgcacagcgtgagttagctgctgcccgtgtaaaagctgaagaatccgaccgcttgaaatcggcattccttgcaaatatgagtcatgagatccgcacgcctctgaatgcgattgtaggattttcaagattggttattgatccggggcatgatggagacaaggatgattattgcaacattatcgagcagaattcggaattgctgttgtgtctgtttaatgatattctggacttgtctgctatggaggcgggttctttggggtttgttaaggagaaagtaaatgtgtatgcagcctgtcttgaagaatatgaaaggcaccgaatgaaagttaataagggtgtgaaaatggcgttggatgatgttgacaagaatctgtatgttatcggagataggatgcgaatcatgcaggtgctgatgaacctgttaagtaatgcagctaaatttactccgtccggagagattcatttcggttatcagcttcggggaaatgtcgtacaattctatgtcaaagatacgggtatcggtattccggccaatcgggtggctaagatatttgaacgtttcggtaagattaataactttgcgcaagggaccggactgggactgactgtttcccgtatgctggtggaacggatgggtggacgtatttgggtacgttcaggagaaggaatagggacgacgttctactttacgctgccattattaagttgagtatagcggattttgtagcgataacatctgtttttcttttggacttgatatatcttacttctgcttgctcgttactatatttacataatatgaaagaacacataagaagatttctgtatctattaatcttattgggaatatctgttgacttatactcgaataacccatatattatcaatattaataaaaatagatatggtgcagctaataaaaactggtcgatagggcaagatgagagaggtgtggtttattttggaaatgacaatggactattagagtttgatgggtttaattggaaaataaacacaattcgtaacttctccatagtaagagctgtggctgtttttgatcatcataccatatttacttgtggatatgaagatttcgggaggtgggatagagatatttccggtcaactcaaatatacatctttagccagttcggtgaatagacaaaacttaattaataatgatttctggaaaatattgattgtcggagatacagtatatttccagtcatttagctctatctatgtttataaagagggtaaagttgaacttgtaaccaataagagcatactgtttcttttaaaggttcgcaacgaatattgggtacaaggtatgcaagattcgctgtataaactgtctgatgataaattggttaaaatagaaggtagtgaaatctttaaaggtaaagatgtccggattgtactgccatatgattctgataggtatttaataggtacatctatgcatggattatacttatatgacgggcagcatttttctgagtggaattgtgaagcttcatccatttttaagcagaatgatttgaactgtggcatcttatcttcacatggtacatattattttggtactattatcaatgggttgtatgaagtagacctttccggcaagatacttaaccatttctctactgaaacaaaacttcaaaataatacggttcttgatttatttgaggatagcgattcaaatttttgggtggcacttgataaaggtgtatcctatattcaatatcttgataatatggattgctatactgatcctactaatacaattggtgctgtatatgatgctgtcctttggcatggtaatcttgtctttgctactaatcaaggggtattttatattcctcagaaagagctcgggttggttaatcctatgagaaatttaaagttcatagatgacacacaaggtcaagcttggggattgtatatagaaggtgatgagttattttgtcgtcacaataggggattaaaggttattaatccagatatgcacgtattgaaatcttctaataaaaagtttgatacaggattatacagtatccaaaaaacagtattgagaggaacagagattttgttgatgtcaacctatgaagaactaaaaattatgtttcccgataacagccgggttattaatgtggataattcacatattagtactttaaaaacggaagttgatcatctgggaaatgtttgggctgaaacacctaataaaggagtatacaggtatttattaaatgattctttaacccgggttaaagaatcaggatattatggaggtaattcagacgataatttgccttataaactctctatatcaaaagtcggaggacgtataaccttattgggggacggccgattttatacatataatgatatggataatacaatgaaatcttataggatattagatgactgctttagccaaatacaaaatctgaagaagatagtttatattaaaggtgatctctattgggccataggagacaatacggttttcaaattttattgtgacggtcactcagcctgtattctggagtcttatgatataggcatacataatatatcaatggtagacaagtatgaaaatatttccatattgaatgattcacttagtttaatttgccttgataatgggtttcttctttataatgataaaacagtgcattgtactaaaaataatacagagaaaatatatattgattatgtacagataaagaatggtgaaggtgatctaaaatatcttcctttgacagggaagagtgatattccttatacttacaactctatagcattctattatttgtcaaaaggtgcattcaatagaaatttatattttcaacataaattagagggagttgattctgaatggtctgcctctctgatcaccaataaaatagaatatgaacgtttaccttcgggaaaatacaattttatgataaggacagtagataatctgggtaatatatcagaaattgtatcctatgattttacagtattgaaaccttggtatctgactttttgggcatatgttggttatataattgtatttttgttaattgcttatctggtgtggattataattcttagacgatatcgtaatattcatttgcaaaagatcagatacagggaagcgaaaaggctccaggctgctaacgaaaagttacagagggagatacaagataaaaatgcagaactattcacgcaaacatcttttactatccagaaaaatcagttgataatgaccataaaggaacttattgatgagttttatcatggaccaaaagatcaaaggaatctgcttcttttctatcgtaaaattgaaaccttattaaataataatctaaatactgatgatgattggaaaatgttccttatcaagtttgaagagaaacatccctacttctttaaaaggctaaaagacttgtatccacaattaactgcaaatgacttgaaactgtgtgcatgcttaaaacttaatttcgactcgaaagacatagcttcttttatgaatatgtcagtcagagcagttgaaaactcacggcacagattacgtaaaaagatagatttatctgctgaacagaaactatcagattttataatgtcaatagaataaatactgataatattcagtttattaatgagttaactctttgtgagagctaataatgaggtatatcttctgttaaaaatgaaagtggagtattagaaatgcttcacttttattttgattaaaaactcttcccatatatttgtcggcatgatatcatgagggcacattagatgctacttcatcacgtgaataagttgtagtatctcttggttcgttatttcttataagaaagttactattaattattaccttaaattttactaattatgaattttaattttagaatgttattttggggcacacggaaagattcttttaagaagaagaatattgttctgttgttgtgttttagtttatatacaatttgtatgcaggctcaggcgcaaaccattacgggtaaggttatagataccaaaagtgaaccactgattggtgtaagtgtttcagtacaaggtacttctaatggaactataacagattttgatggattatattcaattgccgttcaacctgggcaacagttgactttctcttatataggtatgaagacacaaacaattactgtggattcttctaatattattaatgtaaccttagaagatgatgcacaagtacttagtgacgttgtagttataggatatggcagtgcaaagtcgaaagatttaacatcacaaatttctactattcgggcagaagaagtcagcaaacatcttaccagttcacccatgcaatcgttgcagggaaaggtatctggaatgcaaatactgaatacggggcagccaggtagttctccgaaagtaagaattcgcggtattggtaatttttcagatgcaaatcctctatatgtggtagatggaatgttttttgagaatattgacttcttaagtaatgatgatattgaaaatataagtgttctcaaagatgcttcatcatcagctatctatggagtaagggctgccaatggggttgtcattatcaccactaagaaagggatgcctgacaaacccgttcagattacttatgatggctatgtcggtttacaaaaagcgtcgaatgtgatgaaaatggcaaactcacgtgaatacactgatatgatgaagaattccggtaatgcggctttttatgatcgggttcaacaaacaatgaacgcttatggatcagcagacggttatccggtggttgatacagattggtatggtgaattgcttaagactgctgttatgcacagtcatgccattaatatatcaggaggaagtaagaatattaattatgttgtaggtgccaattatctttatcaggatggcattatggatgtggctgataatggttaccaaaggattaatgcaagagctaaagttgatatcaatcttcttagtaatcttaaagcgggggttagttttattttgtcgagttcccaaaaagacattgcacctgttagtgcatttttcagagcatatattgctcctccaacattgcctgtttacgatgagaataatgagaaagcaagtcctattaaattttcttccccagctcagttcaattatgcagaatattatgctaatccggtagcaactgcttattataattcggataagagtgaaaagggaatacaaattactccttcttattatgctgaattgtcattgcttgacaacaaattgactcttaaaagtacccttagtcaggatttatacttgctccgttatcaggagtataaacctcagtatacagttagcgataatcagaaagaagcatactcagaattgactaaaaaggatcgtttcgaaagtaactatgtattggataatatcatcacttaccgtgaccagattgataagcattcttttaccttgatggcaggtaattcaattcgtcaggaacgtgtggaattacaacaaataaaaggaaaagacattcctgcaaatgaagaggcttggtattttgaaaatggaactccaaacgaatacactataaaagataagtgggacgctgaccaattaccccgtaaatatagaggaacctcattctttgggcgtgttatgtatgattacgatggacgatatctgatttctgcaacattccgtgcagatggtagttctaagtatcaggataaatggggctatttcccatctataggtttgggatgggtgatatctgacgaagcgtttatgaaaaatcagagaatagttgattttgctaaggtaagagctaattggggacgcttgggaaatgaccgtggacgtgccaattatggcgtagcaacattgaatcagggaagtggtacatctggaatattcggtggttctatggtgccgggatatacctcaataaactactatacagacttgaaatgggaggttgtagaagaatatgatctgggatttgatatttcaaccttgaataatcgcctgcgattggaatttgactattataacagaaaaacgaaagatgctatttttcagaaacaacttccgtttggtgcaggaaacttattgactaataatggtacaatagaaaataagggtatagaagtttctgttaactgggctgataaaatatcgaacgacttcttatacaatgtaggaataaacttcagtacattgaagaataaagtgactaagcttgatggatacaatgtaatcaataccggagatgttgaattcagaacagtgagaatgattggtgaaacagttgattcgttctatggatttgacgtgttgggcgtttatcagaatgaacaggaaatagcggcagatcccgtagctgtgaagaatggcttggaacctggtgattttaaatatagggatgttgatggagatggtgatattactgctaacgaccgcgttatcttaggcgcttatgtacctaagttcctgttgggaggtaacttgggttttcagtataagaatttggatttcaatctgtcatttgccggacaatttggccataagatagctaaccgcaaaagatgggtgagaagatggcagaatgaagtcaactttgataaagacattgttaagaatgtatggacaggtcctggctcaactaataaatatccatcggctaaaggattaatgaagacatggaacatagctaacttcaactctgctatggttgaaagtgcatcaaattttagtattcaaaatattcagatagggtacactctatctaatccctttaaacttgctgacaaaacaacgagtctgagaatcagtctgacagcagagagacctttcaacttctttggttataatggttttaccacggaactcggagcagtgggtatcgatgaggaggtctatccgttatcctctgtttacagtcttggtttaaagttgaatttttaataattaggataatgaaaaaatacaatatattatttatagcattcataatcgttttattttgtagctgtaacgatttcctagataataatcctgaaggtgagtatgaaaaagaatctctcgactactctaaaatcgaaaatatgtttaacccggtttcaggagtttatgctactgcacgttcctataatggttttggcagatgggctttgtatggtcttattgctgtcagaagtgccgatatagaaaaaggtggttcaccaactgatcaggcagaatatacagattgtaaaaactttgaatattctaagattgataatttttggggattgaactattcatgggaagggctatactacttggtgcaagtctgtaacagttcactcgaaatgcttggtcaatatgcgaaacatactactactgacgcagataaaaaacttaatttacaatatcaggctgaagttcgctttattcgtgcttatgcatacttttatctcgtccgtctttggggagagattcccattataagagataatacggatattctgaatacagaaaaagtaagtaaagttccggttgcggaggtgtataaatttatagatgaagaattagatttctgcgtaaacaatatgcctgcattgagacctaatgaaatgccatataaaggacaagctacacaatattctgcttgggctttgagggcaaaagtaaatgcagatataaatgattgggataaagtattgattgctactaataaaatttatgatagtcagaagtttacattgttcgatgacttctatcagtatttcaagaaaccgggaatgcttgccgatgaaactttttttgaacttcaatactcggatgctaattcggcagatatcatagcttctgattcttggtttgaatttcaaggacctaagagtattacgggcgtaaacgatatgaagagtggttggggattcatggtcccaacacaatatataattgacttatttacccgcagaggcgaaacggtcagggcggaaacttcctttttatatactggaaaagcaactccagaaggtgatgttgttaataattcatctgtgggagaacctacggtatataatggaaaagcctatcttccaagtacccagcttactccgggacgtatagattatggttcggggaataatatcaggatgctacggtatggagatatccttttactgaatgctgaggcaaaggtacgtagtgggcaatcgggtgatacgccattcaaccttgtacgaaagagagctaaaatgcctgaattgacgaatgtaactcttgaacaaatactcgaagaaagagaagttgaattatgtggagaatggggtgagagttattttgacttactgcgtacaggcaaagctgcagatgtactgccgaattttgttaaaggcaaaagcgagtattatcctatacctttgccacagaaagatatgaatcctaacttataagtatatccaatactttatatttcaaaacataactattaatccggcatgtatttcggatagaaaaagtgccggattagttttaaataaaagatatgattagagtgattttattaatggttatcctgtcattcggaaggataatatatgctcatgaaccagaatatgaccatgttttctttgataatagcttgatgtctggatcgtattattatagtgaagttgaatatacatcaccaagcttcgtccaaaatataaaaaagaagttgcctataactaatgatgagttcttcacagctaaaaattctttagtattaaattatctttcagcatcgaatgggagttgggatgtttcggtcatctatcctgaatggcggggaaaggattttataaaaaaaggtgatttccttgatttgagaatcttgtttgatgcagaaacgagccttgaggaattgccacttattgctattggctctaatcataaatcagattatctgccgttaggtaattatatagacagaaataataaaatcaatggctggtacctaatgagaattcctcttcataatttcaaaaatatatcttataatcatacaaaagagataaagaaaatattttttaaacaagctgttgcggatggaaagaatcatacggtatatatagatcagattgaattatcgtcccgaaatcagaataaacagatctctgctactccagacataacagtcaaagcttatgaacgtcatagtaatgtgatatgggataaagcaggtcttgaaaatgttaaatatataaagatttataggtcgtgtaatggagaaacttttgaagctgtgggcatacaagatccgaaagttggtttgtatgccgatttttcggacaggccgaataccacttttcaatataagataacctgtgttggttatgattataaggagactgttccgtctaacatcgttgaggttagcactcattatatgacagatgacgaattattgactatggttcatgaggcgactttccgttattattgggatggggcagagaaaatatccggtttggcacttgaaaatatttctggacgtagtaatatgattgccactggggcatcgggattcggcattatgggaattatatcaggggtggaacgtgggtttataacaagacaacaggcagtagagcgtttaaaaaagattgtatcttttttaaagaaggccgagacttttcacggggcttattcccactttatagatggctctacaggtaaagtcgaaccttttttcggtaaaaaggataacggtgcagacttggttgaaacatcatttctttttcagggattattaaccgcccggcaattttttgataagaatacacctgatgaggagttcatacgtaatgtaattactcaattatgggaaaacatagaatgggattggtttaagcagacaaaagacagcagatatctgtattggcattggtctccggatcaaggatggatcattaatcataagcttatcggttggaatgagacaatgatcacttatctactggctatagcatcaccaacacatggagtggataaagatttgtattattcggggtgggcaagccaagaaccttatgcgcgggaataccgtgaaggttggggcgaaaccaccgatggctcgatgtatacaaatggaaatatatattatggagttaagcttgatataggtgtcaatcgtggaggacctctcttttttactcatttctcgtttatgggacttgacccaagaggtttgaaagacaaatatactactcttgactattataatactttacggaatattgtccgcattaattataggtattgtcttgaaaatccgaataatcggagaggatatggacccggctgctggggaatatccgtttgcgaaaatccttggggtacttatggggcctacgaagccatagaaaatcatgaagatggtactatgtctcctgctggagcattaggctcatttccatatacacctgaagagtccatgaatgccttacgcaattattatcgcaattatggttctttcctttggggggaatatggttttcgtgatgcttttaatctgaatgaaaactggtgctcaaatatttatatgggattgaatcaaggagcaataacggtaatgatggaaaactatcgtacaggtttaatttggaatctatttatgaaagacaaagatataaaacagatgaaaacgaaggtctttcttccttgagtcaggaaaattgtataagaaaaatataccataaaaaaacaatatgatgaaaaagaaaaaaatagttctttccgcattactgtttggattatccttaatgactgcatgcgattctcaaaagagtggggatgcgtcgatgaacaaatttattgataaactgatggacaggatgaccttggaagagaagattggtcagcttaatcttcccagctcgggagatataaccaccggacaggcacgcagcaacaatattgcagacaaaatcagagcaggtgcagtgggtggcttattcaatataaaaggagttgagaagatacaggaagtacaacgtattgctgtagaggagagtcgcctgaaaattcctttactctttggcatggatgttattcatgggtatgaaactgttttccctattcctttgggtatggctgccacatgggatatgaaggctatagaacaatctgctcgtatagcggcgatagaagccagtgccgatggcatctgctggacatttagtccgatggttgatatcagccgtgatccacgttggggacgtgtatccgaaggtagcggagaagatccttttttaggtggtgaaattgctaaggcgatggtatatggctatcagggtaaaggtgatagcgcatatcgtgaaaagactaatattatggcttgtgtgaagcactatgccttgtatggggcagcagaagccggtttggactataatacaactgacatgagccgtattcgtatgtttaatgaatatatgtatccttatcaggcggctgtggatgcgggtgccggcagtgtcatgtcttctttcaacgaggtcgatggaattcctgcaacagccaacaaatggttgataactgatgtcctgcgtaaacagtggggattcggtggttttgtcgttacggactataccggtatcatggaaatggtaaatcatggtattggagatatgcgagaagtctctgcccgtgctttgagtgcaggagtggatatggatatggtgagcgaaggttatctttctacacttcaacaatcattgaaggagggtaagataacagagaaagagatagatcaagcttgccgtcgtattttggaggcaaaatataagctgggattatttgataatccttataagtattgtgatactgaacgtgccaaaacggatatctacactgatgaacatcggagtattgcacgccggatctctgctgaaagctttgttcttttaaagaatgataaacagacactgcctataaagaaaaaaggtaagattgctgtagttgggccgttggcgaatacgagttctaatatgcccggaacgtggagtgtagcggtcaatatggaagctccagctacgcttgtggagggtttgaaagaagtggcaggtgataaagttgaaattgtgtatgctaagggtagccatctgatgagtgatgcggcttatgaggaacgtgcaacactctttggacgtacattataccgggataaggaaaaacgttccgatatccagatgctgaatgaagcattaaatgttgctcatggtgccgatgttgttgttgcggcattaggtgaatcttctgaaatgagtggtgaatcgagtagtcgaacagatttgaatattcctgatgttcaaaaaacattattggaagaattagtgaaaacaggtaaacctgtcgttctggtattattcactgggcgtccgttgaccctgacatgggaagacaaaaatgtatctgctattctgaatgtttggtttggaggtaccgaagccgcttatgctataggagatgtcctattcggaaatgtaaatcctggaggtaagctgcctgtaacatttcctcagaatgtagggcagattcctttattctataaccataaaaatactggacgtccgctggctgagggcggttggtttgagaagttccgggcaaattatctggatgtaacgaatgaacctctttatccatttggctatggactaagttatgcacaatttgattatagcgatgtgagattaagtacggatcaaatagaccggaatggcatgttaaccgcaagtgtgactgtaaccaataacagtgagtgtgatggagatgaaattgttcagttgtatattcgcgatttggtcggtagtgttactcgtccggtgaaagaattgaaaggatttgaaaaagtaacaattagagcaggggagtcaaaagatatttcttttaagatcactccggaaatgcttaagttctacaattcggatatccagtttgtgaatgaagttggtgaattcgaagtaatgatcggaacgaacagcagggatgtgaaaaaagcaacgtttagcttgaaatagtttaagggtaaggttgaactttttaatttaatagatatatgaaaaataattttctaatcattcttattataggattaatagtttctgcaaatagctattctcagaaaatactgcatcttgaaaatgacttggtatcagctgattttaattcagaaaatggtgcattgatcagttatagaaacaaacttaccggatgggatgtcataaagaggagtgaactgggacaatcttttcagatgctgatcccattgccggaaagaagatacaacaatgcttatggaattaatcagaaagctccggtcgttgaacaaaagactaatgccttaactttcacttggaagggaattgtttcagatcatctaaaagaactccttccaattacgtttacagggaaagtcgaactgaatgacaaaggtcttatattctcgggtattgtggagaacaattcacagtatgatgtggagtatgtttgttggccctatttcggtgaattgtccgtttcggataaagaagataaattgctctggcagactttacattatggacaggatgctcaatatgaaatgtatccttatttttccactcacttggctaaccatggggtagattatccgactcagcagggctggctgcctgaagaagcatttattttgatacgtaattcgaaagaaggtttctcggtaatttgcgatgatcacattccgacacaattggtacaatgtgtttttgaacttgtaccgggaacaaccaatggtaatatctggtatggattgatgcccaaagaggataatattgatggacaagcggtacgtgtagtgtttaaagccaatcacataacttatacgcatccgggtgaaaagacaatattgacttctgtcatgttgaagccttataaaggaagttggcatactggtgtggagcattataaagagtggcgtaaaacgtggcataaaagtcctgagtatcctgattggctgaagaatgtccattcatggatacaaatacaaatcaatagcgcagaagattatctcaattttaaatattccgatctggtgacttatgcaaaagagtgcaaacaatatggagtaaaagccatacaattaaccggatggaatatcggtggtcaggatagaaataatccttcgcatgatactgaccctcggttggggacttttgaagagctgaaggctgccattgccgaatgtgagaaaatgggagttaagattatacttttcaataagtttacctgggcagatatctcttctgactggtatagaaatgacttgaagaattatgctgttatcgatccttatggtgatccatatcaacatcatggatatcaataccatacttatacccaattgctcaatatcaatacacgcagatttgctccaatgtgtcatctctcggtcaactggcgtaagattgctgataaggagtttactaaaagccttgatctgggagcttccgggattttatacgatgaaaaccaacatcatgggggagcacaaatgtgttttgctaccaatcatggacacaaagttcctgcatatatttttgaaggagatgataagttggctcgtggatttacggatatctataaatcgcgtaacaaggattttatcttatttggagaaggaaattatgattttcagacgcaatattatcatggaacatattttaggacttatatcacgacaattcctctgcacaggtacatagatgctgatatgcctatcatggtagctattccgggacatgtggcacggcatgaattaaatatgtgtttgaaaaataaatatatcataagttatgagcctcgattctttaaaggctggcctcatgaggctcctaatgtctttgcttatggtaagcagattgatgatctgcgcaggaaatataaagattttctttgggatggcatttataaggatgtattgggtgccacggttaacggagaaaatatcttgtattcggtttttgaaaggaaaacagataataaacgggctgtggtggtaatgaattacagtgagactgatgcttcgaatatcaacgtattgttagatgggggaggtaaagttaaatatgcgactcctgaaaatacttcaataatgaattgtgatggttcttatgttttacaaccccgatcggctgtcgtattctttgagcaataataatttgaaaatgatttgtatgaaaagagttagcatattattggtatgtatatgggttacatctttcatggatgcacagagcgattttcctgtttatcaagatgactcgaaacctatggaagagcgcattgaagatgcactgcaccgaatgactttagaagaaaaggtagccatgtgccatgcgcagtctaagtttagttctgcgggagtgcctcgcctggggattcctgataactgggcaaccgatggtccgcatggcatacgtgccgaagggctttgggataaatgggatcaggccgaatggacaaatgattcgtgtattgcatttccggcattgacatgtctggccgctacatggaatcctgagatgtcattgctttatggaaaatcgataggggaggaagctcgttaccgtaataagaatatattgttgggacctggtgtaaatatctaccgtacaccgctaaatggtcgtaacttcgaatatatgggcgaagatcctttacttgcttcacgaatggttgttccttatgtccggggagtacaggagaatggagttgccgcttgtgtaaagcactttgcattgaataatcaggagataaaccgtcattcggtaaacgtcaatgtaagtgatcgtgctctgtatgaaatctatttgccggcattcaaggcggccgtgcaggaaggacaagcatgggcagttatgggagcttataatttgtacaaaggacaacattgctgtcataatcaatacttgctgaatgatattttgcgtagggaatggggatttgatggcgtggttatttctgactggggaggtacgtatgataccaaacaggctgcttataatggtttggatatggagttcggaacaggaacgaatggtttgaccacaggtgttgtcaatgcctacgatgattattttttatccaaaccttttctgcgaatgttgcaggctggtgaaattgatgagaaaatcgtagacgataaagtccgtaatattctgcgcatggtgtttcgtaccaatatgaataaacatcgcccctggggatcgtttggtacagcggagcacgcactgacaggaaggcagattgctcaagaaggcattgttcttttacagaataaaaggagtctgctcccgatcgacttgaatggagtaggaaagatacttgtggtaggagagaatgcattgaaaatgatgactgttggcggtggtagttcttctctaaaggcgaagtatgagatttctcctttagacggattgagaaagcgcgtgggtaaccaggcagaagtcgtatatacccctggttatataagcagaagttccggtaacaataatgaggttacggcagaagccattgaactggctaaagatgctgatctggttgtttttataggtggactcaataaagatgactttcaggattgtgaagactctgatcgtaaaaatctgagtttaccgtatgggcaagatcaggtcatagaagagttgagtaaagtaaacaagaatattgttgtcgttattatatctggaaatgcagttgctatgccgtggatagataaggttcctgctgttgtgcaaggatggtatcttggaacggaagctggaaatgcgttggcttccatactggttggtgacgtaaatccttccggtaaattaccgatgacttatggtgtgaaccttaatgattatggttcgcatgctttgggtgaatatcccggtggaaaagaagaaacctatcatgaaggaatctttgttggttatcgttggttcgaaaagcagaagataagaccattattccccttcgggcatggtttaagttatactacttttagttatggaaaagcatctgcttcgagtaaagtgataacagggagtgatgaattgaatgtcagtctccctgtccggaataccgggagtcgtgaaggcaaagaagttgtccagttatatgtgagagatgtaaaatcctcggtcgaacgtccctacaaggaattaaaagcattccggaaaatacatttgaaagcgggtgaggaaaagcatgtggactttaccgttactgttgatgatttaaagtatttcgatgaggagaaacatgattggatcgcagaaccgggacgatttgagattcttataggttcttcttctgctgacatacgttctattgttggctttgaattgaaacagcagtgatattaataaattgtacacaggaaattaaaaagaaacttcaaatcagattatgatgaatcatttaagtaaactttccttgttatttattccgacaagcttactatgtagttgccaatcggataaaaagaatgaaaaagcagattgtcctaacattgtatatatcatgacggacgatcatgcttatcaaacaatcagtgcctatggtggcccgatatctaaattagctccaactcccaatatcgacagacttgcaaaaggaggaattctttttagaaatgcttttgttgaaaactctctgtctactccaagtagagcgtgtttaatgacaggtttatatagccatcagaatgggcaaagacaattgggtgaaggcatagattcaacaaagactttctttacggaactccttcagcaaaataattatcagactgctatcgttgggaaatggcatatgcaatgtgaacctaaaggttttgattatttttctatcgtttatgaccaaggcgattattacaatcctggattcaggactaaggaaagtaatggtgaatatattcaggaaactggttatgctacgaatttgattacgactaaatcaattcaatttatcgagaacagggaaaaagataagccattctgtttgctgatacatcacaaagcaccccaccgcaatgggatgccggatgagaaatattatgacttatatgaagatgtgcaattcccaaaaccatctacattcgatgatgattatcgtacccgttgctctcctgcccatacacaggaaatgagaattgacagagatttgaatctggtttatgaccttaaagtaaacgaattgcgagatacccctccttataatgatgaatggagtctttatggaattgataaggaatttaatttgatgaattccaggcagttggagaagtggcatgctgcatatcatcccaagaatgaaaagtttgtaaaagagatgaagagtatgacggatgctgagttgacagattggaaatatcagcgttatctgagagactatctaagatgtataaagtctattgacgatgaagtcgggagggttattgaatgtcttgaaaaagaaggattgatggataatacaattattgtctacgcgtctgatcaaggcttttatatgggcgaacatggttggtttgataaacgtttcatgtatgaagaatcattgcgaacaccgctcataatgtactatccaaaggctattaagccgggaaccgagtgtacggcaatggtacaaaatatagattatgctccgacatttctttcactggctggaatatctaagcctgaagaaatgagtgggacttcattagaaccattgtttcagggagaaaagccggaaacatggcgtactgatttatattatcattactatgactatcctgcttatcaccaggtaaataggcatgatggagtcaggacggaacgatataaactaatacatttctatgataaggatgatcaaggcaattatcgtttgaactgcaatgaactatatgatcttgaggccgatccgcatgagttaaataatctgtatggtaatcctgagtataataaaatagcggaagatttacagaccaggttagatggttatcgccaaagattaaaagttgatgagtattaataggtaaaaagatttgtaaaattaggggatttgattgaagagtgtgtcaaaagtcttttgacacactctttatatgatgttggagagtattagccgggtcagatgatttctatcccctgttccctacaaagctgtagccctacatctttcagtttgaatttctgtatcttaccgctgcccgtcatagggaattcgtcaataaagaatacatatttcggtatcttgtaacgtgaaattttaccggtacagaagtcacgtacatctgattcgtgtatatccgctccttccttcaatataatgaaagcacctacttcttcgccatatttcttcgatggaatgcctgccacttgcacatccttcacaccttctagtttgtaaaggaactcttcaatctctcgcggatagatattttcgccaccacggataatcatatctttgatgcgtccggtgatgcggtaattgccgtcttcatctttcacgccaaggtcaccggagtgaaggaaaccgttcttgtcgattacttcggctgtagcttgcggattcttatagtaacccttcatgttgttatagccccggttgcacatttcgccttgcacgcccaccggacattcttctccggtttcgggatcaatcaccatgacttctgtgtgttcgaaatcgtgtcctacggtattgcaacgaacatcaaacgggtcgtcaatgcgtgaagctgtcatgcccggcgatgtttctgtcagaccatacacactcgtaactttcatatacatcttttcttccacctgcttcatcaattccaccggacagagtgagccggccatgatgccggtgcgcaggctggacatgtcgaacatatcgaacatcggatggtgcaactcggcaatgaacatcgtgggtacaccgtacagagccgtgcaacgttccttatgtatagaggcgagaactaccagtgggttgaagcgttccaccattacttccgtacagccatgtgtcagacagttcatggtggcaagtactacaccgaagcagtggaagagggggacacaaacgcataacttatcgtcgctggtgaacttcatgtgttctcctgtcagatagccgttgttagctatgttatagtgggtgagcataacacctttcgggaatccggtggtgccggatgtgtattgcatattcactacatcatgacaggttacctgactttttagattattcagacattcgtcttccacattgttacccaataagaggatttcggctgtattgtacataccgcgatgtttctcctggcctacataaacaacgttgcgcatgtgcgggaaacgttggctcttcagatgtccgcgttcgcaggttttcagttccggcagcatggtgtaagtcatttgcacgaagtcgctgtctttttcaccattcacaatgcaaagggtgtgcatatctgagttttcgcacaagtattccagttctgcctgtttatagttggtgtttacggtgacatagacggcacctattttggcgcaggcatacagaagagtaagccagtcgggtacattagcggcccatatacccacatgggtgccgcgttccactccgatagaaattagtccttttgccatgtcgtctacccggcggttgaactggctccaggtgaagcgtaggttacggtcggaataaacgatatattctttgtcgggcgtggtttctgcccagtgctccagccattggccgagcgttctttcgtataacatgaaaatagtgattaggtgtttagtgataaatgattagtactgggataattagtgtcaggttagtgataggcacaatgcttgtcactaaccactgatcatttatcactaaatgggtgtatagattactgcaagaattttggctgcctgtccttcgtaagcatgcacgtggtggggaacgatggagtcgtaatagatgctatctccttcctcaagcagataagtatttttgccgtaacttatttccatgataccttccatgaccattataaactcttcaccttcgtgagaggagagtacgaaatcactgtcttccgtagcagctacatcgataataaacggctccatgtggcggtccgcttttgacttggacagggaatgatattccatgtgcttacggctctggattgcattattggagaagctgatgctgtctttggcttccgtcttgcggcagatggccggacccgtttcatcctgatcgtcaaggaaagttcccaggcgtacacccagaacacgtgctattttgataagtggagccagtgatggcaagtcaatgttattttcaatgcgttcaatctgttctacggctaaaccggaacgttcagccaattgctcaatgctgattgactggctttcacggagtgactttatcttttctccgacaatcttgcttgtatccataattgataatgtttttcgcctattaggttataaattgtattgttaaggcacaaaaataaaacaaacttttacttgttgcaacaatccgtgcggaaaaaaagaagcttttattgattttatcagtttacgattctatttacaagactaccttctatttgcggattcgcctggaatacatacattgaaagatttttttgtaagtatgactcgcttcaatggaaaatttggcgatgctttaccttattgtctttttgacattttgtattttttatctgctgaggatgcgttatattcgtccggccactcataaatacaaaagtattcaagttaaaatctgcaagggatagactattagcgtggtatcgaaatatttacattttatttagattgaaatcttccttaaaagtgtactaataggtacggaacctgacataaataagtgtattctctgtaagtagtaacccttttctccataagtagtaacccttttgtctctaagtagtaatgatatcacctctaagtagtaacccttttctgtataagaagcatagataagtgaaagaatatgcaaatatagcgtattcttattctttatctatccataaaacattctggattgtgactttttaaaaaggtgtatgttgtagaaatgacgaatatagaatcattttgatgataaagttcccgtatatctatgattatggcaacagtcacttttgcccgatttatcatttacttatccgcgctccgtttattttaatttcagtattaggaaataactcttttatgcgctctattccttttcctgcaatctttccggataattctaatttcccgattttcacttctgagagttcattggggatatcaatctcattcgtgaattctattttcaagctcttaatctctttcagttccaacagaacgggagggaattcttttactttgattgatataccactgccaatgccttcctcttgggcttctactcttaatttgcttaacagtcctttattcccaatatctttttttctaatcatccagctgatctgaggtcttagggcaaagttatctttgttctgttgcaagccaatgaagccggaccatagttctaatggcgtttctataatcgtatcgttgcgtacttccagatatttcaagtcaactttcacaatctcatcgggcagactgttaccgccttcaagcagtttcaggttgtttcttcttccatttttgtcgtacgggaagaattttatgatccatccgtcaatgatgtcgggggctccgtatttcttttgtgagtgatacttgaacatattacgccagaagtctttgtttacttcaccttttgatgcttttacaaactcctccaaaagaggttccagttctgaaatccaccattcaagtttatattccttcaatctccgggctttgtctaaaaccttttcccaatcttccggggtcccttcaagtgttatttccgggattccgcaaacgatatacatcacgataaattcaaaatagggtttcatagcttccatgattgttatttcggaagctaccttttccagagaagtggttgtagaaaaattgcaggtaagtgtttcaactaagttgcttcctgtatggttacttatctggttggtaaattggggaaaaatctcttcccatgaaagggtggggtcttccagtctcttatttgctttgacgattaaagattgctttccggaaaagtcgacaaaaagatctctcatagattcttggtttgcatttacgtgccgtgcaaatccctggttgattaacagccagatcatgtcgggagataaaacaaacggtcggtgattggcataggcctgatacataccgtagaagaaggaattatagttgtagtttaccagactgtcaggcgcttcgcttttggcgataatattgaaaggaacatttatattcttttcttttatttcgtaagggtatattttaaggtcggacagtataagacctttataaatatcttcataagattttatgaaaagcaacttctcaggctttaagaggttttcaactttgaacgtggtcccgttttgagcgaatgtcgaaatgtaaccaaccattaataagcaaaacagtgtatttctcatagtgctgactttgttgtttatacattgaaatcttcaggaaacaaatatagcaataataaatggtggatagaaggaaacaaaaaagggaagctttttaacggcttcccttttttaatgcttttgctgcaagtaacggattacttacgcagaccgagctctttaatgatggcacgatatctggtgatgtcgcgatccttcaggtagttcagcaacgcacggcgttttcctaccaacattgtcaaggctctttcagtactataatcttttctgttgagcttaaggtgctcagtcaggtgggaaatacggtatgaaaacaaagctatctgggcctcagctgagccagtatcagtgttagactttccgtacttgccaaagatttcttgctttttagcagcgtctaaatacataacttttaattaaattgatatataaattttctcttacgaggctgcaaagatagagataatcttttatactgcaatgatattcaatgaaatttttctcttgctgcaactatatctaatgcaaaattcgtacctttgcacccaaatatataggtattgtatgcaaaatattagaaacattgcaatcattgcccatgttgaccatgggaaaacgacgcttgtcgacaagatgctcttggcgggaaatctgttccgcagcaaccagagcacaggtgaattaatgctggataacaacgacttggaacgtgaacgagggataacgatcctttctaaaaacgtttctatcaattacaaaggaactaaaatcaatatcattgatactccgggacacagtgacttcggaggtgaagtggagcgtgtattgaacatggcagacgggtgtatcctgttggtggatgctttcgaaggtccgatgccccagacgcgtttcgtgttgcagaaagctctgcagattggtctgaaacccatcgttgtggtgaacaaggtagacaaaccgaactgtcgtccggaagaagtatatgaaatggtgttcgacctgatgttcagccttgaagctacggaagatcagttggacttccccgttatttatggttctgcgaagaacaactggatgagtacggactggaagactcctactgataatatcttcgcattactggactgtattgtagagaatataccggctcccacgcagttggaaggtactccgcagatgttggtgacttctttggattattcttcttataccggacgtattgccgtaggtcgtgtacatcgtggtacgcttagagaggggatgaatgtatctttggctaagcgcgacggaagttttgtgaaatcaaaaatcaaggaactgcatacatttgaaggtatgggacgcgcgaaggtatcggaagtttcttccggtgacatatgtgcgttggtaggtatcgaaggctttgaaatcggtgatacgatctgtgactttgaaaatccggaagcattgccgcctatcgctattgacgaaccgactatgagtatgttgttcgccattaatgattctcctttcttcggtcgtgatggtaagtttgtgacttctcgtcatatccatgaccgtttgatgaaggaattggataagaaccttgctttacgcgtacgtaaaagtgaagaagatggtaaatgggtagtttccggtcgtggtgtacttcatctttctgtattgattgaaaccatgcgtcgcgaaggttatgagcttcaggttggtcagccacaggttatcttcaaggagattgacggtgtgaagtgtgagccgattgaagaactgacagtaaatgttcccgaagaatattccagtaagattattgatatggtaacccgtcgtaagggtgagatggtgaagatggagagtgcaggcgaacgtgtaaacctggaattcaatatgccttcgcgtggtatcatcggtttgcgtacgaatgtactgactgcttctgccggtgaagctatcatggcacaccgtttcaaagaataccaaccgcacaaaggtgaaatcgaacgtcgtaccaacggctctatgattgcaatggaaacgggaacagcttttgcttatgccattgataaattgcaggatcgtggtaagttctttattttcccacaggaggacgtgtatgccggacaggtggtaggtgaacactcccatgataacgacctcgtgattaatgttacgaaatccaagaagttgacgaatatgcgtgcttccggttcggatgataaagttcgtctgattccgcctgtacagttctctttggaagaggctttggaatatatcaaggaagatgagtacgtagaggttacaccgaaggcaatgcgtatgcgtaaagtgattctggacgagatagaacgtaaacgtgcgaataagaattaaagaatagcggagatgagttaaactcatcaaatctaacgaaaaaagtaaaggtgggcattcgatttgaaagcccacctttacttttttattttagtttcctccttgccagggtaaatcttcctgggcactgttttccagttcggtttcttctacatggatgctgacattgcttcctgtaccaaaatgatcgatatcggaaatgacaatcgtatgcatataatttctcttgaagttgatgttatagttcaagatatcctcggcttcttttcctgtccggtgcacggtgactttaacacgggcattatcggtcagaatctttcctgtttcaacaggagtcgtcaaggttctcatggaaaccataagctcgggtgattctttcttatcaggagtcaaccatacagtcggtgcaccatctatttggatttccagtttgcaatcagcttgtaatccgttctgtttgaattgtacaccgaagtaccggcgataaacttccagtgtatttgtctggtcgggtgctacggtcaatttgtcgatgataccatggtatctttgaataaaaggacgggtataattgctctgtcccttggttcctattttggagttttcaagatcgaaaagatattcttgtgtgccatccggtcgttcggctgtaatgaatttattcgtgattgtacctaactttggatcgtttcctttgctgagtgtcagtggataaagtgtcccatctttagtcaataaagagtcctttccttcttttatcatcgtacacgagatgcggtattgatatccgtcgaggacattcaacttcagattcccggctttgatattgtcaaagatgccataagcataaggcttttgagtgactgacccgttgggattctgtatgagcatggctacatttataccgaaaatctctttcgaagcatcggcacggctcattggtttttctgtgagggaacactcgccacctatattaaggtccagctcagtgtaagtaggctctttctctttataaacatcttctcctttaaggcaagattgcagaatctgactcaggacgactaatcccgctaaaattaaatgttttgttttcatatatctgtttgtttgattatccaatgttttgatgttcttcttctgtggggttcaaatcggtgttatctccttcaaatgagatagaagtattttcatcgtaatgcttatctatatttataatctttatcagattctttttatttcgttgaatagtaatggattggtttgagataatgctggtccattcttcagcgttctttgggcggtaatagacgttgataggcagattttctgtggcgttgatattgccgtttccgatgttggcgatattttgtagagaaaatagcctctcttccgacatggaaagggaagtagtggcatcggtacattctatgagaaatgctttggcattgctggtttctactttgatggaatctcctatagacaagttctcagctgcaaatcgcagagtataatatgctcttttcagttcaatagaaacaaactttaccggacgattaccttcggttacgggatcggcattgatcaagtcaagtgttgcgctgccataaaagcgatgtgtgtccgtaggacgttcactgatctcattggtttccaggtgcatcgctcctttataaatgtgttggtggaaattttggttttcgtttagaggattgatggaaataactagcttattggtgacagcggcatctacccgtttatctgttgtgatagaaaatgggagtccgaaatatccattgttgttataaggaagttcattctttttcaggaaggtgcagtcgaaccgataaatatatccttcaatcagtccgatgcttatatctgaaatatcttcaaaaagtccggttgcataaggctgaaaggtagaaccctttttccagaaaacattcactgcataaattccggtttcctgaactgtagctctgcttaaaggttgtgaatcatattccagagaaggcccgatttgtaggcctatccagatttcttttccattgatatcaggagtattattctcatcagagcacgatgagaataatatcatccagataagagctataaataagctatgtgtatctgctattttcatacatttcaagtgattatcctacaaatgtagtaaataatcttatgcaaatggagatgacaatgcagaatctttaaaaaatctttaatctatgaatttaatcttctccgcatttctcggtttagctgccggagtttcatccggataaccgaatgcgatgcaatagagcaactcatatccttccggaatatcgagtctcttcaaatattctgctgcatccggtgtggagtttataaatcgtgtcggtcctcctaaacaacaggaacctatacccatagaccaagctgagagaatcatgttctcacccaataaaccacagtctatctgtgacagatcataagacttgtcattggcgataaatactattgtaggagcattgcggaacatattcttgaagttaggatcttcggcagctttcgcattctgtttcttgtaaacttcggtgataccattgataaaatccggattatccactacccggattgcccaggactgcttgttctgaccgttgggggcattgataccgcagttcagtataatctgcatagtatcgcggttcactgcttgcggcttgtatttacgaatactgcggcgtgacatcatattctcaattactgcattttcattgcttgctttctcagtcacagttgtactctcttttacttgcatgccacatccgcagcacagcaacaggctggcacctgctaacatcaatttgatacttttcatattgctttgtttaatattggttttcgcaaagctaacaaaaaagatttagtaatgaagtgattccaattcttttcttaccaaccagtatccaacctgtgcttcggatatgccttcaatcagttgataaggacatataaattgatcgttctgaattcttgaatccatataatagaaagaacatgcactgtctttctcaaaatgtttggcatattccagaatgtgggtcgatataaggaatgagcaatgcaaatacttttttgagtaattcgtttactgcgacagaagcttcaaaggcatcctgtgcgtttgttccgcgaaacatttcatccagtattatcagacatcgcttaccggatttcgctttttgaagaacttctttgattcgtagaatttccgccataaaatgacttctgccatcgcgcagggagtccgggaggttgattgaagtatagattccatcaaaaacaggacaaatcattgaacgggctggaaccggtaatccgcagtgcgccagccatacagcgattgtgatggctttgagggttgttgatttaccggccatattggagcctgtaagaatgcatatattgccgtttgacatcttccagtcgttacttcgtccctctttggtgaacgggtgtacaaagccagtaatagataaatccatcgtttctgtcatttccggacagcaacagaaacttctgttgattgctacatgctgtgctgtgcggcatacgtccagcatataaatttgagaaagtaaccctctgatcagttcaaaatggatacaacggaacaggtaatcgtatttgtcgatggtatagttggagggagatttctctttatctttatagaggccgataacttctttcagttcgctgccatgtatagtgtcctgaatgctttgtgctaattctttcaatagtaaaggggcattttccagggtgttttttcgcaatgtatccaatcggttcaataacaggataattaaggttacacctcgtctgatgatatagcgttgagcgtcgtgtcttaataagcggtcgaatgctgaagtcagcgacactaaaatattaggtcttctgatctgatcacggtattccagataatattcgataaagtcgagctcttcttcatccaaaggaagttcgggcaactctttccaggctatcgcttcttgtctttttcgtatggcagatatatcgttcaggggagaggtaatccaatcgagcatcatgcgttttccgtttttagtctccgttccggagaataaagagtagaggggatattcgtcatatattccttctgtaatgctcaaatctgcctgcgtttgcttgtccgtatccagataagtcatattcttaggtattacgtatagcgcaaaagtaggaaaataattaggaagaacaaacgaaacagataaaaacaagaaaagcggctcttgatatcaagagccgctttcgcatatatatctaaactggttttattcagattagagcttcggaccagcagcaaccagtgctttaccagcttcgttaccagtgaacttagcaaagttcttgatgaaacggccagccaggtcttttgctttttcttcccacttgcaagcacattcgtaagtgtcgcgaggatcaaggatcttcggatcaacgttcggcaattcagtcggaacaacgaagtcaaagaaaggaataaccttagtaggagccttgtcgatagaaccgtcaaggatagcgtcgatgataccacgagtatctttgatagagatacgcttgccgctaccgttccagccagtgtttaccaagtatgccttagcacctaccttattcatcttcttaaccagttcttctgcatatttagtcgggtgcaatgacaagaaagcagcgccgaagcaagcagagaatgtcggagtcggttcagtgataccacgttctgtaccagccaacttagcggtgaaaccagacaggaagtagtactgagcttgttccgggttcaggatagataccggaggcaatacaccgaaggcatcagctgacaggaagattacctggtgagcgtgaggacctttagataccggtttaacgatgttattgatatgatagataggataagaaacacgagtgttttctgtaacgctcttgtcagtgaagtcaatcttaccatcagcagcaacagttacgttttccaacaaagcgtcacgtttgatagcgttgtagatatcgggttcgctgtctttgtccaagttgataaccttagcatagcaaccaccttcgtagttgaatacaccttcgtcatcccatccgtgttcgtcatcaccgatcagcagacgtttcgggtcagtagacaaggtagtcttacctgtaccagacagaccaaagaagatagcagagtcagtaccttccatgttggtgttggctgaacagtgcatagaagcgatgccacgaagcgggttcttgtagttcatgatagagaacatacccttcttcatttcaccaccgtaccaagtattcaagataacttgttcgttagtcttcaagttgaatacagtagctgtttcagagttcagacccagttccttgtagttgtcaacttttgctttagaagcgttgaaagatacgaaatcgggttctccgtagttagcgagttcttcagcagtcgggcggatgaacatgttagttacgaagtgagcctgccatgctacttccatgatgaaacgtactttcatacgagtactttcgttagcaccacagaatgtatcaacaacgaacagacgtttgccgctcaattcttttacagctttagccttcaggtcagcccaagcttcttcagagcaaggtttgttgtcgtttttgtattcgtctgaagtccaccatacagaatctttgctggcttcattcataacgaagaatttatctttaggagaacgaccggtatagatacctgtcattacgtttacagcacccagttcagttacctgacctttttcaaaaccttccaaacttggtttggtttcttctgcgaacagtacatcataagacgggttgtggatgatttccttcacgtctttgataccgtacttgcttaaatctaaatttgccatttcttttaatgatttaaaattttggtatttggtttatttatctcttgctaattctttttacctttatctatctcaaggggggaaggaaaccggtatgaattaagccatattccgaacagtcccttgtttttcgcgtacaaaagtagtattttctttcgaaacaatcacctgattagagaaatttttctttaatgagaagtcttttataactccataacaatatctgcaaactgaatgttgcaaattgcacaagaaatcgtttactttgcgcatattaattcaaatcacatcatgaaaattatcaattttgccgagacaaactccatcctgaaccagtatgttgccgagatccgggatgtacaagtacaaagcgaccgccttcgcttccgccgaaacattgaacgcatcggggaaattatggcctatgaaatgagtaaggactttgcttattctcagaagaatatccagactccgctagggatagcacccgtgcagactccggataaccaattggtattaagcaccattctgcgtgccgggttgcctttccatcagggctttctgagctactttgacggtgcggaaaatgctttcgtttccgcttaccggaaatataaggatacgttgaagtttgatattcatattgaatatattgcttcaccgcgcatcgacggaaagacgctgattattacagacccaatgttagcaaccggtagcagtatggagttgagttaccaggctatgctgacgaaggggcatccagcggagatacatgtcgcttctatcattgccagccgtcaggctgtggaacacattgctgaaacactccccgaagacaagactacaatctggtgtgcagccattgatccggagataaacgagcattcgtatattgttccgggactgggagatgcaggagatttggcattcggcgaaaaggaatagataccaataaaaagtttccccaatctaccctcactaccctcactttggggatagatcaataataattaggatgttaagtgtggtggtagtaaaaaatcctgtgtgagggtaagtgggttactctcactgtgtgtctcgtcctggttttggtccataatcagcccttaacggaatggggcattcatttgttttacatcagctgttattctgtttataatcagtgaaatatctcatttagcttaggaataatcaggtgttgaccttggttaaccggccgattaaccttgattaataggctcgtcaaccaaggttaaccggccgcttgatcaaggttaatacccaataaggcttagtgtagaatgcaaaaagatttagggtaaagacagatgattgcctgtttgtttaggaatgcttcctaatggtttggttgcagaaggtatggggatgatctttattacaatggtgatttggaatctttagtcattctttccgtaattgcgctttataatagtggcctgaaaggcttttttaccggccagtagcaggtcttcgtcatcaaaggcacgaaggctgtaccaaaaaagaaaatctcccgtaccacccagaataccgaataatcccagaaagaatatattggcctctcctgtacagaatccatggattgcaggcatcactcccaataagatgcccggtaataataaggatacccgatagaacttcaatggaataggacgagtcagagaaaatcctactccagtccagtcaaaatgccagtgtaggagctttttatcctttccgctaaaccagtaaagaattcctgcctggattagtatataaaacacgaggagtaaaaatatgcaaagcataacttggggactgctgattccttttacagaggtacccaataaacgaccggcactataggatgaaggttcatcccatacataaacaaacagatagctacctatcaggaacagaatgaagaaaaacagaaatcctcttatgttgatagactttgctgtgagtttcacttccactccatccgggcggttgaatggttccttatttgcttctttcttttccataattcctttttactgatttctacgctgcaaagataacaagagtatgaaattaatttaggttatcagaatgttatctttatgttaaggtggaaagaaaagtttatctatatttgcctgaaatatagaatgcttgatgaaaaagtcgtattatatacttcttacaataactgcaacagcagctgtcctgtacttgcttggaaattgggtaggacgaagtttcggactgaaccggcagcaagtgatacgtaatatccacgaagcttacggccgtgcgacggatgcatttgaagccggacaaactaaggatatggctgcctttttccgtaatgaactggatgaagtggatttgaagcggatcaagtttcgcctggatacggtacctttacacggtgattctatcgtattgaaacaggatttacgatatttttctgattatcggaaactgttggagcaacactatacctttgtatgtcctgtgaatgacactcagggagtacatgcttatatccagaatcttcgtgccgggttcatcggtaaactgctttatatgttcttcggaacgatagtggctttgggacttctattatttgccatacgtaagcaggtggatattatccgccggcaggatgagttggcacgaatgcgtgaagatttctcttctgctatggttcacgacatgaagaatccgatcagttccatcctgattgggcttaaagtgcttcgtagtggaaaggtagatagtaagcctgagaagaaagaaaaacacttcgatattctggaggcggaagctcaacatttgcttgcactggccaataaagtactgactatctctaaactggaacatggacaattactgttggataagaattggattcaactccgtcctatggtggatgagttggtacacacgttcacggctaaggcagaaaagcctatcacatttcaggttgatttgcaggcagagggagcttatgctgatgaggagtatctgaaagaggctttaagtaacctgatagataatgctgtgaaatattctaaggatacaatagatatacagattacttcctgcctttccggacagtatattcagatcagggtgcgggataatggaatcggtattccgcttgcggctcaacggattgtatttgataagtttgaacgcgtcattacccggaatgaggatgagaagaagaaagtatccggtttcggtttgggactgaactatgtgatgaatgtagcccgggagcatggagggtatgtcagtgtggagagtatagaagggaaatatagcgaatttactgtttctttgccgttgccggcggagaacgaagaggctaatccggaggattgatattctcttgtcgtatatgagcgtgaccgggcctgtctgttttttttacagataaaccggatcacgttctttttaattgttattctacaggtgggactgaacattacggcacgataccggtgcaaggtctggagagcttgctgagaaaaccggtcaaagattaatcttctacccatagtacagtgatactaaaggttaatgtatgcctgatgcagatatacactaattcttttattatcaaagggaaaggacaggaaaacttagaaagcgcagttattctaatactccttctggaattgcagggatcaaattgaagttccgataatgtcagtcagttctgttgtttcttgttttctcctaatgggaactccggttttctcttgtggaaacgctcgttccctttaatggaacttactgtattgacttatctttttgttctataactgaagaggtgtctactatacctcttttcccttatttgattcaaggtaatgactctgtacttacataacccattccagataattctctggcgtgatgactacagtctcttttaccggataattattcaagaaaggagatggaaaggtgattggacgtttattaggattccacttcatttcaaaagcggtgaagttgccgtctgcttcttctatatagtctatttcttgttgttgagtggttctccagaagaagctttttgcataattcccgttgtaatgatttgctttgatgcgttcgctgatgaagaagttctcccataaagcgcctgtgtcttggcggagagatagcggtgcaaaattctggatgacggcattgcggatgccattatcataaaaatatattttcttgctctttttgagttctgttcgtaagttacggttgaaagcattcaggcggaaaatgacatagcatttctctaataagttgatgtatttttctacggttttgttgtcggtcccgatggtttacgctacttcgttataggatacttcactgcctacttgcagggcaagggcgataagtaactttaccagcagtatggggcggcgtatctcgttcattaccaacaggtctttatacaggtagctgttggctatgttcattaataattctttagcctcatcagtatgattgataatgtccggataagaaccgtatataagccgggattcaaacatttgtttaactggcaataaaccttggctgtcatataattctgccgtagagatgggatagaggtgatattcatattttcgtcctgtgagaggttcgctcagattactttgtaattcaaacgatgaagaaccggtgacgagaagctgcacgttggtgaaattgtctgtaatgcgttttagggttaaacctatttctgatacacgttgtgcctcatctattacgataattctgttgttgccgatcagcattttcagttcggaggtattgatgttggctaacatctctttcacttccggttcgtcgcagttcaatgtcagtactgcttcttttcgtccctgagtgatttgattaaatagtgtactttttcctacttgtcttgcaccgatcaggataatcgcctttcctttgaatagcttactctcaattaccgactaaagtcttctttgtatcatctctttcatcttactttatttcaaggtaaatataggcttttaatgcttaaatcctaaaaatatatatgatatttgggattacctgttggcgggattaattaagaatggtacagaaaggaagaaaaccagttgacgagttg
